United States Patent Application Publication US 2007/0054278 A1 - sequence listing, part 72

SEQ ID NO: 95915 - DNA, 130598 bp, Homo sapiens
  misc_feature (1)...(130598): n = A,T,C or G
ttagcataatgaaatggtgaaaatgatgaaaggatcccattctgaaatagacacttatctttcaaaggggctgggtggtttctttcatctctaattcttgggacatcagataggcttgctactgagcactgatttctcagacatgttggtcttgggactcctttacacattttccaattattgaagactccaaaaaacttttgtttgtgctgattatatttatcaacatttactctctttaaattaaaggtgagaatattttaaagtgtctagtaattcattttaaataggaataacaatgccattgcatattaacataaatagcattttttttgaaaactaaataaactaaaactgttttattttctaaaataaaaaaagtgagaagaatggcatttttttacatttttgcaaacctcatctatgtctgagttaatggaaggagctggattctcaaatctgcttgtacattaaatctgctgcaacatcacacttcctgtcaccttggaaaaccccatcgcacaattgtgagaaaatgagtagaaaaagtaagtaatacctcagtattactgtgaaaatagctgtgactccatggacccctataatggttcagtgacgccagggattccctgggccccaccttaagaaccactggggaataaaatgcattcccagtgggcatcaaatgatgaaattaaaaaaggtaaaatccctgcccacaggaactcacagtccagcaaaggaaacagacaagcagcccaaacaatgtggtaaatgttctcaccaagagatgtcccagcatcagggggccagagacttggaatatgccaagctcctcctacatgcgggccacacccatgacgattcctccacttgggatgttctctcctgactccttccctggctaaacctgcccatccttcaagtcttgactgaccttccagactaaatgacctccttcctccaccctctctcacggctccccatcctcctcctcacagcaatcactgtgtgcaattaggcattggtctcccagccccctgcacacagcatgggacttagcaaaggtgcaataaatatagatagatacatagatagatagatacatagatagatagatacatagatacatagatagatagatagatacatagatagatagatagacacatagatagatacatagatagatagatagatacatagatagatacatagatagatagatacatagatagatagatacatagatagatacatacatacatacatacatacatacatacatagataatattgaatgaatggatggatagatggtatcaagtaattacatgaaggcatcatataattacaataggaagaactaacctgtgccttcgggaactgtgctctgggaacagcccttacaccattgctcagaagaggaagcagagaccctgagggctgtgacttgtcccaggccccacaagagggagtggccaaggcagggacacacatggccagagctctttcctgtacagtgtgcagaagggctatgcaagacaggcccagagagacggaagaaggctggtcccatcaacagctgggatgggcgtgggcagggccagggcccaggggacgtgctcaagatgccaagggcacctgaatacaggtgctcattcccagattcctgcaaaggcaggggttgcccttgagggtgaggtactctacacccaccatggtcctagatggcttcaggcccttcccagtaggcaccgtccctcccttctggcagggaccaccctcaacaccactgtggctgacagaggccaatgtgcaccaggatttctgacactggcttcccagaaggaagagcttgtgcaaagcaggtgaggccaggcacgcaggctctgaactcgggggccagagagagagtacaggacaggcctggggacgcggctccctgagccttggttttgtcacctgcaaaacgggccagatactcccatctcacagggcagatgcaagtgaaaggacccagggaacatgttctgtcattggacttttgaaagctcaggacactgacatggcgtttttccagtgaaaacctaaagacagaaagggagcagggtctcttttaagagactaaacctctgccagtgtcgcaagtgtcctggggtagagaacacagcaggacacgacccaccaccctaggagagaggtgggaggacctcagggcagcatcaatgggccagaccattggccagggcagtcctgggaataggagcctgggtgtgctgtcaggggcaataaggtggagagaagagtgccagcatgggacaggagtagcagaatgtctaccaggacagaccaccccagaggtctgggggaaaatggatgggagacgtgggaaaaccatcaccaagggctggaagtgaagtggtgggacctgaagccagggagtggcagtggggagtgaggaggggcagacatccgagctgatttggaggaaaaggcactaggactggtgaccagctttgtcgggggaggtcaagtctagggctacagccagggatccatgcctttcgagtttaggaccacagagggagggccagggtgaagtaggaagtggctaaatccatcagccaggagagttcagtcacctaagagtccagccaagagcccccacttttaaaaaccgctgcaatttcccagtgctggcctctgcaaggggctctgcatatgtgagctcatctaacccacttccaccctctggggtggacgccgcgacggccccgtttcaacgatcaggaaactggggcacaggagtgaactgccctaggtcgaagctcgtaaaatggagagcaggattcgaaccagggtcgctggtgaagtccaagccggcagctgccacaccccgaggaaggtctccagtttccctcgaagctttctggccgtgagcgggatacacctaagggccgcgaagcaccctattcagatcctgccctcccttcctcattctttgcgaaatactaagggtcctccctgccaccgccggtgtagacaaagtcaaaccactacagtcagaccggagcctggggtcgggccctccttacctgcgtgctgctctcgggccccgccccgctccgccccggagggatcctcaggccgggcccagacctaggagccacctggggatcccggggtggctgcgcgccgagggggcgccagcggggacgtgagctggcgccgagacagcctcggccccccagcgccagggccactgccaggagacccccggccagcacccacgtggggcgcccccgggagcccgaggggtccatcgcctgtcgggacccgctacctcaaagcggcgggtgccgccgagtcgctggagcttccggaccccaggcccgccccgccgccgagcatgctcagtgcgagccgccgccgaaagttttctggaacaaacacccgcatctggggcttggcgggccaggaggtgccggacgggcgtgggagggggagagcgagttggcgcggcccaggcgcccggcggccaggcctgggtttgcttgcgcccaaaccgaatcagagcgggtcactcccctgctccccgaggttaccaggaccccaagggcccctccgctaccgcctacctgggtctgtaagcctcagctcagacgcacttcccctgggaacggtttcctgacacacggatgtgaatccagagtttccccatccccgcttggaaaacggagaagcatttggagcgcggggccgggagtcctggagcacccagaaggttcaggaaagctcggggaggagggggtggccgcagagaaggaaaaggaccctcacttccggttgcgttcagtgcagaccagctgagcacccactgcccgagcctgctgtgggtcagccctgggccggcccgggtgcccctcgcattcccagtgagaaacaggccagccgctgggccacctctctggggacctagaaagaggggagctggtgtctgaagtcgcagccctaagcaagctctccctgaactctccgaggggacagggatttgctttgccaagggacgcaggaggaggaggagaaagacacaaaaagggggactggtggagccttttgtgtgcttcctcatccctgcctaggtcctgggtgacagctgacacctgttgacgggagagggctccactcccgccagccttcctgcggggcaggctgttaggctgtctataaagtctcaggccagcgagcctggcccctggcagcctctctccccataacccagaccatccaaggacaggcctttcctgacctaacatggacaaggccatggggttcgagaagctgagaatttataagccaagttccccacaccagggggtacgtggcagctgtcaggcatgtgacaagaccacaagctaaatgccaagcatgttgctggaccgttggarttgtttgacagtcagtcatttaaaggttaatttaacagtcaacaactttatgataaagtaaaaagcaaataaccctacatttaaaaaatcttcttagtatttttatggagtcagggtctcactatgttgccaagactggtcttaaactcctgggctcagacaatcctccacttgagcctcccaaagtgctgggattacaggcgtgagcaaccacacctggcccaaacaccacattttaaaaactaaagcctaagcattcatggaaatgtaaaacaagagcgtcaagttattgcccccatacatgtccccaggaaccttggagatgcttctaaggtaatatataagaagctccacatagcagagagtttgccctgaagccagacacaggtgtaaatgagacaagaattctgccccactccttaattgcaaatgagtcacctctcctctccagctgtcagtttcttcatttattaaaaaaagatgaagaatttggataacagttcccatcttgccatgaggaaatgatgaaacaaactagaaacaagctggacatctaggctgaaaggacaaagccctcctctgctgaagcagatccccatggtgtcccctagcccggcccacacagggaattaagctccacagggtaggtgtgtgtgtgtgtgtgcccctgagtgcaagtgtgcagtcgtgcacgtgcatgtgtgctttacccaggcacccaggacaaaagcaaacatctagtagctaccccatgtttgtttaaagcaaacacagtgatgaactcctttaattttttatcactctaaacaactgtgagatactcactagcctggacactgcctggtttgtggctggcctatcccccagcctgcaacacacacacaacagattctctccaagtgctgagtaaatgaaggatggtgcagtgtcctggtcctagtggggagcgggtgtaagggtctctttatccattgtctcagtggggagtgggtgtaagggtctctctacccttggtcctagtggggactaggtgtaagggtctctctacccatcgtctcagtggggtctgggtgtaaggatccctttacccatcctcctagtggagactgagtgtaacggtgtctccacccattgtctcgaccttccctgggacaaaataagattaaaacaggagtcttcgcgtgagcaagttcagaggcgtggagggcggtgtgttcccgggaaggttgatgggtagaggttaggggcaagggcagggggttggaattgcattgatcccagcgtcttcatcaggaggatgggcggagcacccaccgcagagggttattgagaaagttaatgagatcattaagctaaatgcgtagcatattctaagcctcaaaaaacttaaaggagccttctaagcctcagtaaagttaaaggggtggaaaccgggcccccctccggaagggtccggggctgggaggcgcgtctgtctctgggcatgctcagtgcaggggcagggctggggcgggggtggctgaaagttttgagcggtgatccaggctcctccctccggctcggcgaagcagggaaggggagagaagcaggagtcgggagactgcacaggccagaaagtctgcggagcgggccgcgcccctggcccgcccgggctccaagtcccgcgtcgccgccctggcggggacggtgcagcaggcggcgggatgcggcggggcggcagcctgagcgccccggatggcccgcggcggggcggcctgcaagagcgacgcgcggctgctgctggggcgggacgcgctgcggccggcgcccgccctgctggcccccgccgtgctgctgggcgccgcgctcggcctcggcctcggcctttggcttggctgccgcgcgggccgccagcgcacgcgacaccaggtgggtcggccgagcagacagcggcggggcsgggagcgcggggcgcgtggcttctgggtcctgcgggcccggagccccggctctgcgactccttgagcctggttgggaacttcgcacgcaaccgcttaggcgtcgggttccccttctgctccaggagggaggtggcggcgtgactaaagggcattggcctggggtcccctgcggtgcctgttacatcccactccgttgggtgatcctwgacagcagcccaactgcgccacgcctcggtctcctcatctgcagcaccaagggtttggacaggaygctggccctgctcgccatggtggacagaaggacggctggggctcccacgcctgaatgcctattcctgcttctgcctcttccatccttgcggtgtgggttacgtcgcctggcctgagtcccagctgccacattggcattcattttttcattcaccccacagtaaaagttttcaggcaccttctacagccagtcactggcctagggacgacattcatgagcrggagagaccctgccttgaggctgtgaacctcaaggagaaggacgaattgcaagtttgcaagtaaactatcggttatgacaccgcatggggagtctgcgatgggacrctggcaatgctagcgtttattaagtgctgtgtaccaggcactgaactagaccctctccctaaatgatctcaatgaatctccacaacagtttgtctctgctttgcagatgaggaaactgaggcacagagaggttaagyaacttactaaagtgacagaagtgtctaaccccaaagccactgtgttcttcatggatgagggtcggggtggctgcctgaaggagaccagtggatgcttcctatgcaagtggccctcatggaattggctgtgcatggcaacacctggcatatrgcasgcattccatgaatagtggtatggccactattttaggtccttgcaacttctgcctctttggggtgggaggagagtaaagtctgcgcgatcagaaacaagatggcgtggtcttgctrcccccatttctggcccgtgggaagatgagacagatcttgtgcggtttccatgtaggcacaggctctttcagaatataggggaatttggtgactcatggggagcattacaccgcaaagagctgatgagggctgaaactgagataatgcaagatgctcgtaggtgagttgggggttgtcagatcctgctggtgattaagagacactaagagatgctggcttgttgcatggagagagaaagggaagtaacacacagagacttggctgggtgtcctgtgcartgtttatagacatctggttctttatcctccagcccatgaggtggaggaactgccattatccccactttacagtgaggcagkggatgctctgcaagggtgtttgtccagggtgccacgatgagtaaacagtgggactgaatttcaaccctagttggtttgaaccccaaagctagagccttaagtatctgctacctggtgaggtggtggttagtatcccatttgctagctgagtcagctgaggcttaccgggattaaccaagccatctgggtttgcacagctagtcagttgagggtgatggtggctcagaccagggtggcagccatggakgggtctgtggctcaaagtaggactaataggattttgttacagtttgatgtgatccttgcgacaaccttctttctaatgagattmttttcctcctgtctcctccctctagtttttatttataaaatgtatgtcagacaatatgattstcctgattaaacacctccagtgactcctggctgcctgcaaaagataatgcccaggctgggcactgtggctcatgcctgtcaycccagcactttgggaggccaaggcgagctgttcaactgaggtcaggagttcgagaccagcctggccaatatggtgaaaccctgcctctactaaaaatacaaaaattagctggcatagtggcaggagcctgtaatcccagctactcaggaggctgaggcaggagaatcgctggaacctgggaggcggaggttgcagtgagccgagatcgcaccattgcactccagcctgggcgatagggcaaggctccgtctcaaaaaaaaaaaaaaaaaaaaaaattagagaccagcctgaccaacatagagaaaccctatctctactaaaaatacaaaattagccaggtgtggtggtgcatgcctgtaatcccagctactggggaggctaaggcaagagaatcgcttgaacccaggaggtggaggttgcagtgagccaagatcatgccattgcactccagcctgggcaacaagaatgaaactccatctaaaaaataaataaataaataaagataatgcccagttttctagcatggtgcatacagtggcttaccttcccctgagcacctaccctgatgcacaggtgcccagccacttgcctcatcctgctctccagccactcaagacacctcrctgttgcccgtacacctctgcacttctgcacatctgttctctccgcctgcgcggtcctttcttagactctatcctgctcagccctcaggacccagagagatcaccttcttaactagggaagccttaaccttccacactagatcaggtacttccctgctttgtgggcactctttgttctcctcctctgttccaagtcacaattttatcttgcattgctttccttttgctgtttttgttttattttgttattttaacttatttcatcattaaacctgttttatttacatcaaagttgttcatgcacataatttaaagtattagttcaaaaggagcaatagccccacccattttctacttctcaacagtggccttgttaactctttcagctgattattttgggaatttacttcccatttctaaataatgtgcctatattgctgctgcttgcattttttttttttttttggctgcrtgcaatagccgttgaccctccactgtggaaaggaagaggacttagctctgttgcctcccttcctccataaaatgtccactcttcccaacaccaccaccacactctcaatacggaggttataggggaatttggttaaatttgtattcagtgtttccattattacaattctacaaacattatctactgcaagttaaggatcagttatggtcatgaataccttcttttcttgcacaacattttgtttttcctgaaattaatagctattctctttttttgttttttgtttgttttttattttgtttgagatagggtctcacttgattgcccaggctggagttcagtggcatgatcacagttcacagtagctttgacctcttgggctcaggtgatcctcccgcctcagcctcccaagtagctgggactacaggcttgcaccaccatgcctggctaattttttttttttctattttctgtagagtcagagttttgccatgttgcccaggctggtctcaaactcctgggctcaagcagtcttcctgctttcacctcccaaagtgccaagatcacaggtgtgagccaccacatctggcctcggttttttcatttgcttagattctgtgtacttatcattcatttaactctcccccacatatgtgcgtttgtgttcaagacgtttgaatgcattagatatttgatccattttatcttcttgagaaaaatatctctcccagaaacattctgacaagctctagtttgagctggttattctctagacagctctctaaagtgtggaccagaccagcagcatcaatatcttggggagcttgatagaaatgcatattcttgggctctaccccagactcactgaaggagaatctctagggatgagtccagcaagctgtgtttaataagccctcctggtgatttacatgttcttaaagtttgagaagcagctactcatcatgctgggagtttctcatgtctcttctgggttgaatcctgtttcagggattccctggcactccccttttgttaggtaatttcattgcatgcctggagcacatccttcagtagctttttcaaaaagggatggatgcaactcttttgagaacttctatgtctgaaaatatactcttctatctttatacttaatttggtaagaataattagattgggaataattttcctccagaatttcgaaggcatttttccattgtcctttttttttttttttttttttgagatagagtcttgctctgtcacccaggctggagtgcagtagtgcaatctcggctcactgcaacctccacttcctgggttcaagcaattcttctgcctcagcctcctgagtagctgggactacaggcatgcgccaccatgcccagctaatttttgtatttttagtagagatggggtttcaccatgttggccagtctggtctcgaactcctgagctcgtgatccacctgcctcggcctcccagagtgctgggattacaggcgtgagccactgtacccggcctccattgtcttctagctgttgtagaaccaaactgggttccactcacctggcacagtaagaccagatagcgacactgaggttttatagtggtaaaaaggaaggtgtttattcacagtgcaccaagccaggaggactaggcagctcatgctcaaatcctgactgccctgatgacttccaggtgaggtttttaaaggtagaggtaaatttcaggaaagcagaagttacaggcaaaattgtaaatcaatacatgaaggtgacaactggttttggcctaaaagggccagacatcttgaagtggaggcttgcaggtcagaggtagattcaaagattttctgatttgcaattttgtgaaggaagagaagctttgttttaaaatgtaggttcggcagaaaagaaccttagctcaggctcctggtcatgacttcctctgggctccccaggaagagctttagaacaaagaatggtgctcagagttcagatctcagataaggggcagctgaggacctcagccatggatcctcagagtggacccattggatgggggtccaggtttctgaaaaacaactcagggacatatgttaagatgttatctttagtttctgcagggaaaccaaacatctcctgactctaacttccttggctattgttttaggcgactattaccttcttgcttatcaagttgttgataatttcccttgaagaaagtcaggattttcctttatttccaggcttagggcaagggatttgcaggcccttaaaaaggggggactctgcttcatctcataatttccatggttgctgttgagaacactgattctattctgatccttgataccttacacgaaacctcttttccttttgttcctctgtagaatcttaaagaacctttacctttgctcctagtaaatgaaattgcaccacgatggtcttggtgaaagtcatttgtcatccacggtgtcaggcatttggaacatccttttgatcgagaatcattttcttgatttctttgatgattcttttccttttatatgttttcttcttccaagaactcctatcacttttttaggttgaattgggcctccaatcttagtctttctctctcacttcgattctctttgtcttttttacattatctttggagagatgtttctcaactttatacttgtattgagtttttcgtattttcaattttgaagagtcatttttttgttctgagaatgttctatcctgttcttattttatgaatggaataccttctctgatctctctgataatattttagttgtttatttgtttaaagttttttttccctgtgtagtgcgttccctgcttgctttttccttttgtttgttttggattttatctttcatattagagtctgtcctcaaatggctagtgaccctctagacattttcaagtgatgctgatgctccctctgtgggatatatatattttttcctcgatgtctttactgtaggactatctgactgggttcttctttgcagracccttgtactggtctgctatggttggtaaacaaccccccaaatctctggcctcatcatctaccccaagacccacgacagactgctgcatctacacaggtttctgtctatgcccagcatgggcctgcctccaaggcctttgcacttgctattctgtctctagaatgctcctccctgagatatctcaatggctcatggcctcacttcttttaagttccttctcaaatgccgctttgtccaagagactttgtctcccatcatccttcattcccccaccctccactgttactctaggacatgattgtccctgaattgctatgtattttttcatttgtttgcctctttcttctctcactgcaatgtcaatgccacaaaagcagaggctgtgtattttgttcgttactctattcccagtacctagaacaaggcctgacacaaagcagatgctcgataatagtagctgattaactcagtgacaaactggtgatgtttctttagttcaaagattatattcatgagcaggtagtgattaaaggggaagttgagaagtgtctgggataacagagttttaaatatagtctactctccttattcatggtacttatgttctgtaaactcactgagaacacagcattrgcgaacactgaaccattgttcctggggggaaaacagggttaggttcctacaagcctctggtcacaacatttccattaaccagtcaatacatagcatagttttatgtatgtttctgtttaaagatatcttatttaatagatatttttaatttattaacattggactcacagacatcagctctgtaactcacacctgaatgaagcttctgtaacacacccatttctccagagggcatgtcatagttttcttgtgtttcgggagactagacagcacttctgcactgtgtttggtggttattttaaacagtaaagtcaccgagaaaaagcacagaaatgcaaaaactgtgctactagagtatgaaaagaatgtttgtttacagcatgagagcagagacaagaaggcagagtgctactttgttccatctcaactgagcacrtgcatgctgggcaactcagattgttcatgctctgcatgtatttgtgaataactgtaaaagcgccatgagcattggtttgggggttctaaataaatattagcaagtacaggaattggcaaatacagaatccataaataatgagcattcattgtagttcagaatagaaactactctataacttaaggtcacctagcatattgtcttaaaaaccattcaatagaatgatcaagatcaacaggaaaattatatgcatgtgccatttctcatgcttagttgttaaatccaaagagctcccagtccaatggggtccccaacctagaagaaaaatggaacgagctttgctctgcctcttgcctcaagtcctgagggtgcactgaaatggggcatcctggaggccttaggggaaccgctcaggaaggtgacctgtgcagtcttgaaggacatgtagcggaccccacgtggggtgggaggcgtcacacacagaagaccaagcttgagaagcacagaggygagcagaagtggctgctggactgggggagttgactggcaaaagtcacggtggggaccrggccgactgacctcaatgttgtgtttctatccacccccaactcctgaccttcgggttttagaaagacgacactcaaaatctgctcaagaatttggagtctaatgcgcmgaccccctcggaaactggctccccatcraggaggaggaagagagaagtgcagatgtcgaaggacaaggaagctgttgatgtaagcttggtgttgatgtttgtttgtggaggcacatgtgggaggtggggtattccccctggaagccgggtgtcatgtagacaagcctctgacagatatagtttcccaatgggctgcttttctgaggcataatttacatacagtcaaatgcgcagactttaggttttmcagtttgatgagttttgacaattgcatgccccttagaacaaatayccccctgagaatgttttcatcacccagcaagtcctctagtgcccctttctggtcacttcccgcccccacacacttccagaggtgcccatgcgtgggatttccattgattggttctgcagttctggaaccttatgcaaatggaattgtgctgttctgtgcctgtgttccctccacagaatgccttaagatgtttccctttcgttgtgtgtatcaataattcacccatttttattgctcagtggcagtcaactgtgtggatgtgccacactttgttgattgctcactgtttgtgtgtatttcattggcagaccgggctgttttcagaatttgactgtaatgaataagcctactatgaatgttggtgcataagtctgtttattttcatttcattttacttcctttaattaaatctctgggggtgggggtgctgggcctctggaagagatgttaaaaaaattctctttgttcctgccttcctggaacccttmctctatccacagaacatcgctttctgggtgagccccgtgggtggagaggatgtgacatttctagtcacctccttgtcccctaggaagtactgcaggcttcatcttctggaataaggggaagagatggarctagcattattttttagcatcactcatgccaggcagttttacacctctcacctgtgagtgatgccaacactcacgtgaatgatctcgtgcccttctctcagcagccacgtgaggctgatctgatttatattcccattttccagatgaggaagccgaggctcagaggtaggctgctttcctgagtcccrcagctgggggagtagccaagctgatatttgtccttgggtttgccaggcccctgctccagagtgctgcrtccccacacccaacttctagcctctgctcctttccaacctgttccatcctgttccgcagccttagcttaccacagaagaaagtgggctcgggatwtaaaaacggatttccccaaaggtccgamgtcagtagggctcagcttctagttactctgaacaatcagcttttgcgttagccctgcatctccctccctggctggtgggatccctgtagaggggggcattgccctgcccttggccaacgtggacggggggagagatggggaagcctctgctgctatcccgggacatggcttgcaggagatgagtctggaacaagcagatgtttaactttaccgttkgtaattattatcttgataatgggcatstgctaggtgtagctaaatagtgaacaggtaagacattactaggcaggaaaatatgagttaatttacagcagggtaaaaagacttaggtctccctccaaacactgattgagcccctatttgaatgtgccctgtgctgtctctgacactgtgtgcttgcctctccacgtgtgtctgtgtatgtcccagtccatcactctctcatgtgtctctgtgggtctttctgtgtgcatctttgtgacagtacgtgagcttcaggtgcatggcatctccctgtctctgtgtctctcttcccctcctctctctctactgctgtgccccctcccaccctctcacactactagaatctgctgacagatgtgaaaacatgtccacccaaaaacttgtacacaaatgttcaaagcaacactattcacaatagccaaaatgtggaaacaacccaaatagaaaaactggaaaaataaaatgtgatatatgcagacattggaaggttatttggccataaaataaaatgaagggccgatggrtgctacaacctgaatgaacctagaaaacatgctaaatgaaagaagccactcacaaaagaccacatgtyataggattccattcctgtgaaatgtctagaataggaagatttatacagacagaaagtagattagtggtttccaggggctgcagcagaggaaagggagggatgggrtgacagtgaaagaggacaggtttctctttgatgccatgaaaatgttctaaagttgacgataggctgggcatggtggctcatgcctgtaatcccagcattttgggaggctgaggcgggcagacacttaaggtcaggagtttgagaccagcctggccaacatggtgaaaccccatctctagtaaaaatacaaaaatcagctgggtgtggtggtgcatgcctgtagtcccagctacttaggaggctgaggcaggagaattgcttgaacccaggaggcggaggttgccatgagctgagattgtgccactgcactccagcttaagtgacagagcaagactctgtctcaaaataaataaataaagttgactatagtgatggctgcacatatctgaagatagggagaactatgaaatagtatacatgagtgaactgcagggtgtgtgaattaaatctcaataaagctgttaaacaatgctgctcacacatagggtacccttgaatgtgatgaaaacacatctggctttgggagctagaatcctggaacccagtcccagctctgccacatgtttgctgtgtgatgttgggcaggaagcataaccygtctgagcctcaagtttctcattttaaatgacagcagtgatggtgctccccctgccattcccgagtcacccagggctgagttaatgcgtgtgaacgttcctgccacggaataagtgctcaatcagtgtttgcagggggacctaaatatttctaccccgctgtaaggttatttttttctgcctagtaatgtcttgttcactattcagctacacctagcagatgcccattatcaagctaataattgccaagggttaagtgaaagatctccttgtttcagtgactggcttgtcagaatgcttttgctttctgcagactgagcttgtcaaaatatgtggtcagggctgctttggcccagtggatcgagctataactttcttgtcctctagtgcacagaaaaccagggccttgtggttcctgccacgccttggatgacctctgtttaatgaacaactcatctcagccgaaaacaaacaaaattccagaaggctctgaggcatgctattccacagcctccgtctctccatcccactcctttgctttggagggagggagagtgggtgcctttaaggatgcatttatgcattctctgaaaagaacccctttatattggtgatggaaatggtttttcatttcctgcaattatactttaaccaattttctgaataattgcattgctccagctgaggaagttttaccttgtacatttcgctgcaaccaattttctaaataattgtattgcttcagctggggagactctcagaatttggaggacacctgaccttaatgaggagagctttaaaaaactaaaggcagtggctcctgttcaggtagcagagcccgctccttccctgatttcaggtgtcacatgctcctgcatccttcatcccctggcagagaccatgaccgtccttgggctggccctgcaggggttgcagtctgcaggtagacagatcaggtggagccttcctgccagctgggatgtgtttctgatgcccatttcccggctcctccatccccaggtgctgcgcctacaggtcttgggtggacccmgcaccaacatcctttccttcttttttttttttttttgagatgaagtctcactctgttgtccagtctggagtgcagtggtgcgatctcggctccctgcaacctctgcctcctggattcaggtgattctcctgcctcagcctcctgagtagctgggattacaggcatgcgccaccacacccagctaatttgtgtattttttagtagaggcgggtttccaccatgttggtcaggctggtctcaaactcctgacctcgtgatctgcccgccttggcctcccaaagtgctgggattacaggtgtgagccaccgcgcctggtcctttccttttcataattaggtttttgttttgtattccccccttgaaggtcaactcctgggaagcagggattttgcttttctctcatggtcatccttttctttgtcgtttcttttctcccctgtttgtaggaagtttacaaatgcacagggcccttttgcttttgtatctttcccttgagcaaatrtgtctcccctggacagtcagccagggctggtgtcctgggtgtgacctgtgaggtcacagggaccacgctcagataggcccactcttggctggtggactctgctgtcactatcttgaaattcttgatcattattaaataagaatccccattttcattttgcaatggactctgcaagtgagtcctgagttcagccttttccatcttcctgccattccttgttcactgacaaaactccaagcagaaagtgggccagaatgcaggggattgagagcaggccaggctctgtaccctcaggtcagagggaggccaggaaggattttaagaggcacatcgatggaaattcatgtttaaaagataattcgattcccacagggagaatgaattggaaggtgttaacctctgatcctcagttcgcagcaccataaggtgggcatgataataatagtccccacctccccaagctgacagatgtgtgataattaaatgggcaaacatgcataaggtggctggagacggcagaccctcaatacatggatgaggagctggttaggaagtgattgcagcccttcagggtaaatacgctggaggcataggccagggccatggattcgagagagatgtaggaggttaagttaatgggattggtggtcggttggatgtggggacttgggatgtgggagtgcgcgatgcctcagtatctgatataggtttctgaacacggtgaagccaagctcagggaccttctccacgaacccccacttccctttaaacttcatggcacttactcttgctgttattcacatcatgttgacagagccagcatggcatcagctaaagagggcggacctggggccagcaaagctgagttcagatcccggttctagtgatgattagctktgtggccttgggcacgtgacttcacctctctgtgactcattttctctgtctggaagtggagacagtgacctctgtggcagggtccttggaagcttgggkaggtagcgtacgttggtggttttccctgttatttttttttttttacttcttgaaaccttttcttcaacttttattttaagttctggggtacacatgcaggatgtgcatctttgtaacataggtaaacgtgtgccatggtggtttgctgcttaacctaggtgttaagcccagcatgcactagctattctccctgatcctctccctcccctcgcccccgacaggccccagtgtgtgttgttcccccaacccaatgtgtctatgtgttctcattgtctagcttctacttataagtgagaacatgcggtgtttggttttctgttcctgtgttagtttgctgaggataatggcttccagctccatctatgcccctgtaaaggacacgatcttgttcctttttatggctgcatagcattccgtagtgtatatgtaccacattttctttatccactctatcagtgatgggcttttgggttgattccatgtctttgctattgtgaatagtgcaatgaacatacacatgcatgtatctttataatagaatgatttctattcctttgggtagatacccagtaaaaggattgctgggacaaatggcatttctgcttctagctctttgaggaatcgccacactgtcttccacaatggttgaactaatttacattcccaccaacagtgtaaaagttttcctttttctccacagcctcaccagcatctgttgtttcttgactttttaataatcaccattctgactggcatgagatggtatctcattgtggttttgatttgcatctctctaatgatcagtgatgttgagctttttttcatatgtttggtggccacgtgaatgttttcttttgagaaatgtctgttcatgtcctttgcccactttttaatggggttgttttattcttgtaaatttgtttaagttccttgtagattctggatgttagacccttgtcagatgggtagattgtaaaaatgttctccccttctgtagattgtcttacactctgatgatagtttcttttgctgtgcagaagctctttaattagatcgcatttgtcagtttttgcttttgttgcggttgtttttggcatttttgtcgtgaaatctttgcctgtgcctgtgtcctgaatggtattgcctagattttcttctagggtttttatagttttgggttttacatttaagtctttaatccatcttgagttaattttatataaggaataatgaggggtcttcccccattcttgtcacccaagtctttttgtgagttgtaaggtacagagaaacgacaagaacaggagcccctggtgtggagtgtccctcccgtgttgctcacagggcatcrcggtgcagctcttcctggagaggtatctaggccacagtgctggctcagtggaggctgtgtcagcacctcaaattaggagcaagtgatcaatcctgtgtttcccacaatagggtgtcttattccaaggtgaactttgtgattggaaatcggtcattggtgatggagctcactcttcaagacgtggttgagaagcaactggattgacacagatgcagttttcttccatcagtgtgttcagaattgcccagtagagatttctcatggtctgcagcgccaggctttgggcttgcctgtctgcttatctwcattcactatccggttgtttccaaagcattgattcagcactgactttacaaagtgcagggctggggtgaggatgacccaagaggagagagatgcagaggatgtggggatatagggcaggccatggataagtccatccagcttcttattaatgagtcaggggaggtgattcctgagcaggatttgacagtggtgtgttgtgccactatgcaaagcagcccactgatgagtttcttctcttttcttttttttttttttttttattatactttaagttttagggtacatgtgcacattgtgcaggttagttacatatgtatacatstgccatgctggtgcgctgcacccactaactcgtcatctagcattaggtacatctcccgatgctatccctcccccctccccccacccgacaacagtccccagagtgtgatattccctttcctgtgtccatgtgatctcattgttcaattcccacctatgagtgagaatatgcggtgtttggttttttgttcttgcgatagtttactgagaatgatgatttccaatttcatccatgtccctacaaaggacatgaactcatcattttttatggttgcatagtattccatggtgtatatgtgacacattttcttaatccagtctatcattgttggacatttgggttggttccaagtctttgctattgtgaatagtgccgcaataaatatacatgtgcatgtgtctttatagcagcatgatttatagtcctttgggtatatacccagtaatggggtggctgggtcaaatggtatttccagttctagatccctgaggaatcgccacactgacttccacaatggttgaactagtttacagtcccaccaacagtgtaaaagtgttcctatttctccacatcctctccagcacctgttgtttcctgactttttaatgatctccattctaactggtgtgagatggtatctcattgtggttttgatgtgcatttctctgatggccagtgatgatgagcattttttcatgtgttttttggctgcatcaatgtcttcttttgagaagtgtctgttcatgtcctttgcccactttttgatggggttgtttgtttttttcttgtaaatgtgtttgagttcattgtagattctggatattagccctttgtcagatgagtaggttgggaaaatgttctcccattttgtaggttgcctgttcactctgatggtagtttcttttgctgtgcagaagctctttagtttaatgagatcccatttgtcaattttggcttttgttgccattgcttttggtgttttagacatgaagtccttgcacatgcctatgtcctgaatggtaatgcctaggttttcttctagggtttttatggttttaggtctaacgtttaagtctttaatcctttttgaattgatttttgtataaggtgtaaggaagggatccagtttcagctttctccatatggctagccagttttcccagcaccatttattaaatagggaatcctttccccattgcttgtttttctcaggtttgtcaaagatcagatagttgtagatatgcggcattatttctgagggctctgttctgttccattgatctatatctctgttttggtaccagtaccatgctgttttggttactgtagacttgtagtatagtttgaagtcaggtagtgtgatgcctccagctttgttcttttggcttaggattgacttggcgatgcgggctcttttttggttccatatgaactttaaagtggttttttccagttctgtgaagaaagtcattggctgcttgttggggatggcattgaatctgtaaattaccttgggcagtatggccattttcacgatactgattcttgctacccatgagcatggaatgttcttccatttgtttgtatcctcttatatttccttgagcagtggtttgtagttctccttgaagaagtccttcacatcccttgtaagttggattcctaggtattttattctctttgaagcaattgtgaatgggagttcactcatgatttggctctctgtttgtctgttgttggtgtataagaatgcttgtgatttttgtacattgattttgtatcctgagactttgctgaagttgcttatcagcttaaggagattttgggctgagacaatggggttttctagatatacaatcatgtcgtctgcaaacagggacaatttgacttcctcttttcctaattgaataccctttatttcctaaagtttcttctcttttctagtgactcagcagggtgcttcatgaatgtggtcttcgagggcagatactctgctggtttactatctgggaagactgaggttcagaggagttagaagacttgcccaaccacttccttttgtttaagggtctaatcccaactcttgtgtgtgaatatgactgcatgtgcttatacccctggcaatgctaaaattattctgtgtgtttgctttttctaattccttaggagactctcttgttaattagtcttaagttattcaaatccttatttcttccaaagctgaagattgtaattaaatgaacattgtgccattctcttatgatagcatttgtctgttcatccatctgtccatatccccatctattttttcatccacccatctatctctccaccttttcattcacccatctgtcwgtccatccttccatccaaccacccatctattcatctgtctacctatccatccatccacctgtctatccatctgcccacccacccattcattcacccatccatccatctatccatccatctgtttgtccacccatccatccattttccttctggcaaggaagagctaatatgaatctaaatgtgcctatcatggtccctttctgaggctgctattacaaatgggatntggcattttggaaaaacttgacaacttatccttcattttacagaaagtttcccatgccgtttgtgtctttccctcccaggaatgtgagccgccttccaacagcaatatcacagcattcgycctgaaggccaaagtcatctaccccatcaatcagaagttccgggtgagagtcctgagctccatcatagaaagccagttacttcygtcatgtgccagagattgggaggaaagtggggggattaactgtgtgatgtttggtcctgtttgagggttttatggcaagtcattttagtagggatagttttgaggctcaggaacaggacatgcccatggtaaccacggtacggaagttccatggttccttgtatccccagggacacgaggtaacagcacagtaggacagctccctctctgcctttttaacactaatacaaacactgataccgactcagttctgagcgctaatcctcattcacagagccctggactaataatgccagcagctggcacttactgaacacttatgtggacagggccagtgttgtgttaagtatttgtcatgcmtcaggcgtttcaacttggtgttatgcctatcaggtaaataatgtctccactttacacgtaaggaaactgaggcccagagaggcgagtgacctgaggtcacgtgacaggaagtggcagagccagagtcagaccccaacacctggctatggttacaccttccatggcgcttccaggagccctcagcctgggaggtgctttgtgcaaaaaagtttcctaktgaaataagtwtgggaaaatgtggcttgctttcttggtattcaggatgacgagctctggagtcacagcatctcagkcctaaccccatctcagccattcactgtgtggcgtttcctgacttctcctgcctcagtctgtttatctgtcaaatggggatgatggtgctcctgcctcgcccagttgttttgggtgttacacaagataacatacatgagggctcagaacagtgcacaacatctgagcactcacaacatgttaggatcttgtcaattattatttgcttttgaagacacccaaagcctattggaggttctgagaattcctgcaccaaaggaatatttcaccttgtttaacacaagctttaccgaactaatttttccatggaaactttgtggtgagcagtaactggctcaaggagctgttccctggaacccacattgggaaccacrtccttcacgtggttgaagggtgggacgggtgggtggatgaaggrcatttctccatcctctgggtaggccctgcgtgggccctggggatcacgccatagtcagcagagcgtcagccccaccctggaggccctcactgcctgagtggattgaaatacaccgagaatgcaggacagtgcatgatgaaataggcaagaggcagatscccagggacctgtggagccagtatggggtccaggatccacgcctggaggaagggacgcttctgcccagcaaacaacaaatggggggtgtttcaggtagggggaccaaagtctggaaaggccagaattatgaagtcaccaggagcgtctaagccagagccacttcactgtggctcgggcagccagaggtggaggctgacatttgctgggccctctagccatgccaggccccaggctgtgacctcctgtgggcgtggtgtgcatggtgtgcatggtgttccagcttcttgattaggagcgtggagcctgtcggtgggcagagggcaggagggtgactcctgctctgtgcaggcgaaggacaggtggttggcaggattcgtggagggagcaggccagggggtcagcagcaaggagagaactgggtcagggcaagcggtggctatggaggaggtaggtcagagttggcagctgggaggagggtgcgctgggtgtccggggcacagatccaggttggcagtttaggggaaggaacctggtgcagaggggctggccttgtgaggacaagtgaactgtgattcgggcctctgggctgtcratgtggcagaacctgggacggaaactctgtggtgtctgctggcaccctggccagtctcctccaggcagaccttcctgtgagcggctagcntgaatcactggtagaattatgaatactagatcaaatcccagaggcatcacatggactgagtgtgactyctactgccaccccagcctctggccgatggctcctccaacccgtctctgcatgaaaacttaaagcaggctgttttgccacaccagccggtagaggcctctccttccagcagtctggggagcctgagccagggtgagaaggacgactgcagctcctcatccagcgtccactcggccaccagcgatgacaggtttctcagccgcaccttcctccgggtgaacgccttccctgaagtgctggcctgcgagaggtaaggagagcgggcaatggaggatgaggcttccagtcctcttggagtgggccgggagtcacatcattgtcagaggaggaaacagaggcccagagaggttcagtgactctgccagggacacacagcgacccagcgtcaccatcggagccccagaggcctttgtcacttcctgtgctgtattgcccaacactggggttatggagtcaggcctgagccccggggagagatgacagggaggcctcatttaatcactggcgtgctcccagctactggcgaagttgattaagtgggtacttctgagtaccgggcagagtgctaagcactttacagggattgatgatctcatgaggattttgcccagtgagggggatcctgggacaagttcagcaatcagtaaatattaatcagtgagtgaatgaattccgtttaacacccctatgaagttggtactgtcatttcctccagttcacaaagaataaagggaaacacagagaggctgcgtgacttgctggtcacacagccgtgagtgayggagccggatttgacccaacccagagcagggctccgcacgtggtgrgggcttaagaarytcagtctggcgggttcacacaccaggcctcaggcctctctctgctccaaaattccgctgagtccaagaggtgggatgatccagggcacagcctctgctcagagttgctgcagaaacactgggctcagcaccttgagcctgaaagtggcccaggcagaagggacttcgttgaagaggggccttcttggactggccagccctggcttagaacggcttgctttcagcatttgggacttagaggatttgaaacggtttgggtgggagagtcatcatttaaaatgcatttgcctatgagggaaaaaaggtcaaagacttttacactctgccatgtatctgcccccgttgaccctatgatggtcacttgatttgtctgattctctcttccctgagtcagtttctgcatctgtaaaatgggcatgagaatgtctctgctaaggcaccgaggaaaggtgacacgtgatgatagacatgaaaatgcttgaggttgggcaccatggctcatgcctgtaatcccaacatttgggaggccaaggtgggtggattgcttgagctcgggagtttaagaccagcccaggcaacatagtgagaccccatctctaaaataaaatccaaaatcaaccgggtatggtggtgcatgyctgtagtccgagctacacgggaggctgaggtgggaggattgcttgagcccgggaggtggaggctgcagtaagccgtgattgtaccactgcactccagcctgggagacagagcaaaaccctatttctaaaaagataagtaaataaatttttttttagaaaatactcaaaggaggaaacgtcatttttatttctctcccttccctctctccattggttttctcttggaagtcccaggcacctatgtctctgacaccaactgttctcttatggccattagtgggtttcaaacagctcatttgatcccttcttataaacctggagtgagcgtaaggacctcagcatgctgcagaatgagagtttgaggcagggtgtgctgtggcttgtactgatgagggacgtgccaatattcttactcttcatttccgataccctgaaagtcttttcygcttctcattttattttgcagtgtagacgttgacctgtgtatctacagccttcacttaaaagacctgctgcatttggacacggcactgaggcaggaaaagcatatggtaggtggagatgttcgcattccctcsttttcatggggacaggagctgggagacaaggactctgtgtgcagtgagtcccagagacccttgagaggcagacatcagtggaaacagagccgctgtgaggtgggggaargcggngctgtcaggcatscagccacaaaatggaaaagcacttcacgcctgttggtggggcatggccttgacttcaaccagagctgtaggggcctcagcagaaagatgagtgcctcctcccgggctacacctcctgctggagatagagataaaagatatttaaaagagaacaatatgtttaaaggaatgataataatgataagaatatttatgagcatgaatkttcttgagtcttgctatgtacsaggtcccaggagtattacacttaaacctcagcacaacccasaggggcgggtgtcattatcatgtccactctgcaggtgagaaaactgaggcacagggcagaggatttacccaaagttataaagctgcaggagtggcactgagatgagaagttcagtaccttttcatggggccrcgtgttctcttgactgaatgaacaagaactcagaactgtggatgtggggaaaacaacattagtctctgccagatgcacctggcctctgattgaatcagccayggacctgagctatgggaagccagagagaggagtcccactttagccgcagaaccccggtgggtttattcaggcatcaagatsacgggggttaaaaaaaagtgttatttctccataaggcacattctctgaattactgaatgaggaatgagaccctacagagagaaggcagatgagagaaagaggagagctagaaacaggtggacagacacacagatatgtctacagggcactcttacaaactggagaagagcaagaacatcacgttggaggccaggcatggtggctcacgactataatatcagggtttgggaggctgaggtgggaggattgcttaagcccaggaatttgagaccagcctgggcaacatggcaaaaccctatctctaccaaaaacaaaaacaaacaaacaaacaaacacttagcctggtgcagtggtgtgtgcctatagtcctaggtactcaggaggctgaggtgagaggaacacttgagtccaggagatggaggctgcagtgaactgtgatcacaccactgcactccgacctgggcaacacagcgacatcctgtctcaaaaaacaaaaaacaagaatagcacactggggatgtgcctggaagaagcttgggctctgtgtgagcaggactgactggcctcrtaaacgggtgccaatgtttgaaaccrtaaatatgctagaattcaagaactagagcatggcccttcaccccctctatccccagccccatggaggtccctggatgggggccaccaggcagcctgtgtccagctttcctcagtgagctacacctggccctggctgttttctccaaggctccatgcttcctgagaggaccagttgtttctgggctcagagcctgtccagttggcaagcagagtagtcctggctggcctcgccccacagccagcgagtgtccacagggagcagcttacagtcctggagggagcgttcagcatcactcaccatccagcacaggggtgtggcctctgcacactgccaggcackgtgtcagaccccaggggcagcctctgcctttgtggagcccactctctggggcagtggggagggcagtaaacagatgtcacaaaataaacggtggcaggcagcatggcaaaggcctgtgacaaagcatcatgcgagtgtgaagggggcacctgagggaatgcagagctggggagatggtcaggcttccctgtggggagtctcktkggtggaaacccagggaagttccaggagcactggattaagggacagtcctagaccctagtccaccctttgacaattaggagctgtgtgactttgggtaagttgcttcacctctctgggccactttaggaaaggcttaaataaaatatcctttcagctattgctatatggagttactgggaagtcaagctgccctgctttgagagggttctgtgggtagaactctgggctccatatcacagctgtgtggctggcatggtcacagcagtgattattctgcacgtacactctggtaggctcagtgctttaaatgttttacttttttgaagctttacatgccacttcactaacgaggaacctgaggttcagagaggttaagtcacttgcccaaagtcacacagctggtgatggcagaatcagacctggacaaggtctgtgtgagtgaaaggcccctgcatgcccaggtgtggccctgcaccctgcatgttaaaggtgctcaggagaaatgtgttgcaygtgtgattggcaccgccctgaaagagctgcttcccagcagggtccttcctgctctggggagcataactctatcgtcgtgtgctgggactgtaagaacctggtgagccgctgggagctgtgctgcctggagacttaaatactctgtttccctggtagagatgagctggggttcagaagttattcagaccacatgagaccctcatgcatcccagaagcttagaactccctggctggccctgaggaggaagaaactggctctgggcttgtccaagaggcaggagaagctggagtgtaacctctataaacagagtggccaggatgagaacagattgggggcatggaggaagattaaataaaggggagcaccagcactagggggttctcatggtgctagaatattactttgattgtggctgcacttacgtgaatctatacatggggtaaaattgcatagaactacacacacacacacacacacacatgcacacacataaatgtgcataaagatgggtgaaaactgaagaaggtctgtagacagcagtattcaaccagtggcaatttcccagttttggtactgcaccatggtgacatcagaaccacccctgggggaggagcacacagcactttgtgccggcacacctggcgttattgcatttcacttaattgcgcttcagagatgctgcatttttttttttttttttttacaaattgaagggttttggcaactctgcatccagcaagtctgttggctccatttttccaacagcacatgctcacttcatgtctttgtgtgacattttggtaattcttgcaatatttcaaacttattcactattattgtgttatggtgatctgtgatcagtgacctttgacgttatgattgtaattgtttggggacaccacatgctgtgccagtatgagacaacaaacttaattaataaatgttgtgtgtgttctgactgctccaccaactggccattccctctccttgggcctccctatttcttgagacacagtaatattgaaattaagccagttagtaacgctgcaatggcctttaggtgtttgagtgaaagagagtcgcgtgtctctcacttttaagtcaaaagctagaaattatgaagcatagtgaggaaggcaggtctaaagctgagataggctgaaagctgggcttcttataccacacagccaagttgtgaatgcaaagaaaaagttcttgaaggaaattaaaagtgctacgccagtgaacacacgaatgatcagaaagcaaaacaaccttattgctgatatggagaaagtctgagtggtctgcatagaagatcaaaccagacacaacatccccttaagccaaagcctaatccagagcaatactctaactctcttcaattctgtgagtgctgagagaggtgaggaagctgcagaagaaaaatttgaagctagcagagcatgaggtttaaagaaagaagctgtctccagaacaaacaaaagtgcaaggtgaagcagcagcaagtgctgatggagaagcttcagcaagttacccagaagatctagctaagaccattgagcaaggtggctgcactaaacaacagattttcaatgcagatgaaatagcacaatatggtcatggaagaagatgccatctaagacttcatagctaaagaggagaagtcaatacctggcttcaaagcttcaaagaacaggctgactctctcgctaggggctaatgcgggagatgactttaagttgaagccagtgctcatgcaccactccgaaagtcctagggcccttaagggtgatgctaaatctactctgcctgtgctctataagtggaacaacaaagcctggatcacaacacagctgtttatagcatagtttaagcccactattgacacctactgcccagaaaataaacttcttttcaaaatgttactggtcattttcaaaacccctggtcacccgagagctctgatgaagatgtacaaggaagttaatgtcattttcatgcctgctaacacaacattcattctgagcctattgattaaagagtaatttcaactttcaagtcttattatttaagaaatacatttcctaaggctctaactgccatacatagtgattcctctgaaggatttgaacaatgtaaattgaaaaccttctggaaaggattcaccattctagatgccattgagaatattcatgattcataggaggaggtcaaaatatcaacattaacaagagtttggaagaggttgatttcaatcctcatgaatgactttgaggggattcagaacttcagtggaggaagtcattggaaatgtggaaatagcaagaaaactaggattagaattggagcctgaagatgggactgagctgctgcaatctcatgatgaaacatgactggatgaggagctgcttctgatggatgagcaatgaaagtggtttctagagaaggaatctgcttctggtgaagatgctgtgaacattgttgaaatgacaaaaaggatttagaatactatgtaaacttatttgataaagcagctgcagggtttgagaggattgactccaagttttaaagttctactgtgggcaaattgctatcgaatagcatggcacgctgcagagaaatcttttgtgaaaggaagagtcagctgatgtggcccacttcagagtggtcttattttaagaaactgccacagccaccctaaccttcagcaaccactaccctcataagtcagtagccatcaacattgagacaagaccctccaccagctaaaagattacaactttttttttttttttaagayggagatctcaactcactgcaaactttgcctcccagattcaagtgattctcccgcctcagcctcccgagcagctgggaccacaggcgcgcaccacctcgcccagacaatttttgcatttttagtagagacggggtttcaccatgttggccaggatgggtctcaatctcttgaccttgtgatccacctgcctccgcctcccaaagtgctgggattacgggtgtgagccaccgcacccarcccaacaacttttttttaataatcatcttaggctcagatgatcattagcattttttaggaagaagttatttttaaaattaaggtatgtacttttttagacatactgctattgtacacttagactacagtatagtgtaaacatagcttttatatgcactagaaaaccaaaaaatgtgtgcggcttgctttattgtgatattcaccttactgaggtggcctgaaatcaaccctacaatacctccatggtatgcttgtattatttttgtaccttcatttgaatctataactatctcaaagttggcactatggaaagggagaggatgagggctgtaaacattactgatttatttggggtcaggaagaaagtagactcgaaactaacatcttgcaaaaataatgttattatatcttataccatatcagtcttcagtgagtagaaagccaggacaccactttctccttagagctcattgtcattggcaaatataatgaaggttggtgggcagaattctgggttcaaatctcagctctgtcgcatgtggctgtgtggcaggaggcaagtggcccctgcaagttgctgggcattttctcatctgtaaaatgcrgaagatggtaccaacctccccgcatgccatggagatcaagtgatagtatgtataatacatacattaggctggcccagaagagtgattaacaagccttaatccattaaaagaaggatcaaaaactgtggcccttgagccaaatctggccatgtccttcttttccatattgcctgtatgcctgtgtggcatatgccacaaccgcagaactgagtagttgcaaaagagatcatatggcctgcaaagccaaaaaaaatttgctgtttcaccctttactgaaaaagtttgctaacccctgcatttaaaaatgccttaccaggcgggatgcagtgactcatgcctataatcccagcactttgggaggtggaggcaggcaggttgcatgagttcaggagttcgagaccagcctgggcaacacagagaaaccccatctcaaaaaaaaaaaaaaaagccttaccggttcaccaaagaaaaagaaaatgccttattatatctaaatgaccatattatatctaaatgacctttgacaaagaggcaaaagcacttcaatggaggaatgataagcttttcaataaatggtactggagcaattggacatccataaacaataacaacgacaaaagaacctcaacctaaacttcacaccttatacaaaaattaattcaaaagggatcacatacttaaatgtaaacagtaaactataaatcttttagaaaaaatattgccaggcatggttggctcacgcctataatcccagcactttgggaggctgaggtgggtggatcacttgaggtcaggaattcaagaccagcctggccaacatggtgaaacctcgtctctactaaaaatacaaaaattagccgggtgtggtggcacatgcttgtaatcccacctacttgggaggctgaggtgggagaatcgcttgaacccgggaggtgaaggttgcagtgagccaagattgcaccactgcactctagcctggacgacagactgatactccatctcaaaaaaaaaaaaaaaaagaaaaagaaaaaatataagagaaattctccaggatttagacctaggcaaagagtttttagacttgacaccaaaagcatgacacacagaaggaaaaattaactggaattcatcaaaattaaaaacttttgctttgcaaaagacctctttaagaagatgagaagacaagctacagagtgagagaaaaygtttgcaaaacagatgtccaccaaaggactagtacctagaccagataaggaaatttccaaactcagctgaagacaggaagcaatccagttagaaaatgggaaggacatgaacagatatttcaccaaaaaggatatatagatggtaagtaaacacgtaaaaaggtgttcaatgtcattaagccagcatgaaaatcsaagttgaactcacaataagatatcaccacacacttgtcaaaatggctaaaataaaaaatagtgacaccaccaaattctggcaaagatgtggagaaactggatcactcatacattgctgatggaaatataaaatggtacctacggccatactggaaaacgttttggcaatttcttatcaaacttaacttgcagttaccagaagacccagcaattgcatttgtgggcatttatctcagagaaatgaggacttacgttcacacaaatgttcacagcagcattgttcataatagccccaaactggaaataatccagatgtcttacaggggtgaatagatcaacaaattgcagatacagccccctctgtacttcctgggtatccccacttatgggagggttcttcctagtttaaaggacatctccatccattgaaacaggagactgacatggataacttttcatttccagttccatacaactatcccgctgattctttcttcaaagaagcaaaccctcctttgctttttatattttcttcacacatggaaatgggggatgtggagggccttgcacagagtaagcactcaatatttgttgaatacatgcatgaggaagaaaggaagctttttaaggaagcttcatgaaaatgtaatgcattatgggccattgtcatgatttataatcggagttcctttccttcagcaaaaaatatacgtgaagagagggtgaaagagaagaaaagaaggagagaggcagtgggggagggagggagaagagaaaacagaaagcaaaagacaaaaataccattgattaaacttttcttttgttatctttcctttcttggcaatagatgtttattcagatttttaaaatgtgcctccttgaccttcttcctaaaaagaagtcagatgatgaattanaccagaagatcctttcaaaacaagaaaaagtaagtcttcaacctatgtttcaaggtaacttaaaaatagtttattataatatatacaacttatgatgcaaaaatttttttctttcatgtataaaatagcttattacaatatatacttttcaacacagtatagtgaaatataaaagtatgtatacaaatatttaaaaagtgtattattaaaatttggaatactatttatagcaaagagaataatattggtcatatctactactcaaagayggtcactgttaatgtttttttctgcacacatttgggatatttttaaagacataatttgtttattggttatagctatgtatactactttgtattctattctcagtcttttatggaaagtttattttgtctcaggcgcagcaaagagtcagggcttggagtcagactggttgaggttggtatcctggctttatcttttasaagctctcagaatcgtagtttcctttttgtatagtgagataattcctgttctgcgagagtgcagaaaggataagagagatgtgtatgatacacctagcaatgtcatagttggctgtgaatatgtgatggctgctgtcatcctcattatcacaaccaccaccaaaatcatcatcatcttcattatcaccaccagttttattttgtatcaccatcaccaccactattactatcacagttctcttcttcatcatgtcattgttgtcatcaccataaacaccatcatctttgctattgtcaccactgacatcatcattctttgtctttaccaccatcatcatcatcctcatgaccgctgtcatcaccaacaccatcaccatcctcatgtcctcattaccatcatcatgagcatcatttttatcattgttgtaattattggcattctcattactaccatcaccgccatcatcatcttcattaccaccataatcatcatcaccatccttattgccatcaccaccaccaatgttgcagggcaggcaagctccagaatagggtttagcctgggagggtacttggcttcacctaggaaggaattcaagggagagccagtggtgttagacagtagtgttttagtgaatggtgccactccttgcggagcagggctaacccgtaggcagtgtgcccagagttggtaacatatggatgcttggcaactgtatttatactcatgtaaacccactttcaattacatgcaaatgaaagggcagttcattgcaaattgagggacaggttatttagaactttctaaaaaggggacagtaacttctgggttgttgccatggaaaagggtggtaacttttgggttgttgacatggcatttgtaatctgtggttgtgctggtgggagtgtcttatgctaatgagcaatgagggcagcaagggatcactttcatcaccatccactggttcctgccggtttcttcactttatcctgtctggaccagatcccattttgatcagcakggttgtgatcagaaaacaagtcctgccagtctcctacctcaccttatcctcaccatcattgtcatcattattctcgttactactatcaccagcctcttattcatcatcccctgccatcattttcattatcatcatcattgttattgtcatcattttcattactgccatcgtcatcgcatcattgttgtgatagtcttcatcagcaccaccatcatcaccatcttcatcagcaccaccatcaccacctttatcatctttcctgctacctctaccttcamcttcattagagtcctcattgtcatcgtcatcgtccttgttcctaccactgtgagatctgggggtttgggaaggaatgtttcttctttactccactggattccatgaggaaggrtgactcactgcatcccaggaaggaggaaggacatcatcatcttcactgtcatcctcagtatcaccaccatggtcatggtcctcaggcagtgcacgtcgtgcttgacatacattatttcatttaatagttatgacagccctgtgagtggccattgttatttttgttttacagctgaagaaactgagactccataagttcaaatgactttccaatggcaaaaatgataatgatgatgatgacatttataatggtatyagtaataatgaaacaatactgtctgttataatagaaagaataagagccttggagtctgcagacctcagatcarattccatctctacgagttaaacaaggctgtctgaacttaagcaagcatgttaattataatagtggctactatttgttgagataggctagccaagtgatttaaatgcataatttcatttaacacttggaatgaccttaaaactttcagaagaggacaaggagtgcccagaatttggaagagtaaggacaagcctggcactgccccttcctgcctgggcatctttggacaaactatcttaccttccataaaccagctttctcacctggaaatgggtcataatttctctttcacagagatgccgtgaggattagaaatcacatatggcctcagcttgggtcttcaatagtagtttatatcaatgttatttttcctagtgaaccttgacccatgccacactgttggctatgtgacaatgaatatagagaaaatagaactgcctcccacacactatcttggggtttgtgagtctatacttaggactcaccttttccttcctgagttcagaatcatttgagagagtcaggaggacagatatagaaatgtagctttgttactgattagaggccagcttggacgatgtggctwacatgcacagctatcatggcttcctaatactgaatcccagaattcactcaattgcctagctagtcacgggcaatgctgggccacctcaggcttccccacacagaaacagggccttggctacccagctcactctaggctgatatcacaccagagcaatggcctcccctgattggcccatcacaaacaggaagaggctgggcaagtttctggcctttaaaccaaccaatcaaatacacaccacttcctgccctggggtgttgttctttcccaggaaaaccagaagaggagcaaagaaacattccttcccaacccacyggatgtcatgatattttccaggacttcataatgattgaaagatactattttattgatttttaaagtatggtctagttttttttttttttttgagggaggatatagaggaaaataatccattattcttgaggctctatgtttaatgagaaaatgggtcaaacctcatgtacaacaacccccagagcatttaactattgtttaaaaatattttgtgaaatttgaaaaataaaagcatttatttttctagaatttaagacacgctaaactttttctttgtttatttgctttcttttttyttcttcttcttcaggatttggaggaactagaaaagggacttcaggtcaaactgtcaaacacagaaatgtcgggggctggtgactctgagtacatcaccctggctgatgtggaaaagaaggagagagaatacyctgaacagctaatcgataatgtgngtgccnkactttctttcctgtacacaaattttggttcctaaaacagttaaattggctamattagagagatgatagttagragtgtgcctaatacttgaattcccctatcrcattctgccctagaggcaggatccagtttctgatgctaagtgatagggaagaagtaattaagcagcaaagattcacaaagggaggtttattttttatatcatgaattatyctcatttaaatttcagattggtctttttatcattcaaagcaaaggttgctataacccttgatgtcatcactgccctttggaatagagtagaagaaagctgctaggcatcactcgtgaaagcaagttttaaattccagacagaatggcttctctgaaacatcgtttttcttttcttttgggttccaccaccccctgttcatatattatgtattaaacaaacatgtccttggcacttgctcttcaccagggattgtgctgggcactggggactcaaaaatcatttagacatggccctgcctgagagaggccaggagagacaaacaggtgaacagatgagggcttcacagagtgacacatcttgtgatagaaggaagcacaggagaaggcccgaggcaggcacagtggagggaagagttcattttaccccaggcttaggaaagcctccgtagaagaagggaccatggagaggctggccgggagaagtgtgggtgctggccagtggtggggcagagatgggagctaaagagggctgagagcaagtcgaggtaaggtaaagccagagggatctggccagagggcttgtttgtgtcttaagccagcgagatgggagtgtctattgccagcgaggtgggagtcactgaagctttgaagcagggggtggctggcttcagcttctgctttagaagggctgcccaggcactgagtggagggtggtgaagagctactgggctaatccagcaggaactttattaaggcaactgcagtaggatggagaggtgaggaaacgtgtgagagaagctgtggtggtctaccatggggcggcaggtggggaggaggagggggtccagggtcagtgctgctgaaataagcgccccagagcaagatgctcatgggagggagggagccaatgctcctgtcctctgaataggtccaatattgagaggagaggcttrgagatggagggtctccatgagagcccaggttagaggactttgagggccagaatgttcttagaactgtgggccaggatgctaaggaagagggccagcctggattccggtggtccacagaacccccaacgctgtgtgcagtatcttgtccatgtctgcctttctcagggacagggttcagaattttcataagattctccaaagtattggtgacctccaaaaatggtgacctctggcctagaaatggtgtgtaaaatgggaagagaaaagagctttggtgccaaatcctggatcctgcccatatttaaggaggagcggatgagaagaattgggacaagaaagcagaggaggaattggatgggctttgcagaagcaggagaaaatcatgtcatggacgccaagagaatcaggagtttgtaagcagagcgggctgtgyagagttggcaggtgacagtctgcagtcacgtggcaggtggaaggcaggtcatctgatggctccaaggggaagagcagggtgagagcgtgagggtgtcaggcaggtttgaggtccctcctggcagggatgagaggaggagcagcatgtatggggtttactgggaggcaatggggccctgagatgggragccgcattgatgaggggtgttcatctgggtgcaggcttcctcctggcagagccagaccgacaccrcagttgaggctgactagagtttcatgatcttgagtcacagcaacaaaatcagcatgggtttctggtgacactaacccctgccccctcccatgcccagtccagccagaagtgtccatttcagcctctcagaggctgagccaagatggaggcaacctcagccgtggagttaaatggacctgaaccaaatcctggctttcactgggtccatgacctctgacaagtgacctaactcccccgagcctgttcctacacctctagatacatactttatcatgwtatcaaatgtgtgaagcacagagcctggcgaacagcctgtgggccatgagggaaagttgctccgattcctagtgtcattgtccttagagctctgactggctgtgatgactcaattaaacctcctgcattctaagccacttgggaattcccagctctgctcctgataaaatgagggggagggaagattttaaagcaaaatgttttcatggtcagcatcctctctgccatattaagcttttgtacttttaggacaataactaatatttaaacatctgtttatgcttttacttccaggaagtatttaatcccatttaaaattgccaaagcttccatgagcacattgtcacatttcatcggcccctaggtagctgtaatgacctgtgcaagagtctgtaggctggacaagctactgctttctttccttagcagcagtgctctcgtgtctgctgaaacaccattgcaaaactgactgacactggaaccagacaatggaaccagaaagaacttcactgtagaacgtgattgttgccaagataaactcactgaaactgtagaattgtttagaatctttgtttgtgatarggagtgaattgtaattcccragcacgcacygtttggctttcttaagtaagtttttcacctcacttcttgctgcttgtgctcatttcacagatggaagctttctggaaacagatggcaaayatccagcactttcttgtggaccagtttaagtgttccagctccaaagccygacagctsatgatgactctgayggaaagaatgattgcagccgaagggctrttgtgcgattctcaggagctgcaggctytggtaatgctggagggggcgggagggaacataaagatattcagactagagatwtggaatcctgaggcttgacatccttaaatctaacagattcatgttgtagctggttatatagagcctcagggaaaaaaaaaccaacaacaacagtaaattcattcatccatttatttatttatccatccatccacccatccatccacccattgacccttccatccatccatccatctacccatccatccatctgccctcccacccatttatccatccatccatccacccatccatccatccatccacccatccatccacccacccatccatccatctgccctcccaccccatttatccatccatccatccctccatccatccatccacccacccatccatccacccgtccacccatccacccacccacccatccacccatcaatccacccatccatccatttactcatccatccatccatccacccatccatccatccatccatccatccgtctatccaatgagtgaaggctctggccagctcagtattactggagcatagaacactggtcctaaacctgaaattacacattgaaattatctgggagctttaaaaagtactgattcttgggccccagatgggtctccatcccagagtttctgacttaatcagattggggtgcaacctggctgggcattggggtttttagagctccccaatgacgatggtgggagctggggttgacgcccactgstgtagacagagcattgattgactttcctgattgccctgttttgcctgcagagttctttaacaatgccttttcctggccttcactctgaggttctaatatgattggtctggagtggaggccctggcattgtgggttttaaaactccctgaactattctgacgggaggccagggatacaaacccctggtgcatgggtgtccaaccttttggcttccctgggccacattggaagaagaagaattgtcytaggccacacataaaatacattaacactaacgatagctgatgagcgrraaaaaaaaaaaaaaaaaaggtccctgcttatttttgtgaagcctgccaaccacagataagcaaaaaagtcctcacattcaaagggttggacacccatgggagagaaatctgcgaatccagctttgactctgggctctgttgtttggagctgtgtgatcttgaacacattacttaacctctctgcgcgtctgttcctctatttataaaataatagtgctaagagttgccacagacagggcctggctagatgctgagtgactcctaacaccccagtcaccattgggttcctcttggtacacattgggctcatcctgtgtgcgccagtgtgtactagggccagggaacgagccctctgatgctgccctgcacccatttccccgtcctgtgcaccagcccgtgtggcagctcggctcagaaccctgcagtggccaccctgccctcagcacagactcagctcctcagacccgtgggaaagccaagcctcaacggatctttgcctccccttgcacaccacatgcctctcccaatccgctctgctcctccaggtgtgatccacagaccacagcatcggcaacactgggagctggttagagtgcagaatcctgtcctccacccttcccaagcaggatctgcactttaacaagacccccacatccacacagttgtttgagaacttcatgtgctttttctcggtatatacacacatggccttttttttctgtcaacactgccgaaagataggtatggaagatatttwattcacagcacgcagataaggagcccactcagtgatccacctaagatccccgtcctctctaatgacatcgctgagcctgggcctgaagcttcctggtttgctgcccaagcccctttgaattggatttcagtttgataaggctgctgactcattaatgctctgcaaaggtgaaagacttttcttcctatatttttttcttttgctatcagcaggatattgatgcagaaaaaagaaaatacatccttagctgactctggccagagtatcagccaataacttccaaataggaagaaggaaagggatcctccagtttaacagcatgactgtccttcagccaatgtttaatgagcacctactgtgtagcacatgctgttcatggaaaccatattgcagaggttaggaatgcaggctcagggaagaaactggagctcccactgcagtcttgccactcgttagctgtgtgatcttgggcagataatttaacctctctgtgatttggtttcattttctgtgaaatgggggctatgatagcacctgctctctcacagggtagttgagggtgttaaagacttggcagtatgtaaagtttttagagcagagcccggcacgtaggaagcattcagtacttgttagtcattagagtcctgcaggccacatgtcagcaggagaaatagacagcaaaaaattactgtaatgatgcatggacagggctacacagtctatgtttgtatagaagagggatggattcactatgcctgcataccgggcaccaaagggaaaaaagatggcttccgtatctcagaacacagaagagttggaattcccagrgcggcatcccatctttctggcctgggcatttggagctgaaatgtgcatctgtaaatattaaaactggaagagcccttcaaagggaccctgacggtcatcagattcagtttcttgagactcacaggaaaaaaaacagctgccaagacagatgggactggctgtagataatggtgaaaacagctgacactcagggaggctcactgttccctggccgttgttctcaatgcttsacgtattttgacttacttaatcctcatgtcaaatctgtgtggcaagggtcaggtgaggagcttgtgctcaggtcctgggagccaagtctgagcctggcactgttgactcagccacactcagagcacatcagggcccccttcccccattccacatccctcttctcacgcmactctctccacttccatcctccctccaatataagcacatcgattgcaccaccactgcygamtccagccagcctgtgttgggttctcaacatgctctttagaggtggccagagccgcccttcccgcggcccacctggcacctccgcttatcctcttgcaccctctagggttcacgggctgctggaatgagcctcgcygtccttgtccatcgctgggggatgttcttgccctagtcttgtgttgtgggaacagaggccagtgcagctcagcgcacagtgtggccatggctggtcaaggggacrtgggcgactcaggcctggcccctgtcttcaagggctctcagtccaggctgggactgcccctcacaatcacctcctcgaagacaggagccctggggcagtggagaacagagtaggggaccagtgagggtggggacaagcagggaaggaccacagaacccatgaggacatagaaggacctggctgggcaggggagtgagaggaggcagtgagggtgttccaggaggaaggccccgcatgtgcagaggctgggcagccgggaccaggcaggtgtgcaggacagggccccacagaacttcctgcaccatgcctggggtgctggacttgatctcagggcagcaacaggagggtttggggccatggctgacagaaccatcagcatctctgaaaggtccgctgttctgtgaggtggggttagagcatggggcagagatgggaggctggggagcaggactggcctgtggcctcggcccagcacagaggtgcctaggcctgagctgggcrtggctgggagtggggggtgcagagtctgtgccgagggagatgccaacgtycgccgtccgctcctcctttcccccttactctcattccacaagcagctgctctcaggtgtgcagggcccttgkctgcctccggttgacatttccccctgtcttttctgagagtccctgaaatgatgaggtggggctggggagggccttctgtagaatctgactgcggggagtcgtgttggaagccaatcattcccctgaaaatctcggccrtcctcagcagtcaggctctctggggctctaacaaaagccaggaactgctggcactttgcatttcctccrcagccctgtgggggccacagggccagattggccgggggagatgactataagccaggtggcttttcctccttgacmgtttgtaaatctggattccctcctaggagggtggccctctggggagcgctactggtgactaagtgcctacatgctaagctgcgtcagcctccccgcaccctaggagagacacttaatccccacctcgggggcagacccagatctcgctcatgaaggagagggggagttcatccctctgagctccgctctcccaggcagtgccattagttaatgaccctggtggcttcttctcagctgttaattaacatgccctggtggttcccaggacaccccagctatggtccngtgtgtttctttttgcaggacgccctggagaggaygatggggcgggcgcacatggcaaaagtgattgagtttctgaagctgcaagtccaggaggagaccaggtgccggctggctgccatctcccacggcctggagctgctggctggtgaggggaagctgtccgggcggcagaaggaggagctgctcacgcagcagcacaaggccttctggcaggaggcagagcgcttcagccggggtgagccgtgggcatgggtgccgccgtccacaacactggccttctgggtccctggggctgtgcagtgagagggctggcagcctggggcagtgtgcccatgatgccgggcacaggctgcctttctgcttctgccctagggactgggtcactgggctgctctctggggctctcttcccttctctgtacagcagagtccatgagggccactgcccagggcaggggtcacctgctgcactcactcaccagggattccggctgattgagtccccacgtcctgcagcaaagccaccaggaactgcagagggacagaggagggtgaagggtctcactagaaatttacacaaagtggtccctgtcgcccagcggcagctcatggtcatgctggagtcatgtggccctgctcagcggcagagtgggtgagggtgggccatggtccagcatgtggggcaggaaggggagccgtgcatgtgtcccacacatgctcctgccccaaggctgaccctggggtggggrtggggcaaggctcaagacgtggaggcatctgggcttagctgaggtcacactactagtgggacctacagaaaaacccaggtstgtcaccagcagggcgggcaccatctctgcagccgacaccagcttccccaacctccagacaggagaaagcatgagggtccccactgaaattctggctcacagagtcacctcctatgctgtggcttttttcaatcccagagtttgtccagcraggcaaagacctggtcamggcgtctctggctcaccaggtggagggaacggcaaaactcacgctggcccaagaggaggaacagagaagcttcctggctgaggcccagccgactgctgacccggaaaagtttctcgaggtgactcacatccccagcctctgcacatgtgggtgagccagttgtagctctgttcccgtgactgagcacgggacgccggaggtattcatcaggcatgaggttatctgcctacttcccatgtgtcagccgagtgaccgaatctcagtcccttagcccctacatccctagggtcctagwggactgtaagctggtgataagagttgtgctgccctcactgggctgctgagaagaggagggggtaggatccgtagagagcttggcagagtgcagacgcatggcaggagcacacagatggtggcaatggcgtgaagggagcaatgtgtggcccagaggggacaagcrtgtcccggagagtaaggcaggctcacacacccagggacagggcccttgtgggtcggctgcaagtccaggagaaggaagggagttcccagccttgcatgtggggttgagtggtcagggccaggaggtggccaaggtcagaggtacccttggtcttgcctgagaaggggacaagaagacctgaaggaggacaaaaagcaagatgtcaccctccaaggaaaaggagtcagctggccccagtgcaggctctaaggacctggactcgccagttctcagagagaccaccgagctctggtttcgctctgcttgctttcactagtaatgggcagtggggctgggagaggaccagcttgtccgtaaccgtcttgcaggctggttaagcattgggcgctgaggccagccacacttgggtttgggtgctgactctgccactaaatagctgggtgaccttgggcatgttgcttaccctctggccctcagcttccacatctgtgaaatgggcataatggcacctatatcacagcattgttaggattcagtgagaccaaggaaggggcagccccagcctcactgtttgcctgggtccgcctgccctccgtcaacacttggtacagcacatctcagttctgccaaggggtgggtggcaccatgtctgggtccaggctcagcccagaatagaggcccaggggctctccctgggggccaagctggtggtggtggcaccactgcagtgagaagccaatggaggggtcccccgagaacagaggacaggcctctaggtccctggtccagctgcctccctcacccagggggcctcttccaggcccatacttggagcttctgcatttgccacaaaggggtagggtaggtttttctatctttgagacccatttgaaataagaggaagataaggctattcagctcctcgttayttggatatttctgggcccctgtccttgatgtcacaragcccagtgtgagtccagagtgtggagacagtgcctgggtgaccttggtgtcccagggcctcggtayagtcctcggaaygcctcagygctggcgttcaggacacgtgggacgcaggcagggaagggtgaatgagcgcatgcgtgcmtgaatgaaccaggacatggacaaatgggcaaacgagcgaatgaaggaggatggaatgggtgggagaatgaacgaacgacaccaggctcccagtacacactcagcacccacctttttccagtcccgcccttctctctcatctcacctcctgcccgtagcatcaccaaagatcttagggggtttacctcctggtctctgctgctgctcgctgagcctggctccccatcttccctccaaggagtccttccttgtccttagagactccattgaaacatctccccaacagggaattttctcctgcaacccttccctgagaagggtctgttcctctgtccttctgccccacctcgcccctckctgatgctctgtttagggctggctgggtctccccctgctgatkcccgggttagcccagtctcctgctgctctgctggggtcctcagggaagggcctccaccccgtggtcacagtggggcctggctggttgctgactgcactgacctccaatcgccagtctgtgtcacccctgctgggttcccatcagtgggtcttccatggcctgggtggtcagaaagtgatgtctgggtggctgcrgccaggacagaggagtgacagaagtggtccagtggcccctcctcatcctggctttaacaaaagcgtggtggtttgtggtgtttcctggaaatcggatttgctgaccctggcatcagctgtgaaagccatgtgacagccccatgcctcagtttccttgtgtgtaatacaggtgccaacatccttctttctaacctgagatgcaggggatggttggagaaccttctggaaaaaaaaaammaaaccctgcatgtttctaccagactcagctcttgttttcctcacaggcttttcatgaggtcctggagaggcagaggctgatgcagtgtgacctggaggaagaggagaatgtcagagccaccgaggctgtggttgcactctgccaggtacatggcctctgtggggaccagcagagaagccccagggtctgtgtgtgtgcragaacctcacatcctcctggctggggaccccagaggtggttcaggtccaaccccgcactcattggccggtgatccacgcaggctgtgtcccctccatgcgatcctccttgcccacatcagaaaccgaggcrgttggccttggtcctctctgaggcaccgtccatttttggggtgctgaggattcttatctccacacatccctgtcagcaaagctctttggaaatccgttctccccaggtgagaaataggcccagggtttctgggtgtcatcagtgtaaagtggtgatgaagaaggggttctgggctgaaatggggaygtcagagatcacatgccacaccacctctttcccctgtgcaaccgtgtgcaggtctggggtggggaggtgaagctggccatgcttgccctgcagggtgactttcagagagcaggagaggrcacctgagccctctttaggggcaggagtcacaggatgccatgctgagccagacagagcccctgcctcaggcagcatcctcagttgttggaaagacaggagtgtggacacctggctatgaaggaatcaaccagtgggtgttgggcagcactgggaggaggagagggcctgggtctgtgtcctggctccccgcttcctcactgcgtgaccacaggagcatcacttggcctctagccctcagtttccccatctgtgaaatggggacagtcataattcttcttcatggtgtgcyaggaggactgtgtktggggacccgagacagcagctggcactcggaacaccccagggcacgttgtctccagtgacagcttccctgcttctgagtgcagaggagaggcaaggggctcctgggtgaaggtgacgtcaaggacagcagcctgtaggaggcattgctgagccaagcattggatgagaccaggcccaagtggacaaggagtcagcgggcatccccatcagggagaagctyatgcagtggtgggaagtgcaactcctcacccggatgggagctgcactggggtcagtcatgtctctgttaacctgctagggctgccgtggtgaataccactgactggtgggttaaacaacagaaaagcgttctctcaaggttctggaggctgaagcccgagatcacggtgccaacaggattgacttctggtgaggcctctcttccgggcttgcagacagctgccttcccgttgcctcctcacacggttatttctctgtgcttggaagactgmagggcaggggagagaatgaaagagagggctctggtctctcccttttcttataaggacaccagttctatgggattagggccccaccctgatgacctcatctaaccttaattacctccttaaaggccctgtctccaaatacagccacatgggatattggaggttagagcttcaacrtaagaatttgattacttaattacctccaaatacagtcacatgggatattggaggttagrgcttcaacctaagaattttggagggagacacaatttagtccaaacagtgtccttcaaaacgtcatgtccatctggaacctcggaatgtggccacacttggaaataagggctttgcagatgtaattggttagatcgcacagttggttaggtcctactggattcgggtgggccctaattctaatggctggtgtccttataagaaggccatgagaagacatagagacacagggaaggaggctgtttgaagacagaaggagggactggagtgatgcagccacaagccgaggaacacctgcagccaccaaaagccagaagagcccaggaagggcccctcccagagcctttggagggggcgaggctctgccaacaccttggtttcatactaatgccctccggaacggtgagagaataaacttcgttgtcttaatgcaccsagtttgcggcgctttgtcatggcagccacaggaaactaaacggaaggcgatctttgttcagggctagctcctatcttaagtgcctcttgagtatttgattatttaattctcatgagattcatgaggaagacactgcattttccttccttcccagatgaggagtgaagaagtgttttctccagaaatgggtaggatggggctcaatttgtcaaagccctggggcccacagacaggaaaggaacaactttgtccccagaggagtcaagactcacatccctggctgggcatggggaaaccaagttctaatcttcctctgagtgctaacatgctgtgtgaccttggctggttacataacctgtctgtgctggcccatgtatcttgcccaggttttacacagctagcaagcggggaaggtgagatttaaaataaaggctttctaatgttagtgctgatgtgctcaccccaaccatgctgctcagtgttgacggctgttgtgaaacctygcttcttgtgtttttagtttaaaagtatgtaaacaagagaccacagtaaaggggatgcagcacagagcaatttattgcaaaggagaaagaatgttctgaaagttaggtgcagaatagacaggatgccctgggagatgattcagagcagatgagacagccttgacttaccggggaaactccctttctggggagtcttatgtgattattcataagggcgtgggaagaagcattattagtaagcatgttgtggagggcggtgggggcgggtcctctgagtgcccaggcacagtagctgtacacacttgttcatacgtcacatgtctcattagcatcttaagtctccgtccaaaggtgtgttttttactattataatggcgcagagggtcagtctgaggacagataaaatcaaagtgcacctgccgactgcaggagacgttgcctactgcagataactgcttgaaagagccagactacagtgtaaatgctgaggcttactgtgttgatggtttggtcgccgcatcccaaggacatggtcacttccttgactacctatcctgccttacgtgtgggctgtggagcataatggtgaagcccaggctctggagccagacatctggggttcaaattcccagccgggccacttatttcccctgccggaggtgagcccaggtggcccagaggctatgggcggcgggggtggtttcagcagcattctcctcctcaccccctatggtagcttattggattctcacccatcctctctaaagcagttctcaaaccttgctgtgcatcagaatgtcatcaagattaaggaaattgagatacaggttagatcacttgctcacaattacacaaccaggctgacagcctgagtaaaaccctatcaatgattgctgcaaagggtaagccaagcagtatataaatgtaaacccagaacatctgagacgggtctcagttcatttagaaagtttattttgccaaggttgaggctgcgcgagcctgggacatagcctcaggagggcgcgtcctgacgacacgcgcccaagggggtccggacacagcgtggttttatacattttagggagacaggagacatcaatcggtacatgtaagaagtacattggttcggtcaggaaaggtgggacaacttgaagcaaagacaggaagactccaagcggggagtgggcttccaaatcacaggtaggcaagagataaacagttgcattcttttgagtttctgattatcctttccaaaggaggcaatcagatctgcatttatctcaatgagcagagagataactgtgaatagatgggaggcaggtttgccctgagcagttttcagcttgagttttcctttttgcttagtgatttcgggggcccaatatattttcctttcacaatacggaagttcctggccagccccagcgggtgctggtaactacatcagtttcaataaagagttgtcaatgatgccaaaatgacatccttaggaagttatgcatttggtttttccctgtgtgggcctagttgctgggcctgtgagagcttcagtgaagaaagtgaagacagccttttaacgtaacatcaggagagggtgacaggtgtgacgaggggtgatacctgctggagtctctctcctaggaggaggtatatgaaatgtactgcataagaaggtgtcgagggacacagtggagatgggtgtgaaattctccacatctgtgtgggtgttttttgttttttgttttttgttttcagacagagtttagctctagttgcccaggctggagtgcaatggtgcgatctcagctcactgcaacctccgcctcctgggttccagagattcttctgcctcagcctcccgagtggctggaattacaggcatgtgccaccacgcccagctaattttgtatttttagtagaggcagggtttcaccacgttggtcaggctggtctcgaactcctgacctcaggtgatccactcgccttggcctcccaaagtgctgggattataggcgtgagccaccgctcccggcctggcccaaggcctgtgtcagcatgtctcccagaattagtctggasggatttccttagatttactttgccatttcatcacaagcttttaggttccaggtcgcctggcatattttacatttcctcaatttggaaatcattgcctttggttactggaaactgcttttcctgatactccataggagcaggctaaaatcctccattgccgattggagagctggctgcgccctcctggctgggcgtccttgggccagagcctggactgttctgagctctggtttccttctctgtgcaatggagactgggagcccatttactttaaaggctgggtgtgccgaggagagcaggtccaaggcccagacctggcacatggtaggtgctcagtgaatgcctccccgcctgctccacagggagcatgatctcaggagatgttgagcccagtggggatgagcccagatctgggtccagggtcctgggtgtgaatctcaaccaccaaaatgaatgactgaagcaggtgtcacaatcaatcgaggtttattgagccagctcgagggtgcacctggaaaaacgcaagtcacagacttggctgttttttccaaagaggttctcaggaggtttaatatttatacattttcctttaaaaaggcggggggcggggggtggttggggggtggggcagcaatgagaggaacagttacgcacttgaaagactttcgttagtgcctagtaaatctacagttcacgtaagatcaggcgaacacttgaagaaaaagagaactgaggacgcaggcgaattatcttgtctttgtactgtgcctgagaagataagccagccggcaacatgatcaggatggacatttttgaaagggctggtttctgtttaccacttagggaataaagccttatggcggatggctagcaagggaaggggatcaatgagtggtgttccacctatcataccgacctttacggcacagggaatacagctcccaaggtgaaatatggtgtcccatggggcaagaagccgccactgataatcagggggcagcttaaaattgtgcgtgtgaattactatgtaagtattggggtgcatgagcgcaatgagcatgtgtaatccatttgtatacatgtgccatgctggtgcactgcacccacttgctcgctgaacaacaataggtatatccacaagggctactcggcccaccgccttaaataccagtttggtaacccactggccctatgtgcccccccttatccaagtgggggaggatgtatttaaatttaactccttttgaaatgatcttttccggagggctgggaatatggttattggcgcactataaacctcaaaaaaagggttcccccccactannnnnnnnnnnnnnnnnnnnnnnnnnnnnnnnnnnnnnnnnnnnnnnnnnnnnnnnnnnnnnnnnnnnnnnnnnnnnnnnnnnnnnnnnnnnnnnnnnnnnnnnnnnnnnnnnnnnnnnnnnnnnnnnnnnnnnnnnnnnnnnnnnnnnnnnnnnnnnnnnnnnnnnnnnnnnnnnnnnnnnnnnnnnnnnnnnnnnnnnnnnnnnnnnnnnnnnnnnnnnnnnnnnnnnnnnnnnnnnnnnnnnnnnnnnnnnnnnnnnnnnnnnnnnnnnnnnnnnnnnnnnnnnnnnnnnnnnnnnnnnnnnnnnnnnnnnnnnnnnnnnnnnnnnnnnnnnnnnnnnnnnnnnnnnnnnnnnnnnnnnnnnnnnnnnnnnnnnnnnnnnnnnnnnnnnnnnnnnnnnnnnnnnnnnnnnnnnnnnnnnnnnnnnnnnnnnnnnnnnnnnnnnnnnnnnnnnnnnnnnnnnnnnnnnnnnnnnnnnnnnnnnnnnnnnnnnnnnnnnnnnnnnnnnnnnnnnnnnnnnnnnnnnnnnnnnnnnnnnnnnnnnnnnnnnnnnnnnnnnnnnnnnnnnnnnnnnnnnnnnnnnnnnnnnnnnnnnnnnnnnnnnnnnnnnnnnnnnnnnnnnnnnnnnnnnnnnnnnnnnnnnnnnnnnnnnnnnnnnnnnnnnnnnnnnnnnnnnnnnnnnnnnnnnnnnnnnnnnnnnnnnnnnnnnnnnnnnnnnnnnnnnnnnnnnnnnnnnnnnnnnnnnnnnnnnnnnnnnnnnnnnnnnnnnnnnnnnnnnnnnnnnnnnnnnnnnnnnnnnnnnnnnnnnnnnnnnnnnnnnnnnnnnnnnnnnnnnnnnnnnnnnnnnnnnnnnnnnnnnnnnnnnnnnnnnnnnnnnnnnnnnnnnnnnnnnnnnnnnnnnnnnnnnnnnnnnnnnnnnnnnnnnnnnnnnnnnnnnnnnnnnnnnnnnnnnnnnnnnnnnnnnnnnnnnnnnnnnnnnnnnnnnnnnnnnnnnnnnnnnnnnnnnnnnnnnnnnnnnnnnnnnnnnnnnnnnnnnnnnnnnnnnnnnnnnnnnnnnnnnnnnnnnnnnnnnnnnnnnnnnnnnnnnnnnnnnnnnnnnnnnnnnnnnnnnnnnnnnnnnnnnnnnnnnnnnnnnnnnnnnnnnnnnnnnnnnnnnnnnnnnnnnnnnnnnnnnnnnnnnnnnnnnnnnnnnnnnnnnnnnnnnnnnnnnnnnnnnnnnnnnnnnnnnnnnnnnnnnnnnnnnnnnnnnnnnnnnnnnnnnnnnnnnnnnnnnnnnnnnnnnnnnnnnnnnnnnnnnnnnnnnnnnnnnnnnnnnnnnnnnnnnnnnnnnnnnnnnnnnnnnnnnnnnnnnnnnnnnnnnnnnnnnnnnnnnnnnnnnnnnnnnnnnnnnnnnnnnnnnnnnnnnnnnnnnnnnnnnnnnnnnnnnnnnnnnnnnnnnnnnnnnnnnnnnnnnnnnnnnnnnnnnnnnnnnnnnnnnnnnnnnnnnnnnnnnnnnnnnnnnnnnnnnnnnnnnnnnnnnnnnnnnnnnnnnnnnnnnnnnnnnnnnnnnnnnnnnnnnnnnnnnnnnnnnnnnnnnnnnnnnnnnnnnnnnnnnnnnnnnnnnnnnnnnnnnnnnnnnnnnnnnnnnnnnnnnnnnnnnnnnnnnnnnnnnnnnnnnnnnnnnnnnnnnnnnnnnnnnnnnnnnnnnnnnnnnnnnnnnnnnnnnnnnnnnnnnnnnnnnnnnnnnnnnnnnnnnnnnnnnnnnnnnnnnnnnnnnnnnnnnnnnnnnnnnnnnnnnnnnnnnnnnnnnnnnnnnnnnnnnnnnnnnnnnnnnnnnnnnnnnnnnnnnnnnnnnnnnnnnnnnnnnnnnnnnnnnnnnnnnnnnnnnnnnnnnnnnnnnnnnnnnnnnnnnnnnnnnnnnnnnnnnnnnnnnnnnnnnnnnnnnnnnnnnnnnnnnnnnnnnnnnnnnnnnnnnnnnnnnnnnnnnnnnnnnnnnnnnnnnnnnnnnnnnnnnnnnnnnnnnnnnnnnnnnnnnnnnnnnnnnnnnnnnnnnnnnnnnnnnnnnnnnnnnnnnnnnnnnnnnnnnnnnnnnnnnnnnnnnnnnnnnnnnnnnnnnnnnnnnnnnnnnnnnnnnnnnnnnnnnnnnnnnnnnnnnnnnnnnnnnnnnnnnnnnnnnnnnnnnnnnnnnnnnnnnnnnnnnnnnnnnnnnnnnnnnnnnnnnnnnnnnnnnnnnnnnnnnnnnnnnnnnnnnnnnnnnnnnnnnnnnnnnnnnnnnnnnnnnnnnnnnnnnnnnnnnnnnnnnnnnnnnnnnnnnnnnnnnnnnnnnnnnnnnnnnnnnnnnnnnnnnnnnnnnnnnnnnnnnnnnnnnnnnnnnnnnnnnnnnnnnnnnnnnnnnnnnnnnnnnnnnnnnnnnnnnnnnnnnnnnnnnnnnnnnnnnnnnnnnnnnnnnnnnnnnnnnnnnnnnnnnnnnnnnnnnnnnnnnnnnnnnnnnnnnnnnnnnnnnnnnnnnnnnnnnnnnnnnnnnnnnnnnnnnnnnnnnnnnnnnnnnnnnnnnnnnnnnnnnnnnnnnnnnnnnnnnnnnnnnnnnnnnnnnnnnnnnnnnnnnnnnnnnnnnnnnnnnnnnnnnnnnnnnnnnnnnnnnnnnnnnnnnnnnnnnnnnnnnnnnnnnnnnnnnnnnnnnnnnnnnnnnnnnnnnnnnnnnnnnnnnnnnnnnnnnnnnnnnnnnnnnnnnnnnnnnnnnnnnnnnnnnnnnnnnnnnnnnnnnnnnnnnnnnnnnnnnnnnnnnnnnnnnnnnnnnnnnnnnnnnnnnnnnnnnnnnnnnnnnnnnnnnnnnnnnnnnnnnnnnnnnnnnnnnnnnnnnnnnnnnnnnnnnnnnnnnnnnnnnnnnnnnnnnnnnnnnnnnnnnnnnnnnnnnnnnnnnnnnnnnnnnnnnnnnnnnnnnnnnnnnnnnnnnnnnnnnnnnnnnnnnnnnnnnnnnnnnnnnnnnnnnnnnnnnnnnnnnnnnnnnnnnnnnnnnnnnnnnnnnnnnnnnnnnnnnnnnnnnnnnnnnnnnnnnnnnnnnnnnnnnnnnnnnnnnnnnnnnnnnnnctgctttgaatgcatccccagagattttggtatgttgtgtctttgttctcgttggtttcaaagaacatctttatttctgccttcattttgttatgtatccagtagtcattcaggagcaggttgttcagtttccatgtagttgagcggttttgagtgagactcttaatcctgagttctagtttgattgcactgtggtctgagagatagtttgttataaattctattcttttacatttgctgaggagagcattacttccaagtatgtggtcaattttggaataggtgtggtgtggtgctgaaaaaaatgtatattctgttgatttggggtggagagttctgtagatgtctattaggtctgcttggtgcagagctgagttcaattcctgggtatccttgttractttctgtctcrttgatctgtctaatgttgacagtggggtgttaaagtctcccattattaatgtgtgggagtctatrtctctttggaggttactcaggacttgctttatgaatctgggtgctcctgtattgggtgcatatatatttaggatagttagctcttcttgttgaattgatccctttaccattatgtaatggccttctttgtctcttttgatctttgttggtttaaagtctgttttatcagagactaggattgcaacccctgyctttttttgttttccatttgcttggtagctcttcctccatccttttattttgagcctatgtgtgtgtctgcacgtgagatgggtttcctgartacagcacactgatgggtcttgactcttcatccagtttgccagtctgtgtcttttaattggagcatttagtccatttacatttaaagttaatattgttatgtgtgaatttgatcctgtcattatgatgttagctggttattttgctcgttagttgatgcagtttattcctagtctcgatggtctttacattttggcttgattttgcagcggcttgtaccggttgttcctttccatgtttagcgcttccttcaggagctcttttagggcaggcctggtggtgacaaaatctctcagcatttgcttgtctgtaaagtattttatttctccatcacttatgaagcatagtttggctggatatgaaattctgggttgaaaattcttttctttaagaatgttggatattggcccccactctcttctggcttgtagagtttctgcctagcgatcagctgttagtctgatgggcttccctttgtgggtaacccgacctttctctctggctgcccttaacattttttccttcatttcaactttggtgaatctgacaattatgtgtcttggagttgctcttctcgaggagtatcttggtggcgttctctgtatttcctgaatctgaatgttggcctgccttgctagattggggaagttctcctggataatatcctgcagagtgttttccaacttggttccattctccccatcactttcaggtacaccaatcagacgtagatttggtcttttcacatagtcccatatttcttggaggctttgctcatttctttttattcttttttctctaaacttcccttctcgcttcatttcattcacttcatcttccatcgctgataccctttcttccagttgatcgcatcggctcctgaggcttctgcattcttcacgtagttctcgagccttggttttcagctccatcagctcctttaagcacttctctgtattggttattctagttatacattcatctaaatttttttcaaagttttcaacttctttgcctttggtttgaatttcctcctgtagctcagagtaatttgatcgtctgaagccttctctcagcttgtcaaagtcattctccatccagctttgttccgttgctggtgaggaactgcattcctttggaggaggagaggcgctctgctttttagagtttccagtttttctgctctgttttttccccatctttgtggttttatctacttttggactttgatgatggtgatgtacagatgggtttttggtgtggatgtcctttctgtttgttagttttccttctaacagacaggaccctcagctgcaggtctgttggagtaccctgccgtgtgaggtgtcagtctgcctgggctggggatgcctcccagttaggctcctcgggggccagggttcagggacccacttgaggaagcagtctgcctgttctcagatctccagctgcatgctgggagaaccactgctctcttcaaagctgtcagacagggacatttaagtctgcagaggttactgctgtctttttgtttgtctgtgccctgcccccggagatggaacctccagaggcaggcaggcctccttgagctgtggtgggctccacccagttgcagcttccaggctgctttgtttacctaaggaagcctgggcaatggcgggcgcctctcccccagcgtggctgccaccttgcagtttgatctcagactgctgtgctagcaatcagcgagactccttgggcataggaccctccgagccacgtgtgggatataatctcctggtgagccgttttttaagcccgtcggaaaagcacagtatgcgggtgggagtgacccgattttccaggtgccatctgtcacccctttctttgattaggaaagggaactccctgaccccttgcgcttcccaagtgaggcaatgcctcgccctgcttcggctagcacatggtgcgctgcacccactgacctgcgcccactgtctggcactccctagtgagatgaacccagtacctcakgtggaaatgcagaaatcacccatcttctgcgtcrctcacgctgggagctgtagaccggagctgttcctattcggccatcytggcccctccccccaccggcagcttagaattttacttttcttcctcagtctgctaaccaggcatcttgggagagtttgttcattcattcattcgttcattcattcattcattcaagtattgttaagcacagctttgtgcagcatgtgtatgcttggcattgcagcagcagcagcagtgaggccagtgtaagggcagtggggaagctggggaggaaggtagggagaaaggggcagaagaggaggggatgagtccagagcgcctcatcttggaagacgttgcagactgttccaagatagttgcatttacwtctgagtgagacaggaaatcaccagcatgttttgagtagggaagtgacttgctttatgttttacaaggaccagtgtggtttccatgaggaaaacagactgtaggggcagaggcagaagcagggagccctggtaggagactgctgtggcccgtgtaagagatggtgctgactgacggggcagggagaaagcctggagctttgtgtttgtttggacgatcaatatcccacctcctctatgttaaagtagacctaataggccttcatatgaatatcaagaggtttaaataatctcacgtgggtaaagcatatagaagagtgttgggcacacactgatactcaaaatgtattctcggctgggcacagtggctcacacctgtgatcccagcactttgggaggctgaggcaagcggatcacttgaggtcaagagttcaagactagcctggccaacagggtgaaacctcatctctactaaaaatacaaaaattagccaggtgtggtggtgggtgcctgttatcccagctactcgggaggctgaggcatgagaatcgcttgaacccaggaggtggaggttgcagtgaggcgagatcacaccactgtactctagcctggtgacagagcaaaactctgtctcaaaaaaaaaaagaaatattctcattcatcatcattcaccatatagaaaggtgtgcacagaacaggctctcaaggtaccctgccttgctggctggctggctgtgcccaggcccaggcacacagaggcatcattttaccccttctttgggcatgacactgatcatgatattgcaggcacagtggctgtgagatacatttgatggtcacctatattaatttgttctcacacttgtaataaagatatacccgagactgagtaatttataaaggaaacaggtttaacagactcacagttccacgtggctggggaggcctcacagttatggcggaaggcaaatgaggagcaaagtcacatcttaaatggcagcaggcaagagagagcatgtgcaggggaactcctctttataaaaccatcagatctcatgagacttacccactgtcacaagaacagcatgggaaagacccaccccagtgactcagttacctcccactgggtcagtcccatgacatggggattatgggagctacaattcaagatgagatttaggtggggacacagctaaaccatatcataacctaatggttctcagggctacagagaaaagtgcatttttctgaatcccccctgtctctcggcctctaaacagtccattttcagttcacttgggatggatgctgtgygatcgcgtgagctctgtggctcggcacctcacraacaggttgctgcaccaaagccagtgtcatcccaataacagcggggctctgggtggagtttgctgtcatcccattccaggggccacacarcccacctgttcatttggatgtctgtctgactgtccccccatagctgtttctcttgaaargctctgggagaaggtggtaaaatcacagccctgtcatgcggggacttctcagcttcaggctgtcccaggaagttagggctgagaaaaagagaaaacactggactctgtccttgaagaacacaggcatgataacaggtgcttatgaagtgtctgagagtagttcccaaaccaccttcacttcttctgatgtcagatgcaagtttggtggtcctgaagatccccctcaggctctttaactcaccagaaggactcccagcactccctgacagctgctgtgctcagggccaggctgatgataatggaaggctacagactaaagtcagccaagggagaggcatagggctcgaggggggctctctgcacagagcttctgggtgtcctctcctggtggagctgagggcagcacttactccccctggccacaatatgtgacaaggcacacagagtgtcaccaagcagggaagcttgcccaggcttcagtgtccagagtttttattgggctcagctacactggtatggctgaccctccgcccccacagctgccctgagcctccagcccttcagaggtcaagctgagaccacatgccctaaggcctccctgccgtaaatcacagtgttagcatagactatcaaggccgccaggtcagcaaagacactccagtcagaccaaacattccaggggctgagaggtgacataccaggggccaaggacaggccagacccctctttggtcaagattaagtgctgcatggcactggaagtctaaagtgtctgttcaaggtcactcagctggggcctaggagtcaggcccaagcctcgtaacattctagtgggaagtagtgattcggagaacacaagaagggagaaggaatgtgccctccttgatggaagggttgaggcttgctcatttctccacccctggggttgtgtccagggcataacccactctagacaatcagtcaatattgatgaatacacaaatcagtcaatcagttaatgtattaatgaattggctgggagtgttggctaacacctgtaatcccagcactttgggaggccgaggtgggcagatacacctgaagtccagagctcaagaccagcccggccaacatggcaaaaccccatctctactaaaaataacacaaattagccaggtgtcgtggggtgtgcctgtaatcccagctacttgggaggctgaggcaggagaattgttgaacccgggaggcagaggttgcagtgagacgagatcgcaccattgcactccagcctgggtgacagagcgagacttcatttcaaaaaaaaaaagaaaagaaaatacatcaatgcatcagctaaacaattgtcattctgaagatgtcatattaggtattagttttctatagccactataactaatgaccacaaactcagtggcttaaagcaacacaaagttatgttacatttctggaggtcagaagtctgatgtggatctctctgggttaaaatgaaggtgtcagcagggctgactcctcctggaggctccaggggagaaacagttttcttgacttttccagtttctaaaggccacccacattccttggctcagggccctttcttccatcttcagggccrgctactcctgcctctgcttccaccattacatcttctctgactgtgaccctcctgcctccctcattcacttataagaaccctgtgatgacattggagccaacagtgtcatccaggatcttctttccrtctcaggatccttaactcagtcccacctgcgaagtctctttaccatgtaaagttccgtgctcaaaggttccagggattgggacgtggacatctttagggagacattctgtgtaccacggagaaaaacagtacatttccaaagagagaaataaatttgtttattgaaggccatgaaaaccctgattttctgggcagtaacctattggaagcagatcttgagagaaaatgacagaagcctgggcaccacagacctccccgtcgccgggaagcaggtgtccatgggcgctgcagagtgcaaggcagtttccatggtcctttattaggcttaaagggttatacaccatgaccaaggatgcagggactgagaaaaataggctgggtgattcatatctccctttacagtaaccagctaacggaatgtggctttttattttattttattttattattattattattattttgagacgtctcactctgtcgcccaggctggagtgcagtgacatgatctcggctcactgcaagctccatctcccaggttcacgccattctcctgtctcagcctcccgggtagctgggactacaggcaccgccaccacgcccagctaattttttgtatttttagtagagacaaggtttcaccgtgttagccaggatggtctcaatctcctgacttcgcgatccgcccgcctcggcatcccacagtgctgggattacaggcgtgagccaccgtgcctggctgtggctttttattttaatttagtaaaactactggggtaaatgtgttttctttgcagaagtacaactcacagtgcccttgtatcacatgctacccctctttccttttggtaattttcacaaccatcttacctccctgcaaagaggtacgggggagagaagagtcgttcaagaagcaaacagaccaggttatgggcccatttcagctgcatacctgctgtgtggcctagtccatatcacttaacctctctgatccaggaattcttggctaccttccttttaagttcttaaccatatgaaagagccacttaacaccccagaatgcctcctgttgttctcaagaagaagtccaacatccttaatctggcccatcatgaccacttagcttggtccacgaggcccatccagcctgtccacaagatgcccccaacctgacccacaaggtcttcctggcctgacctatgacgcttccacccaagctggcccacaggatccacctgtccagcctggcccatgaggtccacacaacctggcccactcatcacccttcctaaagttctgtcccttgctccctgacttccagctgrcctcagatgtctctcagttcccccaagggtgcacttgtccctcccaccccagtgcctgaaactgtcttcctcccttccctgggctttgcctagccagctcattcttgctctttgagtctcagctgaaatgtcacttctttaggggagccctcctctgacctctccccagacctgtctaacttaggacttccatcctcctggtcatcacatgtgccacagcctggggggagcatgtgtgcamtgtcccctgttgggcygtgaactccctcgggtctgggtccacacctgcctcggtcaccgcagtgtccctggcacagggccttgcctgcggtaggtgccaggagacatttgcaaaatgaacrtatgcatgctgtgaggatgacacacatatttatcccagagcgttcacttttaggaccccctccatctcctgctgtccaggtaactatgatcacagtcatgctgtgtaacaagacaccgggaaacccaggggctgaaaacaacagtgatttgctctcatgggctgcagcttggccagcagttagctgatctaggctgggcttgattaacttgactcagccttgctccatgtccctcccrtcttccccctaagacctgtggactagcctgggcatgttcttctcatagcaatagctgaggtctagcctccaaagcagcacacctcacttccacctcattctgtcgcccaaagcaagttacgtgcctgaactcagtgtagcagaggcagggaagtgctctccactcaccttgagaagtccctgcaaagttatgtggcaaggggtgtgggtgccgggagagagactgggaggcggtgcgctgagctrccggggtgttttgtgggatcccccatagtccctgcaggtttgtatgcaggtatcctcccttccttttttaagggagttggcccatggtcatgcttctggtggatggcccagtactgcaggtgccagagctcctgccccttgttcaacccacttcccatttttaagagactcaagctcacctgtgctctccaggacccacttgtcaggggaactggagcacactttactctgaagtcattaaatgtgcatcttcagaacaatcaggctggggtccctggggaacattcttgggtcmtgtgatgaggaacaaaagtctcccaggggccagaccatgtccagggaatcccagaaagatccattccgtggactctgaaccttcattggtgcatcttcagccctggccacatccttgcctttcttgaaccccaccatggtccagtttgccagatcacttggcagtgtgtatttgggtccttcgtatggtgttggccccctcactagtcctgtgcctctgcaacactctatacttcagtcctactgggccacctgcccatttctggctttgtacctctccttccttccctccctcccatctctcccctcctcctgcttgccttgcaaacaactgaaacaaaaactgcctctgctcagagggaattattctcacctcttttcccccaaatgctttgttcctagaatgacaatagcagtggataacacttcttgagaaccacacactaacttctccaacttttatctaatgatactagctagcatttattaagtgcttgctgtgtgctgtgagccagccaatccccataaatcctttctaatcctcataatcagccctcaaagcaggtattatcagccccctttgacagataagactgagccttgagtaggttaaggaagctttgtaaagctctagactatgggtatcttccttgccccaagtacctgctgtgtgagaaacctggggagggcaggtggtggtttgaatgcggctgcagaggagacagctgagtgaaggagcaagtacaaagtgagcagtttgtatttgcctgggctgtgtgtgcttctgtttgagggggaggggatagcctcctaagcttgggggatgaggctcagggccagcttctattccccaccagagttccactgtgtcctgacccctttacacacactgggaaagcaataatgcaaattaattctggttctatttcaggcacagaataaatcagtatctcccaagtgacatatgccagcattagtgggaagtgatgtgttttatggcctgtcagaccatgtgacaaagaacgcagacttgagtctttccaaggagcagacaggatccagcacatttcttattagaaggagcctaagctaatggaccctgttgtttttacaaagctaacccttctctaatttacaaatcccgcatatttttgtgatttgaccattgtgaacaataaagaaaaaggtttgtcccaaccactgctgtagaataggagagtccaagaatgacagtcaacttaaamatctgtctcctggcagaaaattgggattctcagaggctagaaaataatgtccatcatccccactcattgaaagtgtttttactgtgaaatataagacatatgaataaataaagcataatcttacaaattaacaaatgattattgtaaaacatttatgaaaccatatagagcaagaaagagaatgtagctgggaccccagaacacccccaatgcctcctccccatcctaacaccctccctgctcccaggagccatcatccagctgatacagaaatcagatccctagtttgatttacagttgtaaatctcagagcacatcctggacattgttgtgcagctttggcagtttttgaactttatataaatggaatcatacagcatgtgctttgtcccattggcctttcactcaacttgatatttgagagatccatccgtgtggttgtatgttgtagttcattcttcctcattgctgtggagtgttctgttgtataaatacactgccatacatttacccatcctactagtgatgggctttggagtcttcttgtgttagcctattacacactggctgacgtgaactttcttgtagaagctgtgtgtacatatttttcttggatataccaaagagtggaagtattggattaaagaatatgtgtagcttcaatttatatctcatatagttgttgattaagatttggaatttataggtcaatttgaggagaattaatgtgtttacaatatcaagtcttccaatcaagaaacatggtatattgctacaattatttaggtcktatttaatttagtttttcttaatattgctttgtggtttctaccattagctataatatgtaatatagctgttgtttttttttaatcaagttaaggaagtttctttccattcctaatttgctaagtgtgtttctcatgcatagaaattaaattttgtaaaatgctttyatcttcctctactgaggtaatcagtgtaatatttttctcctttattctgttaatttggcaaatttcattgatttggtaatgttattaactacatacaaatttataactttttcatttttccagtgaattaaaccttttagcattaggaaatgacccctttgtgtctagtcatgttttgttttctttttcttaaagactattttatctgctattcatgtagcaaaaagtgaccctgtgtttactaggtgctggccgttcatttattcattcattcactcattcattctttaaaaaatatttacctgagtagcatcaaggtcatgggcactggaacccaactgtcagagctgtgtgtaaacttgtgcaactgatttaacttctcttttacatgtaaagaggaagcctcagtttcctcatctgtaaatttcttccatcagtttgggaaatttcattatctcttcaaatactgcttctacccagacttgccctccgatccttcagagactccaatttaacatgttggaccttcccattgtatgtgctctgtcattatcttttcctccatattttccatcctttagtctctccttgctttgttctgctagtttcttctgatctattttccagtgtgctaattctctcttcagctgcacctaaactgctattaaacctgtacactgagtttaatatttttcaattctagacaatattttcaattctagaactgctagttggctctttttaaactaagtagtgttactttttataatttccagctccttgcttaaaggtttaagagtggcttttagcttcatgagcatagtaagcattgatattttaaagaccatgtcttgtaattacatgctgacttgtaattactctctgaagtacctgtgggtttgtttctgatgcccattgtttgtgtaggtctttgatcatgttaccttatctcctcatgtgtctgtttatattttgtgtactatatttcaaatttgcacacttatttgtagaaatattttcaggtatacaatgatactgtccttctccaaagaggattttcgtttgcttttgtcagatatcagcacctctagtgatccagggtcaccttaattcaaagtcagggcttaaaatatcctgggcaatctaaataacttgactccaggttacagtttgtataacgagtctggactggttcccttccattttactaatatttctccagtatggctttttgggtaccaactgtaagtgtggaatggtttaccaggcccccacccgtaatgaacaatgaacttgaacttcggtcctctgacagcgtcaggctgtcaaaggacctgctcagctgttcagccatcccctctgaatcaaccaacactccctaggtaaaagccgcccaaagactgggcatgcccctccagatgtgtcttcttagaccttggcccatgtactcatcacaatcttgttagatctttgcaacttttatgaagatttaataattattttgtccacttatctttttcattcacccctagtgaaaagattggtccaagttatctggttagccatatcagaaatataatctctaaatcttttaaaagaatgtgggttccatatgcccttgtcatggtcactttattctgaccaaagtcagggttggcgatgagcttaagagtgtggcattcattaggttgaattaacattgatttgaatgaaattttttgttgttgttgttwttatactttaagttttagggtacatgtgcacaatgtgcaggttagttacgtatggatacatgtgacatgctggtgcgctgcacccactaactcgtcatctagcattaggtatatctcccagtgctatccctcccccctccccctaccccacaacastccccagagtgtgatgttccccttcctgtgtccatgtgttctcattgttcatttcccacctatgagtgagaatatgcggtgtttggttttttgttcttgcgatagtttactgagaatgatgatttccaatttcatccatgtccctacaaaggacatgaactcatcattttttatggckgcatagtattccatggtgtayatgtgacacattttcttaatccagtctatcattgttggacatttgggttggttccaagtctttgctattgtgaatagtgccgcagtaaacatacrtgtgcatatgtctttatagcagcatgatttatagtcctttgggtatatacccagtaatgggatggccrggtcaaatggtatttctagttctagatccctgaggaatcgccacactgacttccacaatggttgaactagtttacagtcccaccaacagtgtaaaagtgttcctatttctccacatcctctccagcacctgttgtttcctgactttttaatgattgccattctaactggtgtgagatgataactcattgtggttttgatttgcatttctctgatggccattgatggtgagcattttttcatgtgtttttttggctgcatcaatgtcttcttttgagaagtgtctgttcatgtccttcgcccactttttgatggggttgtttgtttttttcttgtaaatgtgtttgagttcattgtagattctggatattagccctttgtcagatgagtaggttgggaaaatgttctcccattttgtgggttgcctgttcactctgatggtagtttcttttgctgtgcagaagctctttagtttaattagatcccatttgtgaattttggcttttgttgccattgcttttggtgttttagacatgaagtccttgcacatgcctatgtcctgaatggtaatgcctaggttttcttctagggtttttatggttttaggtctaatgtttaagtctttaatccatcttgaattgatttttgtataaggtgtaaggaagggatccagtttcagctttctccatatggctagccagttttcccagcaccatttattaagtagggaatcctttccccattgcttgtttttctcaggtttgtcaaagatcagatagttgtagatatgcggcattatttctgagggctctgttctgttccattgatctatatctctgttttggtaccagtaccatgctgttttggttactgtagccttgtaatatagtttgaagtcaggtagcgtgatgcctccagctttgttcttttggcttaggattgacttggcgatgcgggctcctttttggttccatatgaactttaaagtagttttttccaattctgtgaagaaagtcattggtagcttgatggggatggcattgaatctataaattaccttgggcagtatggccattttcacgatattgattcttcctacccatgagcatggaatgttattccatttgtttgtatcctcttttatttcattgagcagtagtttgtagttctccttgaagaggtccttcacrtcccttgtaagttggattcctaggtattttattctctttgaagcarttgtgaatgggagttcactcatgatttggctctctgtttgtctgttgttggtgtataagaatgcttgtgatttttgtrcattgattttgtatcctgagactttgctgaagttgcttatcagcttaaggagattttgggcygagacaatggggttttctagatatacaatcatgtcgtctgcaaacagggacaatttgacttcctcttttcctaattgaataccctttatttccttctcctgcctaattgccctggccagaacttccaacactatgttgaataggagtggtgagagagggcatccctgtcttgtgccagttttcaaagggaatgcttccagtttttgcccattcagtgtgatattggctgtgggtttgtcatagatagctcttattattttgagatacgtcccatcaatacctaattgattaagagtttttagcatgaagggttgttgaattttgtcaaaggtcttttctgcatctattgagataatcatgtggtttttgtctttggttctgtttatatgctggattacatttattgatttgcgtatattgaaccagccttgcatcccaggcatgaagcaaaccgaatccagcagcacatcaaaaagcttatccaccatgatttgaatgaaatttaacttatatccattgagcacagcaagtatgagctaggtacattcaccatactaagtgtatgtgtgagaatatgtttattttccttttaaaaaaacaattatccatgtagcacactggctaagggtatgagtccaagagtccaatggccaggaccttccatctgtaaactgtgttccagttgctcatcttctctgtgcctcagtttcctcatttgtaaaatgataataattataatagaatgccttgattgaactgttatatagattgagtgatattatgcaaaaacagtgttcttgactcaaattagtaattcttaacaattatatttattatcacctgtcattttctggggactctgccaggccctgcaaatgcaaaggtggtaagaagaaactctgtggtcttgtccatgagaaggacaatcatacaaccagtgcctggaaaggttggtgggtgctggaagggcagcagcaaaggaggggcacctcttctggggtccgtaagatgaccaggttcagtggttcactaagacagctcatggactcagcctatagttgtacccatggctaagagttactgcagtgaaaggattcaaagcaaaatcagcaaagggaaaagctacaaggcgtaaaatccagaggaaaccaggcacaagtttccagaatcctctccccatggagtcacacaggatgcacttaattcacatgagttgtggcagcatgtgtgaaatgttgtctaccaggaagctatcttgagcttagagtccagggattctgttgggatcagtcatacgggcacatctccttcctgtcacgtaccaagagtccagactccaggaaggaaagcagatgttcagctaagccacattgcacytaatgagaccctgtgttcagagtgccttgccagaaaaggagacctcgaattgatttttggaacatgtgaggagagttcctgggcagaggggaatgtgggtgctctagttgtgttggggcatggcttattcagggactgccagcacgtgcttggttggggaggatatgagatgtgggtgcagaccctagcgcgacaaagccgctatctcagggagctgtggtctaggggaatgacagataaactgtggcttagataccctggtaggctaaccaaacagctggtgggagctcggggtcagaaatgcccatgttagtggcccaggggaggctccagagaagggattattttggagggatttttcagggcgaggagtccattctgggtgtaaaagtgattggagatggggcaaaaggagtggctttaaaaagcttctgggctgggcgcggtggcccacacctgtaatcccagcactttgggaggtcaaggcaggcagatcatttgagctcaggagttcgagagcagcttgagcaacacagcaaaacctcatctccacaaaaaaatataaaaaattagccaggcatagtggcatacactctatagtcccagctatttgggaggctgaggtgagagggtcacctgagtccaggaagtcgagggtgtgatcacgcccctgaactccagcctgggcgacagagggagatcctgtctcaaaacaaaacaaaaagcatctgcacaatgaaacatgcaatgagatgccatttatgggtgaatgaacacaaacaccaaaagccacctttatgaacatgatatgcagggaaagtagagacctgtaaactggagagagggtcactgcattcatggggatggctgtctgaggctgagagggagggaaaaggattgcagggagccataaagaattccaacttgacctgtaaagttccatgttttttgtttttgtttgtttttatattttttgagatggagtctctctctgtcacccaagttggagtgcagtgacacaatctcagcccactgcaacctggaccagcttcaagtgattctcctgcctcagcctcccaagtagctgggattacagacgtgcgccaccacgcccggctaatttttatattttttagtagagacagggtttcaccgtgttggccaggctggtctccaactcccaacctcaggtgatctacccacctcagcctcccaaagtgctgggattacaagcgtgagccaccatgcgcagctatctgtaaggttccattttttttttttttttttttttttgagacggagtctctctgtcgcccaggctggagtgcagtggcgcaatctcggctcacagcaagctccacctcccaggttcacgccattctcctgcctcagcctcccgcttccatgttttaaatgaaaaaaaaaaaaaaaaaaaaaaaaaaaaaaagatgtgagcggtggattcacaggtgtttaatattattattatggtgtgggtttgtttttcatgatttttagaaagatattggggtgggggagcggggatgaaggcaacagaatgataagacaagaggcaggacagccggagccatctctgagctgcctggaagccctgctgggtgatcttgagtgtgaggggaacagaggtcttccacgttatttgaggaggactcatgataagacgtgaagtttatgaaaataactcacttaagcatggagggtggaagggaagacaaagagaccagtggggattgtgaaaataatctagatggtgacccaggggaggccctaatgatggttttgaggagatgccagagttagagagctcactgtgggaggagagcaggtgtgaagcttggcaaggagagcagatgtgaaggttggcgaggagagcaggtgtgaagcttggctgagtggggttgagagggctctaaggtgacgggtgcatcccaaggctgtgcgtgtgtgcgtgtgtgtgtgtgtaggagtgtgtctatgtgtgcaagtatgtatgagtctatgtgtgattcatgtgtgtatgtgtgcacttgtctatgcatggatgtatgtaggagtgtgtgcatggrtcaaatgtgaacgaaagtgtgcatgtgttcctgtgtgtgtgcatgtgtgtatatgtgcctgtgtctgcatgcatatgtgtatgagtacatgtgcatgtgtctgtgtgtacaagtgtgtgtgcatgtgggggagttacttgtctgtgtgtacaagtgtgtgtgcatgtgggggagttacttgtatgtgtgtctatgcatgcttgcatacgtgtgacttgagagttcctgtctgtggatctccttgtgtcttgtgggaggcttgtggaggagaggcagagagcagctcaggccccacacagggtcctgccgtgacctgtaaccccatctgtggttctccgctccaggagctgtacttcagcaccgtggacactttccagaagttcgtggatgccctgttccttcagacgctccctggcatgactggcctccccccggaagagtgtgactacttgaggcaggaagtccaggagaacgctgcctggcagctggggaagtcaaatcgcttccrgaggcagcagtggaaactcttccaggagctcctagagcaagaccagcaggtgcgggcatttgggaacccaggggctggggtctgcattttagaaacacacgaagaagcgtgagagatctcacgtcctgaacacccactagtgcctattgtaggtgctctacggagatgactgttgcctccctttcacaatggcccaccacaggggtgggatgagagagcagagcccttatctccctcaacaggaagtcggagatsataccttaagttgatcgattaagaagagcagcaaagcttgttctttagaacgagagaaataagtagccaaccaaatggcaggaaggaaaggggttcacagggagtgggctcagtgggggtgggagaagcggcacacaggactcctgtttttcagtgagtctgattattaagaccatggatttatgctgagacagaatcgtgacccctcaaagatatctatgctgtgttcccttacagggcaaaaggcaggtgcggttgagtgaaggactttgaggtagggatgtttgtgggttatcctggtgagcccagcgtaattgcaagggttcttacaggagacaggcagaagggtgggagtcagagaaggagggttgatgttctaagcagaggtcggaatggtgtggctgtgagtctaggaactctggctggttctagaagctggaaaggtcaaggagcacattctcccctatagcctctagaaaagagcacagccctgctgacaccttgattttaacccattaagacccatttcagccttctggcctcaaaactgtaagatagcagatttgtgttgttttcagctacagcttgtagcaatgtggaacagcagcaataggaaactaatacaatacacattgattttttttttttttttttttttggaatggaatcttgctctgtccaggctggagtgcaatggtgcgatcttggctcactgcaacctccgcctcccaggttcaagcgattctcctgcctcagcctcccaagtagctgggattacaggcacgtgccaccacgcctggctaatttttgtatttttagtagagaaggggtttcatcatggtggccaagctgatctcaaactcctgaactcaagtgatctgcccgccttagcctcccgaagtgctgggattacaggcatgagccactgtgcccagcccagattgattttatctttaaaaaattaaaaactgttaaattaaagaaggcatttccaaattcaacatccaccaagacagcccaccagtcctttctcccctgccttcggccctctagaggctgtgaaactaacatcctcaatatccatatcccttgcaactagccatggctgagtgacactgctctggcctttgaaacaaagcaaagggcttctgtttcctgataccagagccggttttgcttggagcagcccccttcttcagtgtcccattcttccttcttagaacgcatgggaggcctggaggtgcatcagcctttctctgccctagaggcagcctgcgtgagcctggtgggctccagatggtggagcagtctcagacagccctgagcccctggcagtgctgttaagccattaccgcagccctgaaccgcctgcccctacatgcttattgtcagaaacaagccctgtttctttaagttgggtttgcgattagttacaaaagaccagtgtgactgatgcatccatctgaaagaggtttcctaaaacaattccttggggcaatagaaagtacaaagtagatagaggagagcgttatgcaaacacatgaccactcacagctgtggggacaggcacagggcctagttgcctgcccgaatgaattcttagacctccttctagttcattcagtcctctgtcagtggcatccggttgccctgtcgtaggtgacttgtctgtctcctgcatttggctatgagttccttgaggacggcaaccctgattttcatcttgacaccacctattcaaagcccagtggctgcaatatggtaaatgttcaggaaaacttgtagcatttccagcaacaataatgcagctttggaaatgattacagtgttgcctttgccctgtattcttcgaagggatctaaatgaagctgaattcttcctattcattccaaatcctaggccgcagaccaattcatttacagtctttggggagggaggaggacctgggcctcagtgtctcagaaaccaggtgagcctaatgggcctctgaagtggacccactaaatgagtgtaggggccttttagagaccattgtggttttgcagccaggcccctaacctcagaagcctaagatatgggtttgagccagagcagacacattaatgggctgtgtgactttagccagtgagctgacctcttgcaactctgtgattttacacaacttgctaaaaatgcctcagaactacaccttctatgtgaaaactaagggtcacaatatccaaatgattccattcagataatgcaagttaagaccttttgcacaatatctgttgaatcatttaatggtattgatagtgaaggaatccagaatttcatttctgacaaaacacctgtgattcatctaaaactctctggttaggagtcttaagttattttaggcaaatagactatgctcagctctgttttgaatgttttatttgtttactttgtgagcatacgattgtgaatttttcttggcatgtggggaaggtttctggttgagttttgcatgcaggaagcaagcaggagagttaatgacctcatcagctgattacataagtatgacccaagactgttttctcaaggtgtctatgtcacagttaatttactgattacttaactgccttaaattaacacatgatagccgggtgcggtggctcacgcctataatcccagcactttgggaggccaagacgggcggatcatgaggtcaggagatcgagaccatcctggctaacatggtgaaaccccgtctctactaaaaatacaaaaattagccaagtgtgatgacaggtgcctgtagtcccagctactcgggaggctgaggcaggagaatggcgtgaacccgggaggcagagcttgcagtgagccgagatcacgccactgaactccagcctgggtgacagagcgagactccgtctcaaaaaaaaaaaaaaaaaaattaacacacgatagttagagatccacctgccatatttcctcattgatgaaaaaaagagaaatgagctctctgtcattcagatgaatattagtcatgagaagaaaagcaccagcgaagctattcatggaaaatcaaaaacacatcgactacaaattgcctttcccacattgttttctatccaaaaagacagtgggtcgtttcatatcccattgctcagggaagttattaaaaattaatggaatttgtgaattaccccgttagaacaggttgtagaatggtgtttctcaaaatttaatctgctctaatgcagatttctgctctcagtccccttgcggtaggcagctataatggccccccagagaggcccacatcctaatccctaaaacccgtgaatatgtctggttacaaggcaaaaaggactttgcaaatctttgcgaatgtgattaagcaaaggatcgtgagatggggatattctcccgatgatctggcttggccccatgttatcacaagggtccttataagtgaaaaaggagcagcagtgccagagtgaggagtgaggaagactctgcagccattgctggacttgaagacggaggaaggggctgtgagcccgggaatgcaagtgccctctaggaactggaaagggcaagaaaatggattctgccccagaccctcggggaggagtgcagacctgccaaccctcatttcaggcttccgatctccagaagcgtaaggtaataagtgttgttttaagccaacaaatttgtaataaagtgttatagcagccacaggaaactaacacaccagtgagtaggagtggggcagggaatgtggcagttggtgcactccttagcataacagtaaagaacaccagtgctagaggcagtctgtctgagtttgaatcctggctccccacctcactctcctctccctctggctctgcaccccactccgggtggttttcatcatttcatcaccaagtctgctctcctctgtgccgagctttcaggcctcctcttactggacaaggtggtgtttggccaagttggtctctttcctcctccttgaaacacccgcttgactctcttgcttctcctcccagctcacttctttctccttctcagtctcctttgctggccccttcccagctccttaatttctgaacactggagagccctggggtgcagtctccagtcctcttctttatctacatgcactgtctcagtgatcccatccagtcacacaccacctgtattagttttctaatgctgtgtaacaagtaacccccaaactagaagcttaaaacaacatgcacttattgtctcacaatttctgtgggtcaggggtccaggcacagtttaactgggccctttgttcagggcctctcacaaggccacatccaatccctgggctggggctggagtctcatcagaaggcttcactggagaagagtcacttctgtgctcactcacatggctccccctctcaggtttcagttcctcaagggtcgttggactgagagccaacagcttccaaatttayatgctcagctcaggatcattcctgaactcagatctacatgaagtctccatttagatgattgatagacatgagaaatgggtgtgtcaaaaacagccgttgctcttcctgccaacctgccttacccacagccttcctccatttttctactaaattagggcaaaaaccttggggtcatcctcgactcctctttctttcacaccctacatcggtggacaaraaatcccattgattttgccttccgtctaatcctgaatgtaaccactattcagcacctcccctcttagcaccctggtcaaaaccactcttgtctgggttactgcaacagctgaccaactgctttacctccattctcaacccccacccagagtgatacgtttaagacacgcttgtccaacccacaggctgcatgcagcccaacacaaattcataaactttcttaaaacatcatgagattttttcacgtttgttttagctcctgagctgtcattcgtgttagtgcattctgtgtgtggcccaagtcagttcttccagtgtggcccggggaagtcaaaagattggacgtccctgttttaagacatcctgtatgccactaatttttaggatacatatttaaaaatattttaacatccctgaaatcaagatacactttaattggcagtgacttttctctgttagtgatactggaaataattgggcatcttacagtcgtcagcacaatagatttgatagggaacactaagtcacatcgtgttgcttctctgcagaacccccaatggcttctcatttcacacagcatgaaagtcagagtcctcgccacactctgcaaagcccaccatgtcaggccctggctgccctctgaccgcaactgcatgctgcccccagccccagtggttccttgcactcctctggctttctgggcacgttcctgccttactctgtcctgctcctggtctttgctccatgtcaccttcacagcaaggcctactctgaccatgctgtttaaaactgcaatgcccccctcacccccagcactccagtgtttgcctygggagttgattgtagagtccaccccacctaaaaaccctccctgtttctaggaggacactaacaaactttcagcacatgctaggcatcaatcaatagatctttccctttctccccataatacatgagagtttgaaacaaagagtaaaacttacttgaggccacaaaatgacctggtagcaatgaccagcactctagcccgaggaagcacctcttctgaatgtaagcatttacaagcctgcatttgataatgctgaagaggtttatgtaacagctgcaggcaccatctggtccagagatcttgaccttatcgatcatcatcgaatcctgttgctagtttaagctgcattctcaaaacacgcagcaaagacccctatatactttagtggcaatgcagactcacctttcaaagaatcaagactggccaagcatggtggatcacgcctgtaatcccagcaccttgggaggccaaggcaggtagatcacctgagatcaagagttcgagaccagcctggcctacatagcgaaaccccatctctactaaaaatacaaaaatgagtcgggcatggtgrcatgcaccagtaatcccagctacttgggagactgaggcaggagaatcccttgaactcgggaagcggaggttgcagcgagctgagatcatagcacctcactccagcctgggtgacagagtgagactccatctcaaaaaaaaaaaaaaaaagacaacgatgactgtgcagaattttctagaatattctggtttccctagcactccaatagattattgtaaactccttacaagaggaatcagagatgggagttaatgaaatgttccagatagcacagtgtagttttgtgagagttaagtgcaagtgttatgaatcacagcatccaccagaactgaagtctaggctgcaagtgcttctgtccaggcctctgtgtttaatctgcattccaaatgcagcgtgcgccatctccaggatgccagaggtacagccttttacaaagccatggaaaagggactgactctcaccttaaggatggagtccttggttgtagcatggtcttgctgacttaggtgcatctggtgatgtgagatcgtcagggaggagcatggtggatttagaaaatattggagctttggagacagaaagatgcagatttcagttcctgccccactgtttattagctgtgtgaccttggacctcattagaatgggctttgtaatgtgtgttcttttaaaaacagaggagattaatagccctaaaaacaagacactgtgaaacaaaacaagacactgaaaaaatatactttatgaatgaaaattatagtaatgaggctgggagtggtagctcatgcctgtaatctcagcactttgggaggccgaggcagatggatcacttgaggtcaggagttcaagaccagcctgtccaacatggtgaaaccctgtctctactaaaaatacaaaacattaactgggcgtggtggcgggtgcctgtaatcccagctactccagaggctgaggcaggagratcgcttgaacccgggaggtgaagcttgcagtgagccgagatctcacaggagatcacttagcctgggcaacagagcaagactccatctcaaaaagaaaaaaagaaaattatagtaatgaaaacagaaatctaattggattagttaatggaatagcagattaaattgtggctaaagaaacaatgtgcgaactagaagataaatgtgagaaggtggtcctggaacacagctcagagatctaaagagatggaaaatatagaagaagagacatggagaataggatgacaaaatcctataggagtagaaggtatctaattctgaagaaataaaatagacaattttcaaaacagtaagtgagaacagagggagtgagagggaaataagaaataatattgggcaaaggaacattgatgattcaaacaatraactgaagagtttagaaatgagcgctttagatgaagagtttagaaaacagcgcagaaccaaaataatgaagagcagtatccaggaaggcagagagaacactggaatcttatttctccttctagtctggaggagggcagaagtatgaactttatatttacaaattaaatatactacttaaaaactgaagagtaatcacctgggagagaaaagaacagcccctcccatccaggagccagcttgttactcacagctgggcctgggtgttctcctattgaacaaccaaccaccgagcatccacatgatgaggcccctctgttacatgaaagatggagccaaaaatgagaccaccctgccaccatacctgaacacagacccaacgtgaacactgtccaactccccacccctgaaatgcccagacaccccgccctggctgagccaagcctggcttcattaagccctccccagcccacacctgggcctttctaacccctctacacattstcccttgctgcatcaagtgataacccaatctgttcagccttaggggagctctgatggcctgtgcagtgcattgacagagtaaaataactaagcagaatatgtgacttccaaggtagagaaaaaagtattccaaaatgcaggttagacacctaaaaaatgatgaatccaataaaagagaaaaacaagttgggaagaatgcacatttcataatatctagaaaagacaagattagatggtgggaaataagtccaagcatcccattagtcacaataaatactagcagatccattcagattgctaaaaaacacatttcctaatctagctatgtggcattacaggagacacagctagatcatcaaaagttagaaagtcaagttaaggaaaacaatatcccaggcaaatatccaccaaaagagagtgcatgatactaagatctgatgaattatactttaggcagaaaactttttttagggataaagagagtcattgcatagtgtaagaggaacatacaacaatttagccacaaaacacatgaagcaaaattggacagacttgaaagacaaacaaattgaaaccatgatggaagactttaataccccacctcacagaaaataacagaccgatcagaccgtaagtcaggccgtgaaaagatctgttctgaacaacacagtcagttaggatgagcagacrctcctacatcgaattttatgcaccatatttatggataatatgaatgtctctattgaaaagccaaaaggatctacaaactgtcacaactatgaagattgctctgaaatgtcaccatatacgaaatcagtatcccaraccagtagatttcctccataccagcaacacccagtgacaaagaaagatcatcttcagaataaaagccacaaggtacctaaaaataagttgaccaatgtgtataagggcttaagggagacgtttatagaatgtcattgaaggcatgaagaaaaatgagagaaatggcatgttttggggtggaaaactcagttttccaaagatggcgattctctccaaattgatctgtaaaatcaacccaattatgagaaaattccaaagagtcttttttcccctaaacttgaccagctgatcctaaaagtcatatgaaaggaaaagcaaccaagaatagctcaggcagctttgaacaagaggataaggcaggacctaccctcgctgcattgatatttaattgctacattagtaagcatggtattggtgcggaartaaacacaccaatagaacaaagtacagaagctgggacaagatgtgtgtgtatatgttaattatacaagacaaagtggcgttagaggaaagccagaaaaaaaataaattatttaataaacactgttgggacaattagttatccatttatccagagaaaattagatcccttccttactccacagaaaataaattttagatacttcaatttagaatatttaaaattttcgtatttgcatttttcctaaatgcaaataggaaagattttaaggttttagaagaaaatacaagagaaaatgttaatgaaatcggggcagaaagggatttaaaaaagaaacgcacacaaacaagaaacaaaatgcacaatcctagcaagcaggattgttgaagtgagtaaccacatgcctgctctgtccctctgtcccgagttcaggtgtggatggaggagtgtgcgctgtccagcgtgctgcagacacacctgcgggaggaccacgagggcaccatccgcggygtcttgggccgactgggcggcctcactgaagagtgagtacagctccctgaaggcccagggctttgtgtcctgcatgatgctccctccagcctcagtgtcctcatctgtacagtgggcacgctgactgcccctcagcttcctttgaatgtaaatgacttaacgtttcttagcctcgatttcctcatctataaaatgggataatgmtatctatttgatagagttgtctgtcatagsaacttttttaaacagcttttttcaggtatagtttacatacatttattttaygagtacaattcartgattgttagtaaattttacagagttctaccccatcaccacaatccaaatttagaacatttctatcaccccaaaaattgctacagcgcaattgtaaaagatttcttgtgcccaattgcagccactccccaatttattatcagtttttatattcatttttcacatttttgctataacaattagtgcaatatggtctttccaatttgctggaaagtatttttttccttctttcattatgagaaaaaaatatatatatttatatatakatttatatatttatatatatttatatatatttttatatatttatatttttatatatttatatatatttatatatatatttatatatttatatatatttatgtatttatatttatatacatatatatatattttttatatatatatatttttttttcttttttctcgagacagactctcgctctgtcgcccaggctagtgtccagtggtgcaatcttggctcactgcaasttccctctgcctcccgggttcaagtgattctccagcttyagcctcccgagtagctgggattacaggtgcccaccatcatgcctggctaatttttgtattttttgtagagatggggtttcaccatgttggccaggctggtctcaaactcctaacctcaaatgatcyacccacctcagccttccaaagtgctaggattacaggcgtgagccaccatgcccagtcgagaaaaaaatttttgatatagctattttttagttttatttttcaacttttattttagattcagagggcacatgtgcaggtttgttacaaaggtatattgcgtgatgctgaggattggggtacagctcccatcacccaggtagtggacgcagcaccccataggtagttttttaacacttggccccctcttgtagaccccagggtctattgttcccatccttatatctataggtgcccaatgtttagctcccacctataagtgagaacatgcagtatttggttttctgtgtctacattaatttccttacgataatggcttccagctgcatccatgttactgcaaataacatgatttcattattttttatgactgcatagtattccatggtgtatatataccatttctttatccaatccaccattgatgaacacctaggttgattcagtgtctttgctatcatgaatagcactgcaatgaacatataagtacatgtgtctttttggtagaatttattttcaatttattttctttcaggtatcaatataactattttttagttgcccagccctttgcagaaaacaaattgtgcataccatcaagaagcaggtgtctagctatggaattggataatacaagggaaacatcagaagaggatggaggytgggtgtggtggcttacatctgtaatcccagcactttgggaggctgaggtgggcagatcgcctgagctcaggagttcaagaccaccctaggcagcatggtgaaaccctgtctctactaaaatacaaaaaattagctgggcgtggtggcaggtgcctgtaatcccagctacttgggagactgaggcacaagaattgcttgagccccagaggcggaggttgcagtgagctgagatcgcaccattgcactccagcctgggctacagagtgagactccgtctcaaaaacaaataaacaaacaaagaagaggatggaaacataagtaggctcggaccagggacacctggtgagccatactgaggacaacagagagcgattggggaatttgtctagcctgaaaacctgtgtcttttaattgcattaatgtttagtccatttatgtttaatgtaaatcctcatgctgatatatatttgggttttcatatcagtttatgaaaattctcagatgttttccctttagatcttcccctgcctattctctccctcytctctttctgggactccagtgacaggatttctgaggcttttccactttatcccatatgtctcttacatgctcctctgtatttttcattcttytctccgtggttcagcatggatattttcctttgaggtatcttccagccactctctcttcagccatattttatcaggtrctaaacccatctcctgagttgttcatgtcagttattgtgttttcagttctaggatgtccatttgattccttgtatagtttccagttatctgctgaaattcttcgtcttatcatttaatttctggaacatattaatcataattagtgtaaaggttgtgtctgacgattctgttttctgatatctcgtgggcatgtttctattgtctgtttttctctttatttttagttaattctcgtctgggtatttttattggatgatgaccactaagcatgagaaattgtagataatttaagacttcaaatgatatgatcttcttccagagaggatttatgttacttctagaaggaatttcggatggtgggagattcactccacccatgttggaatttagctgattctgaattaggtcttagtggggaatgacttttattcctaggatgaaggcacccaccaaaaagcctggagcgtttgccagcctcttcttggcagctgactgtcagacctctgttcacctctcagcctctcagcagacacctcaagttatacaaccaaatgttgaacctctctggcaggctgagtttttttacatgaatcactgaaataggaactcaaaaatggctcaagatttcagctttggatgtgctgatttagagtcatgccattaattctagtggctgcataccataggctgctgtacacatgcattggacagccaggcaggatgtgatgaggttaaaaagattaatagacaagcagatggcggcgtggtgcccmgggagcacccatgcctaagaggatggcagcagagggcrgtgattccaacctgcttccttttggaggggcytcttgtgggctgtggctgtttggggagcttgtcactggcttcgtgaagccaagagcattgaccccacccctcacctgctttcctcaaaggtccacgcggtgtgtcctgcaggggcatgacctgctgttgcgctcagccctccrgaggctggcactccgcggcaacgccctggccaccctgacgcagatgcggctatcggggaagaagcacctcctgcaggagctgcgggaacagcgtgcactggagcaggggtcctcccagtgcctggacgagcatcagtggcagctgctcagggccctggtaagaccagcatggtggccccacccattccagacaggcrgtgcccctgcagcaggccccagcttccagcaggtttgccagaacccgaatcctatcacccttggtgctgcagggtgcrgtattcattcgccggggctgccatagcaaggtcccacagaccgggcagcttacactgcacacatttccctgctcaccatcctggaggccagaattcggagatcagggtgtgggcagggccgctttgattctgagaccgcactccctggcttgtagatgactgtcttcaacctgtgtcctccaggtccttcctctgtgggtgtcccatctcttataaggacaccaggcatattggatcaaggcccacgttaatgacctcacttgaccttaatcacctcctcaaaggcactatccacttactgacctcccattttgaagtacttggggtcagggcttcaacatacaaattttgagaggacacaatttaaccataacaagtggagacagtggagcccccgtaggggccacccatgtaccaaaagtttttagtatcactgatataatgagaaatatatactggaaaaaccatacggaatcagagggggacaggtgcagttgtcattgggggtatggtagagaaggcctctgtggtctctttgaagtgtgataacagatcgaaagaaataattagtaagttgtagagctgggagttacacccaggtaggctggctccaggcctcctgcatgtagccaccaagctctgggarcagctgctgctctttgacccatgaatgaggcacaagcccacagtctcttaagctctatccaggagagctccgaggagcaggcaggactcacggacctcgctacagccccgctcacttctttctctcttatttctacaaataaaggcagtcctcagagccctgtgtgccctgcctcagcttctgtgatatcctgagactcacatctggcttcaaacctggctctgctgtgtgactttagaaagttacttaacttctctgagccttcgtgtcctcctcagtgctagtgttcaggtctcatgatgttctagaaggatgagcaaggccccccatcttgtgaggggccatagatggtactgggcacgcagttgatgctcaataaatgccctttttctggggacacagacacctaacagacacctaacctcatccattgatttttgcaagcccagaggccacctctttctgccctttctccatcccttttccaacccctgggccctggataggaccagccccacatcccagtcctggccagagcttctctgtgaraggagcacttggcccctgctcccagtcctttccctcccaggaggcgcgtgtgctggaggaggccagccggctagaggaggaagcacagcagacacggctgcagctccagcagcggctcctggccgaggcccaggaggtggggcagcttctgcagcagcacatggagtgcgccattgggcaggcgctgctggtgcatgcacggaatgcagccaccaagagccrggccaaggacagggatgacttcaaggtatgcactgacctctgtccctggggacaccgagggcaagaatgttcagggtagggtccatgcctgggtctgctccttgccacaccgttcatggagcttgtggcctagtagactttgcctgacttctccatgacttgattttctcatctgtaaggtgggatcttctccctcgcagaatggggaggggcagtcgcagcagatcaccggttctccccctgctgttaggccctgcgctgcatcatcctgagcactggctctgtcttcccagcagcactgagtgagacatggtgtcacccagagccacacagctggtcagtggcagaaccgggatcggaacccaaatccctctctcagaaagagagacgtgtgctttccctgcccctggccgcctctgctgagacattagagctttctggagttcatcctgacggctgagcaatgccgctaaaaatcagttcagcttgagtagacagtggtttaactccttatactgacaataatcataaataatagtgataaaaatgataacagtgagaagtcacattagcgttgcacttaagtctaactaagtgcttcttcctacctcgtcttgttggattttccccacagtccttgcatggtcaggatcatttttcttcccgttgggaaaaagaggcctacgattgggcaaatgatacatttccagcctccaacctagtgagtggcagcgccggggctgcaggagaatgaccagcatacacgctgcgcctgcctggtgcctcccttacaagctgtaaggagaggtagggcaccccttacagcacctcgctcgcttcaggccactgtaggcaggatgtctgtggctgggagacagcagcaggttacagccctgtgcccagcaggcagccctggcatcgggaagtgcaggagcccttccaggagccctccaaggggttcctttcatctcagtaaaacgagtcactttgcgtgtctgtgcagcaaagaggctggacccacatttctgcaacaccctgtcttattctaaatatctcacatctgcctcagattatccaaacaattagggctgtgcctggctggtgatattgggaatgtcaccctgtccctagaactgtccacatgttacctaacagtaaatgctcgctgcatgaaaatggagtaagatagaagggtgtcgtattttgtcctcagctttccagagggattttgagtcaagattggaaaatgagtaccaccacaacttcacaattacaaaaaagtaaaagtaaagtgaggccgagcgcagtggctcacgcctgtaatcccagcactttgggaggccaaggcgggtggatcacttgaggtcaggagtttgagaccagcctggccaacacagtgaaaccccrtctctactaaaaatacaaaaattagctaggtgtagtggtgtgcgcctgtaatcccagctactcgggaggctgaggcagcagactcacttgaatctgggaggcggaggttgcagtgagccaagatcacaccactgcactccagcctgggtgacatagctagactctgtctaaaaaacaaacaaacaaacaaaaaacagaaaagcattgagtttagtttctagaagaatggtcatttattcaacctgtattcaggggcttcctggaacactagtgcaaatgtgtgtgccartgggtacggggagactggccagaaaaaaactgaggaggaggagagaaggggtggccaaggatggagggcctggtgaagggaggagaggtgggtgcagagtggggtgtccgccactttrctgtggcaggaaggcaggtgcacataggatgtgaagatgtgggtgggcttgctgaccttcggggaaagaggatgggagctcccgacaggaagtgyaaggctggagcccaggtccttggaggggtggagtgggagccccctttgcagatggggcagaggagaaggaaaggaccattggcagtaagggatgagcaggggctcgggagttagaagaccagctcagacctgcactgccactccgggctgtacaggctagtcacctccgcagcctcsgcgccacacctgtgtgctcaggtacctttctcagatgctgtggtgagagtaagtgggtattttttcttacccaaagcctagcaccatccaataaatatttgccgaaatggggatgagcttttctggcttttgcccatcctcttatgaggaaaagaatgataactttgtcagtgcacaaccagcacatccccaatgatgggatgtctcagggtctcctgtcttttctactttggtctgaagatgcatcatgtagaaacgcatgtagctgcaagtaacatggctcaaagaaatagaagttaccccataccacaagaaatggggaggtgcgtgacccaggctgccacattggctttgtgatgtgaccgaggacgagggtctttgtttctgaccctgcattcttgctgttaatttgttgcttcatagtcttaaaatggccactgtcactccagatgtcaggcctgcattccaggyaggaggagggaacagcagtctttcacctgctggtcctccaccttaatgtttagaaacggaaggcctcggccgggcgtggtggctcatgcctgtactccaagtactttgggaggccgaggtgggcagatcacctgaggtcaggagtttgagaccagcctggccaacatggcaaaaccccatctctactaaaaatacaaaaaattagccaggcctggtggtgcttgcctataatcccagatacttgggagactgaggcaggaaaatcacttgaacctgggagatggaggttgcagtgggccgagattgtgctccagcctaggcaacagagtgagtctccatctcaaaaaaaaaaaaaaaaaaaagatgcggggaaggcctcttagccgactttccctaacatcgcatttcattggctctagacatccctgacctaagaagataggattcccatgactagtttaaaccagccatgcactctctgcctgcttcctgaccaatccaggttggtgagtaggtggaagatctgaaccagggcatggggaggcagggactggatgggcyrtgggtggctcccangtgtgacttctctgctgtccctgtccttcctttctnccctcagaggacactgatggaggcggcagtggagagcgtctacgtgaccagcgctggtgtcagccgcctggtgcaggcgtattaccagcaaatcggaaggatcatggaggaccacgaggagagaaaactgcagcacctgaagaccctgcagggtacgggaccccccctcagggaagccccagaagagactggcaatgtgtgcttttagtttggggcagaataggatgtcagatnntgtgaattttatttttgggaatataattatttcagtgttttaatgtatttatcccgtgctttgtctcaaaaagcctttttcaaaaggcacttaaagaaacatatgcataagcacacatccagtgcagtgggagtgttttaagtcggtcactcaggacaaggataggatactgagatggagtcagggccagggcttatctagggcagcagtccccagccttttcagcaccagggactggtttcatggaagactatttttccacagaccagggtgagagggaaatggtttcagacgattcaagtgcattatatctattgtgcatttcatttctattattattacattggaatatacagtgaaataattatacaactcaccataatgtagaatcagtgggagccctgagcttgtttacctgcagctagacaatcacatctgggggttatgggagagcggcacatcatcaggcattagataaggaatgcacaacctagatccctcgcatgtgcagtttgaaatagggttcacgctcctatgagactctgatgccactgctgatgtgacaggaggtggagctcgggcggtaatgtgagcgatggggagtggctgtaaatacagatgaagcttcgctcactcatctgccgctcacgtcttgctgtgtggctgggtttctaacaggccagggaccagtactagtctgtggcccaggggttggggatccctgatctaggatatctgcctgcaaatcctaattagacgttcaatgatttcgtctgtgagcttcctggtggtsaaagagacagacacctacttagttaaagccaccgcagtgaccatgagtccagtggtccagggggtgtttgagaccccaagaattttcccgcatgggctcttgtaaaaggccaccctggggtgatagaaaggayagtatccccagttccagtaacatacagataaggatggttggaagccaatttcttaaatgccacttcttacaacaccctcccctgaatccagaacttctgagtaggtgggattccacttctctgatgggctttgcctggcatgtccaaggactggaattggaatctatcccaggagagtcttccctgagtgtttctcctctcagctgagcccagaggccacctctgtcttccccttctcctgaagaacttgaggcctagattcaaataaaatcggggcacatgcccagagatctgccaggttttccaaaggaagagttgggctcatttagcaggagacagacatgattgcttgctactgcagaacattccagaactggggcatgtctctttcccttggtaggccttggtttccccatctgtgggactagggttggagactgccccaccccagcccccatccatcctctcagctcttatttcctgcttcctgataccccagctctcatgcagggatttcacagtaaacacattgaaatgatatagcttaagccacatcaactcctttttccttatttagtaatctgttttatttaagagttgtacatgctatgtccccagaggctatccagrttcagtctccctgtaagtgccagcaagctctcccagctaattaagtgtgatgggcctcctgccgtggccactgatccttgagtgggttttcagctgagaggtaccttgaagaggtaatcctatagttagctgtccaaaccaggggcactattaataattatactgggatgacaggtctaaaccatgcctgtctcaggcagcctcatcaccttttttttttttttgagactgagtctcactcaatcgcccagactggagtgcagtggcatgatttcggctcactgcaacctctgcttcctgtgttccagcaattctccctcagcctcccaagtagctgggattacagacacatgtcactgcgcctggctcatttttgtacttttagtagagacagggtttcaccatgttggccaggctggtctcgaactcctgacttcaggtgatccacccatctcggcctcccaaagtgctgggattacaagcgtgagccacctcgcccggcctcactttacttttaaagcttttaaaagccaagagttttctgagcagcttaacctgcaaacaagaaggagctccaagaaatggggcataacttcagagcccagacttcctagctccttggagagcacccacttcggcactgtgccctcactctgcctggccaatcacttttcctttacagtgtggcttttaagctctttgtggtgccttctcagtgttgactttttcttagtcggcacccatttctcctgatacaagaaagctacaggtggagcaggtggacagggcgcatcatagtttcgctctgcagtgcctggtccatgatggaagctgtgttgtttgtgcacacaatgccctgtccctgtgctggtggaaggatacactcttggagagctggtgtgtcycactcaccctgcaccccagcacctgccccagacctggcacagtggatcctccaaacagaccccttgattgtcctgtgttaaatggtctaggtgagaggatggaaaattacaaactgcggaaaaagcaagaactcagcaacccttcgtcgggcagcaggacggcaggtggcgctcatgagacctcccaggcggtccaccagaggtgaggtcccaactgaggtcccacgtagggctgttctctaccccattcacatggcatatctctctgtggtgccgtcagcaggtgccgtcgcgtgcattgcccgtggacttgggggccatcggccttcctcacccgctgcctctgtcctggtctctgccctccatgcagcacctggagtggcacctggcacaaatgagtgagcaggtcatggtgtggtggcrgcttcattcccaggtttaagtggcattcacagcccggacacaggtctaagccatgtttagacacgcgcctaccctctcatactttgggcattctcagaagcagaccttgacgaggatttgggggcaggttgtttacctgggaggtgacccgcagaggcacagtgagagggcagggaagtgaggaagaggtggctgcttcctgtaactgtgaccatcacaatgagtgcaaatgtaacagcccaagccatgtagactgcctgtcccacagtgctggaggtcagaaggcaggcttggctctcctggcttctctgtgcctcacaaggcctgagcgaaggggcccgccgaccgggctgttcttaggaagctgctcagtaacaggtgtcaggaaacgccctgctgcagggtttgcacagaccgaacttgccctaactttccaggctcccagcaaactacagtctggcaagtcctcagatgtggggcgcagaagcatcactcggctttcctgcgaaacttgcaggttctgggcccacacctggagactcaggctcagaaagtgtgaggagagcccaagaatctgaattttagccgcacctctccgcaccaagggatwctgatagatgtggtccaagggcttcactttgacccaggtgatccaagagaaggagcctcagcagccagctgggccaacctgctttatggaagaggaaaaggaagcccagtgttgggaaagggggtgcatgagcccatctgtgactcacagcttatatgtggctgttgatgcccttccctccctgtcacacctccttgaattcagaggcagtttcttttcttttttttttttttttttttgaaggagtgacagtacaattttgtgacatagctatattgaatagtggtgaagtctgagcctttattgtarccatcacccaaatagtgtacgttttacscattaatttctcatcatccactcccctcccatcgtcccgccgcccttctgtgtctctgttgtccatccttccactctcttttttttttttgagacagagtcttgctctgttgcccaggctggaatgcagtggtgcaatctcagctcactgcaacctccgcctcccgggttcaagcgattctcttgcctcagtctcccgagtagctgggattacaggcgcgcaccaccatgcccagctaatttttttgtatttttagtagagatggggttttaccatgttggccaggccagtctcaaactcctgacctcaggtgattcacccgccttggcctctcggtgctgggattacaggtgtgagccactgcgcccagcctgtcattctactcgctstgtccatgtgcacacattattgagctcccactcataactgaaaatatgagatatttctgtttctgagttgtttcacttaagaaaatggcctccagttccatccacgttgctgtaaaagacatgatttcattcttttttatggctgagtagtattccattgtgtatatggaccacattttccttatccagtcctccattgatggacacttaggttgattccatatctttgctattgtgaataatgcaatgaacacacgagagcaggtatctttctgatatactgatttattttcctttgggtagatacccagtagtgggattgctggatcaaatggtcattctatttttagttctttgagaaatcatgctgttttccatacaggctgcactaatatacattcccaccaatggtgcataagtgttcccttttctccacatcctcaccaagtgttatagtttgtctttttagtgatagccattctaactggggtaagatgatatctccttgtggctttaacttgcattcctctgatgatgggtgatgctcagcgttttttcacatgcttcttggccatttgtgtgtcttttttttaagaacgtctattcatgtccataggcacggtttctagtggaactcggcctcctttaaggtgtgagagaggctggagtctggagtgctggcctcagctgtgccacatgagtgatttgtttactgtccaccctccttcctgccactcaaactagagctccttgaggacggggactgtgggtctctgttcacacctttgtctcagaacccagcacagcacctggcaggccagagatactttaatgaaggaatgagtggatggatggagggagggaggaatggagtgagaggtggagggatggatgacagcgtcttgtagggtgcacaggaatttgctgggcaaaaacagagaggaaaggtgttactggcggacagaagagtgtgaggtaggagcagggtggcattttcacacctcggagcactccrcacgcacagctgcctatccatgctaaaggtggccctgacttcaggtctrgaaattcgacccctttcagaaaatctgccctaaaagatgggaaggaggcaggcagggagcaataatggaaacagggtggctggatttggatgttcctgactgcttaggaacggagggcatccagagagggaggtgggccctggggctcaggtacccggcctctgctccagctctgtccccctctctgagagtaacaggctgcctgccgtattcgggatttcccagaggctgcatcccaagaagcttctcattttacgagggaggggccggggcagttctgagatttaaactcagggatgggtagccggtaggcctctggtcctttcaggagaatgctcctccctggggaaaagattgttttctcatgagaagatgccaccttctgctccgccacttcacagacgtgtgtcctgagggaggcccccacctctctgggtttcttccccccagcttttctactctgtcctgctggtgtcatgaagctcctccgaagatcacatgcaaagtgtgtgggcaggactctctaaactcccgtgttgtaaagggcgtccactttgatggagaggcagcctgcctgtggggactggagctggggctgctgtgaatggtgcccccgatggccaggcccctcttggggctcccagggatcagcagcctccctgccttccttctccctccctccctccctccctccctcccttccttcctccctgccagcctgcctgccttcctccccccaggatgctgtcccagcagaagaggttcctggcccagttcccagtgcaccagcagatgcgtctgcacgcccagcagyagcaggcaggagtcatggaccttctggaagcccagctggagacccagctacaggtacaagttacagaactggaccttccaaaagcagtggtttaaagaggagcagaaatagctgaagccagcctgtgaccacacgtcagccatggggactgcacttccctgcctgtggcatcgttgacccgctgagtctcacctgctgagggtgtgtcggcctcgccttaggaccctgagcccctggagggcaagtgtggcctgtgtggatccctacagcagctgcagcatgctaagcagggccaggccctgagcagctggtcaggcctcatctatggagctgacagagaattgagcattcccctgtgtgcgcatggccaccaggaggcttccggtgtaatggtgacctctgtgtcactcaggcagtgttggcgatagctaaagtttacactttatttacagcaaacaggaagctcagctctcatgatataaagtgcatatttcattacagaaaatcccatttgtgtgaggttatacagtgagatgtaaggtgagagtataaagtgtggctaagcaaagtggctgcctttaaaaaaatcaratcttccagaatggaagcatttagcagagtgttggccctttcagagtgttctccactggcgatggcagtcgcagagtgacagtggtaagaatacagcagtggtggccgataggtacttattgagggtctatgatagatagtcatgagctgagagctttgcacacactttccaacaaaagaggttactgctactgtccccattacagatggacaaactgaggcatgcacaggttacgttgctatccagggtcacacagttaatgcatcatggaattctggtgtgtttgtttacaccacagtgttggaagtttagagcccagcctgtggagtcgggcagaagtgagtcccatcctattctgctgcacctgctccgggcaggtcactgaggccctctgacctcagtgtactctgtcaactgaagaccgacggccagtgtgagtgaggacccacagttatgcagcaggagctggtagatgccagtgtgtcctcctgctcctctcctctctgggatgtatgttggaaaattctcctccacacgggagacgtggtcttcagtggccagcctcaagtgtcagaattcactcacgtggagagggatttagagaagtcagagggaggcccagctgaatgctcctctctgcttgcatttcaggaagctgaacagaacttcatctccgagctggcagccttggcccgagtgccccttgctgaaagcaaactgttgcctgctaagcgtgggctgctaggtgagtcacagatgcttgagttgcagcgggaagcactctgggctgagagatacggattctagttccacactggccactaactagctgtgtgaccttaggcatngtgcctaggctctctgggcttttgtgaccttgtctgtaaatkagcaggcttggctaggccacccctcaggcccacttgctctctagcatttgataattccagttcttgggtctggtgttcactggctgtgtctcctaactgactccatttttccatctgtaaagtggggataagccctcctcccacccttgccagcgacaacttcagtgacatcacaggattttttaacctggtaatgagagagtgactcagaaggtggtgtgagaacacagagatctactgaaacaaaagctgtcacactggtgctgggttttcagttgcttgctgcttcattaagtcttccagtcagctgggtagagtggatacccagcgggagcctagcagactggagctcaagccacagctctgccacttcctggcttgtgcaggcttgggagagtacgtcaccttcccaggcctcagtttcctcattagttgagtggctgcaatagcataagataccaagcatacacttggcccacacaacatgctcaaaaatgtcaggctgggttggtgtgaggctgcaagaagttgtcacttgtctaaagtcacagagccatgcctgggttcatctgtcctctacagagaagcccctaaggactaaaaggaagaagcccctgccccaggaaagaggggacctgggggtgcccaacaatgaggaccttgcctccrggraccagacctcaggctcactcaggtatgactgggccccggncctgttgcctgtggctgggtttggtaaatgcactcagctgctgtgtgccaaaagtcagggcaggaaaatcatcagtcccctcagaggcattaaatgtgaaggttcaagaaatgacagatatgaacgtaatttgtgggcagtaagccatgatgataccaggggtgccacatggctgttacccttcctgtttgtgtctcatttggccagatgagccttgacctacctccacwccccantggcatccagcctgaagtgttgggcagtcccttctttgaccagggatggctgtggtcatggcacttggatgacctcctacccaaggagggaaacgggttttattggtttcttaacaacccatgtcaaagtaaaanttgttttgatcacctttggctgcattttcatttaatccgattgggtaagttatggcatcatgatgggcatggagtcagcgttctaactggctgcctttcttctctgttttaagcagcaaaaggctgagtcagcaagaaagtgaagctggggacagtgggaactcaaagaagatgctaaagagaagaagcaacttgtagtttaagaccagtcrgtgggacaagacctgaagccctgggtctgggtgtgaatyccaccttccctcctgcagtgctgagaggcagcgaggacggagaggacagcggcatctctaggctcttctgagagggacagagaaagaatagaaatgtgccctaaaagcataaatgagtatcacctgagaaaattaggcattcccgtcttggaaacamgtctctgtgagtttgcatttcatttggcttggagccctggctcgatgcctcatggatctttctccccaaggagggacgtcttgaggggtccgagcctcaggccaaggacccctgatgcagactctggaatccctggcccaaaggcctgtctgggcccatctggggctgaggacacacagatacataatgacacctgcagaaatgtattctctgaggacacttagaatatgaggaagagggtgtggcccaaccctcacttcacctggggaggggcttcttccggacagtagacaccctgcccgtgcagagagatgtcatgggggcacctgctctccctgatagatgctgagagcatccagaaacttccagaccagccctctcaccacacccagaagaggcctttcccatctggagagaagcttccagaccagcccttcacacaccacagccaggaggggcctttcccacctggagagaaacttccagaccagcccctcataccacagccaagaggggcctttctcacctggagagaaatttccagaccatcccctctcaccacagccaggagaggcctttcccaccggtagagaaacttccagaccagcccctcacaccacagccaagagaagcctttccagcctggagagaaacttccagaccagccctctcactacagccaggagaggcctttcccgcctggaaacttccggacaagcctctcacacaccacagccaggagaggcctttcccacctggacagaaacttccagaccagcccctctcaccacagccaggagaggcctttaccacctggagagaagcttccagaccagcccctcacaccacagccaggagaggcctttcccacctggagagaaacttccagaccagcccctcataccacagccaagaggggcctttctcacctggagagaaacttccagaccagcccctcacaccaccgccaggagaggcctttcccaccgggagagaaacttccagacyagcccctcacaccacagccaggagaggcctttcccaccgggagagaaacttccagaccagccctctcactacagccagaagaggcctttcccaccgggagaggaacttccagaccagcccctcacaccacagccaggagaggcctttcccgcctggagagaagcttcaggccagctcctcacaccacagccaggagagaccttttctgcctggagagaaactttcagaccagccccacacaccacagccaggagaggccgttcctgcctggagagaagcttccagaccagcccttcacaccacagccaggagaggcctttcccacctggagagaaacttccagaccagcccctctcaccacagccaggagaggccgttcccacctggagggaaaattgctcctttgatggaggttagggactgtcaccctcagcactgtgaacataccgggcgagatcattcttcaggggaaggagctgcccagagcatcacaggatgttccagtgtccctggtctctgcccaccagatgccagcactcccaccattcgtggcaaccaaggatgtctccagacactgccccgtgtccatggggttatcacccactgtgctgagtcaaagggtgccttgccctggtctaatccaggacatagccgtggatacgtccaaaaatccccagaacctagtgagccctctggctctgggagcccctatctcaggaattttcagggtcatttgtgacttttcatttcttaaaacctgaaatagactctcttagaaacaagtgactccttcccagtggccaaaacttaatcatcagagcgcttccttcagttcctcacccatcagccagtgggctctccaaagttaaccaacagctccctcttgtggttcactaaaaaacttggttattccrtggagttgtgcaaagctatggcttccttggtgcaatattcttaaaacctgctttgcatagaaatcacttttgcccaggctggagtgcagtggcgtgatctcggctcatggcaatctccatctcccgggttcaagcrattttcctgcctcagcctccccagtagctgggactacagacgtgtgccaccacgcctggctaaatcttttttgtattttattttagtagagacggggtttcaccatactggccaggctgctctcgaactcctgacctcatcgtccacccgcctcggcctccccaaagtgctgagattaggcgttagccaccgcgcccggccagaaatcacttttatattgtcacatgggccctctgcacagagtccgatggctcctcccggggaagcctgattttgtgacgtgtgtatagtaaatgcaggccctctggcagcaccataattggtcggttaccctgagcccagagctctraaagcatctgtggaatgatcacgggacccttctcctctgagaaggctcccggctgcctccccrccaccgagcttgtagcctgaatgcctggctgtygcatggagcattttgcttctggggtgtcttccttagccaaagggaacgtgtcatttgctcgaccctggcccacccttgccgcccagctgttgtgctgggcacagtctggggcacaggcctccatgatgaagacgcgtgggctgtcggtgctttcatcygtcacaaactggcacctgtacctgccagcaggagcatgatggggacttccatgctggaattgctccctgattaaaatgagatatggctatttggaagacactgcattttagccagtgtacctgggcacagactcggggctgccctgaagctgatgaaggcttgaaggacggaagggctgagccacatgaaggcagcactcagggccaggggagagagaagaggatcagcagtgcagccccaggatgcctcgcaggtaccctgcctccattttggttaccatccccacttattaygggctgtgggctgttatggtgatggatggatgtggatttggaaggggaccatgagagatgatgtattatgatgaactcatgatttaattctttggtgaaaatagcaccctctgacctgtacttgagaccgcaggatgaagccagcacggttttttgtactcccccagggtgagtgcactctcccaggaccctcctggccaaccwggggtcacgttctgcaccacattccttctgaggccctggccagggcggtgctgatcttgctgttgccacagaagcctctcctgcccctgccatccgcccatcacatgttctccaacgcaaatctgcctggccttatgggcggcgttccctggctcttaggagaaaaagccagatctttaccatggaccatgaggctcagagaggtctaggctgagcccacccctgcggcctagcagatgcccttccccttcactctgcacctggtccctgtcttctctcatggcctcacatgggccacacccctgccccccactgggcctttgctcatgatgtgcattctttctggaagacccctgcccccctccccagccctctgcccagtggctcctagccactcctcacatggagtcaggactcacatctccagagatccccctctgcccccaaccmtgaacaacatcagggccccccttagattctaggtcctgtgttctttgctgctgggactggggtgaggtcggtgggggagcatataaataaccttcctttatttcttgtccaagttcatcactatacacagaggtgtacagtgagacccacataaacaatcccactaaacccaactcaactggcccttacccagatcctccaaatgtcccaggcctccctagtgtcacctgatatgcagtggcatcagcaggaaagggaacagtggtcttaaggattgcagctaaaagatctgactgtggcattgtaaactgtaaggaatgtgtcagtgaacccgtggctaagcccactcccgggcctcggtggggtctgtgcacaggtggcagaagtgtgagctccatgagctttacagtgaatcagctgtggggcacagagggcaagcttttcctccaccctacgaaggctccttgagaaacaattgaccaaaggcagaccaataggaaaaagaaaagcattccaacgtaacgtgcatggcatggggaattgcaggagagtgatgaccccacaaaccagtgaggtccaggtgcttccacaccctcatagggagacgggaaatgggggaaatgtggccgtttagagggtaaagcgtgatttatagggggaacgaatcgatccagaggcaggcactgtcttgggagtgatccttcccagactggccaatcaggtatttctcctcctccccagagaagaataaaagagagagggagaggggccagggaagtcccttgtgctgtcccccagagagtggaagcccctccctctatggaaaccagaggagtgggagatgggattattctcccctaaatgtttcctctatagcccttaacagagtgtgcagttcggtgctttgagtaatcatttgattcgcacctgacgtcccccctggaatgtacaccattgaccggccacatgccacctggcatataacaggcattcatggtcacctggtggaaggaagggagggaggcctgggaatattcctttcctcctgtggcaactggtttggaaggaagggagggaggaacgctgagtatatactttcctcctgtggtgtatggattggaaaggaaggagggagggagggaggccaggaatactattttccccccatggcttatagatttggctgtgtgtcagcattacccaggggctcattaaaaacaacattcttagccccatcccagagattctgagtcagcagattggacaggaggcctggggatctgttttttccccactgggctcccgctgatggacttggtccacttcctgatgcacctcctgcccaccgacatagcctgcagtccagccgctggacttagtctgaggtgagctcttcatccgccttgttctggctgtggtggccatgaacatgtacctcttgggtccccaacggcaaggagcaaaaacgaccaacatccttgggatttcctgccgtgctcagaaatccttccctgcgtgagcatggaggccacacttcctgcagggtgctcccagtgcctgcaagaggcagggatgtggaggcctccttagcccacatgacagggctcctccagaggacagcctgggccccaggacttcttgctctacctgctgagatgtagaactgtgcagcaccagagtcttgcctccctccctcctttctaccctctcttcactcccttcctcccctccctcccttctttccttaccccctctgtccttcttttctccctccctccttcccctctctcccttccctccctccttcccctctctcccttccctccctcccttcccttctcccctctctcccctccctctctccctccatcatggggctgtcagctgcatcgcaaatctgtgggctctgcctcctctggctctctcctcattttgcctcacagatatgtcccccagtacacatcttgcccacatctaatcctggctcagtgtctgcgtctcagaggacgtggaccaaggcacttgccgtctcaggcttagttgacccttcaacctcctgagaactctgggcccaggcaaccctagagaactgactcctgtccatgttctcctttctctggaaaccacttagctgcctccgtcatgctctgggcaaaggcagggcaggttgggagaaggaatcagtgaggctgaggccccagcctaaaggtcacagggccgcctggcccaggagaaatcccctgcaccaggcatttgcccacatggctacaagtgaacgttgggatacggagtgttcttttttgctatgaaactggagtcatggaggtcctggtcgacattcttccttccaaatacagtggcctggatgggggagggcagtggctatagaggcttcctgcaccgtgtcggggctcttgtccattgcaagctgggaccccaagctacccacgtggtgtttggctcccgtctgatagggaaagactttgaagtccacatccaggcataatggatagccaggctgcctaagtggtttgatagatctcccagaaaattcccagatggactctggaygcacagccatgccacagctttcctcctcttgggaacagactaccagtgagaggctttactctgaagccaggtgcaccagggcccctgtgtcttttcctctaaaatctctgcaggtctgcactaagagaaaaatagaaagttcaacttgctaagagccccttttgcttaggaaacttcttttcatggtttttcacttcataaatggacttgattggaatgaacctttrggcaaatgacactgtcaatgggcatcacggccacactctgccttggaaagagtaacacagaggagggttacgcacttacgtcagaagagtagctctgttgagtctatagagatttggccccaggataagggtagcaccttctcttgtccactgtctatgatcaaggtggccagaccaaccctgggggctagaacatggtagaccctactggtgacatctgaaaatggtttggctttacgtagatgaaggaaaagtatgtgcaaagaccttgcccattctgtctcactttttaagartcaatatgcaatctggaggcaaagatagacaaaccaactgatgtggtttggctgtgtccccacccaaatctcatcttgaattgtagctcccataattccgtgatgtgggagggacctggtgggagataattgaatcatgggggcagtttccccccatactgttcttgtggtagtgaataagtctcaagaggtctgatggtttagaaggggaaaccattttcacttggttctcattctctctcttgcctgccatcatgaagacgtgccttctgccatgattgtgaagttccagccacgtggaactgtgagtccattaaacctctttttctttataaattacccagtcttgggtatgtctttatcagcagagtgagaacagactaatacaccaacaaatgcagaggggccagaaccaccccttcctgggacatcagagccaacagttaagtggtctggattccaaactcatttacttaatgtcgataggttgaaattggccatggcaagagacttatgttgaaacttaatacccaatgtggcagtactgaaaggtggggcctgttagaggtgattgggtcatgagggctctcccttcatgaatggattaattcattcatagattaatgtatcagtgagtcagtggattaatgggttatcatgggagcgggaccagcagctttataagcagaggaagcgagacctgagccaatacactcagccccctcaccatgtgatgccctgcactgccttaggactctgcagagtccccaccagcaagaaggctctcaccaaatgcaccagcaccacccsaaccttggacttctcagtctcaaagtctgtaagaaatgaattccttttctttataaattaccccatctcaggtattcagttacagtgatgccaaatggactaagacagaaaatcggtaacagaagtggggtccacagaactagcaaacactacaaacaagggctttctaccccacccaccttcacccattgttcaacattgatttggcagcacacttctggaccactgaatcagaagggtcaatcacctgacttacaacaaaggccccactgcctcttaatgggggaaagaatagtctttgcaataaatggtgttgggtcaatgggagatcatatgggaaatggagaaccttcagtcctaccttatattgtacataaagattattgagagatggctcagagacctaaatgtgaaagataaaacttctagaaaaaacccagaagactactgtggtaggcagaataacgctccccgtccctgccaacaagatgaccacatcctaatccctgggcctgtgagtatgttatgtcacatggctgggagaattgggttgcagatgaatgaatgagaatagccttcccctaaaactttctgagaaactctctctccctcctcccaaaatctcaagaggtaaaaggaagtcacatgccttaaaaggagtgttgcagctcagtctccaagaactaaggattatctgagctaccaggtctcctgtcccctgtaactgtgcctcttggaggcgctggggaacccaaagttcgacatgggctctagattatgctggttggacagtggctcccatgacctgggagtcaggcaagcaccccgtcagagtctgtcttagagaaggtgctagggctgcttctgcttccacttccaccctgacaggactgaggaggccaggcccagagaacaggstggataacttcatcctgccaactttacttttctggaagtttccctttaatagtccaaatgggccaaagccgaacatcaaaaatccttaccatccgttcttggtctttccatccaaaaatccttaccatccattcttggtctttctcagtagttasttaaccttgtttcaaggaagtctataactgaccctgagccaacacttctttcaaccttgacrawggtatccacacgaagccgaggagcgggggaggagaagggtacatgaaaagccctgcgttgatgtgggaccagagcatccaaagccatctgcctcaaatgcccttggagctcagtaattaggagcaaggagctttggactagggcccaaagtgcctgggtcctggattcaaatcctggttccatcacttcctaagtgtgtgatcctaaacaagttattgatctcactctgagtcagtttcctcatctgtacaayggggataataatccctacctcatagagcacctggcatatagcaastgctatacagctatcagcccatgtatttgttgtcattaccagcaacttcatcactatcaccaacaccaccatcatcatcaccactatcgtcaccatcatcaccatcaccaccatcattactgtcaccaccatcattgtcatcactattactaacaacagctaatggaagcaagcaactttgcctgctgtttttatccgtcctttagtgtatctctagctcatggaaatggaaggaagaaatgtgaagtttaggagattggagcttccagtctgaggctgatccatacaatacaagaagaaagagagccaggaaaggcccaacaggagggaatcaatgcaagatttgagcctattttgtggaagcccgcccatcagccgtcttccctctcttcgcctccttgggtctcaggaactcagccttcagaagtcatgaactgaatctctcctcccacccccacatccaccagtctctaccaagagtgagtcctcaggaagcagccaccaccattcgttatcacgcggggggactgccaagcattcgtacccaatccagacaccaccactgaaatgaaagtgccctagtcaggtcagtgggcagttcattttctttattttttcacaagctttgaattcagaaataagagccacaacaagttggttgttaagtaaaaatgggagtgattacaaaggaaaactttgtacaaaactttaaaaatctgactgccccgtcaactgcctcagagggaccaggactcaggccacgcaggggcagccatcagccccccatcgtcagccccgaatggggatggggagacmtctttctgagtgtgaacctggctcggcctgaagcctagagctggcttgaagaacacacacagaccagaagacagcacggtgagttacaagtgccacggagaccagggtttctgacacaggatgtggaggatgcttctctgcaacctagtgcaaggcttcccctgccattccgagaattcacggatctcacaggtggaggtggggcgagcttctttctagtgtggaccagaggtgggggcaatgagtaaacatcttcactgtaagggttttgggactgcccctcagggcttgaggtctcggcatcgtgtctcagtcagtccttggcgatgtcccctcagacgcactcacagacttgcatacgtaatttagtaacatgcatcaactatcctagaacatctacagggtgcaaaggaaccaccactcagagaatcatggagccagtggagttagaagtggaagggacagaacaagacaatgctaaaacctgtggttcactaggaagggggaatgaaaacaccatgctccgaggtggattcagcatgaacacaactgtggggcaaggaatttccaagcaaacacaccacactagtaccacttcttcctaaacagaaaagggaaagagcatccttcgacttccccctccctccatcagcaccaactaaaactgtgggtttcaaaaacactgacaggaaaagggatggacatgattcccagaatccttcaggctagctcctccgcgcatccacgttcaaccgaggctggtgatgttggagcggccaccagggggcgccacgatgcggtggccggtgcgcctgggattgttgtcatctatctgggcacctgaaagagagcgccaatcgctgctggatgggatctgttarcatcagttccacgctgctcctggaggccatgtactctgccatgcactccactggacccaccttcattcagggctcagtccaggaccagccatgggaagcctccctggcctccacagagtccactgctccctcttctgtgcccctcagtccctgggctcccccmaccttcagccctgaccaccttgtggtgttcttgtyaaaatccccagtaaaatccgacattcctgagacaggtgatcaaacacttactgagtgcctactgtgtgcaggcgcacatttggtgctttaacatgttactgcatttagggcacacaatcatactatgaagggggtgtttgtactcccaacttacgggtgagcaatttgaggttcaggccacgtgtcttgcgggacacrggtgytgggtggggaagccaggattgaagcccaaactggttggttttcaaagcccatgatcttaggcacactgtcccacactccaaaggtattttacatattgtgtgtgtacacatttgtatatgcatgtgcatatgtgtgtgcatgtgcatgtgaactccgcaagctggatttacttccctcattggcgataggtggatctgaagggggggggggtggtgtgcagaggttcttaattttaatctttcaaaaccaaccatccattctacttttacctattctcttgcataaagatgtaaaattctagcagcaaacccagtgcctggagctcaacaaatatttattaaatgagtaaatcatgaagggtggataatgctgaaaggtgggaaggatagagtccttatcagggaggggaagttgagccggcggaactgaggaaaatcaaaaagagaaagcaaataagctgtaagtctgcctttcttcatggtctacaacacagccttcctgtactcaacttatcaccagatcctcagctaacagaaaaacgtaagtaagttagctcactgcaaccacagcattatcagtactgcacaaagccctcttcggcacacagcacaagcaccatcctataaaatctccagcaagcctttgtttccttgcagtcggctcctttcttgctgacctacccactgtaccctttcatactttttctaatacatctgactttctttaccgacaactgtcttggtgaattttttttactagctgcagaacactggccccaggtagttgtcacctgcaacaggaaggagactcaagtttcagtgctaatcatgccttgaatttgggcaatttggagtaagacaccaccccactcccttggcctcatttccttttctgcacaataagaacagtagactagatgagccccttccaactccaacattacatgatttgtctatgtaagccactaagaatttggttcacagtagtgacttttcttttctcccattgtttcactggtagacaatatgtcttcttgcaatacaagtctcccctaaaggcctggaatcaggcctagcacttagtaactttttccttacaaccatctgtaccttgctggttgcatgtctgtactttgaaaatacctgctggaaaaaaggacactaatatggtttggacttttgtcccccaaaacttcgtgttgaaatttgatcccaaagttggaggtggggcctaatgggaggggtttgggtcatgaaggacagaccactcatgaatggcttggtgtcagccttacagtaatgagtaaattcttgctctattagctctcggaagaactggttgttaaagagcacctctgccttcttcctctgttgccatgtgatctctgcacacgctagctctccttcgccttctgccatgctggaagtagcctgaggccctcaccagaagcagacgctggcaccgtgctgcttgtacagcctgcagagccgtgagccaagtaaacctctttaattacccagcctcaggtaatcctttatagcaatgtaaatggacgaaaacagacactaactcatggtacagctctataacgtaacatacgcagatattaaaaagggcatctgtgaggttgttatgatgttggaaagcatctgtgttgttggtaccaaatgaagtcacctatcaacctgccaagaggctggctgacagcagtggtgctgtgggcctcaggaggactaagagtgaaactgagagaacaagggtgaggaggggcccttccaggtggcttttaacttcattgttattcttgttctaagaacaacggggaggaggattttctgtccatgtttaattgcaattgtgcagtgtttaattgcataactccagaacagtggtccagtttgcaaactccttgagagcttgtgtcttgttgcacccagatagctttttcccaggatgaagccaatccctggtttgctgattgagcatcacatgacttttagcattctatttagggtccattttgtgcaaaaatatgaaacactggaagctcttccatcaaagtcttatggagagtgagatgaatggggaggcctccttgattcatgcctcctcggcataatcactgaatcagacacttcctgaatggataagaggttctgccaccacacaatctgaattcacacgtcatcctctctctctctctctctttgccccttccactctctcttttgctaagcatatcgcctttcctgaccaggaattagcaaacgggtccattgaccaaatccggcccaccgcctgtttctgtacgatccatgacctgagaatagtttgtacattttcaaatggctattgaatataacatcctagatgttgacatcctagatgttgcctcttagcttacaaagcctaaagtatttactatccggccttctaagaaaaaaaatcaccatactcttagtacccagcacggtgtgcaacccatgcaacgcctcaaagagtttgcaggacaaaattccagttcaactttctcaacgtgtgcgtgcctgccctcatgtggccatctcaccaaatcrcagatacactgccctgagaccttaagaaagtcaggagggatcaggtcaacatctaattttgttcccacacatttgttgagcaccaagtcctggtattttgacactggatttcttggggcttccgtttcctctttaaataaatagggtataatgttactttatggagtagtgaggataaaataaaatcatgggttatgaaagtgcttagtacactgcagtgggtgaacaggctaaagacttacacagagcacatgccctgcaaatggcagctactcccatctcttgttcatccccaccactccatgtttactttcatgaggaagagtgtgaaagtgtccccaaatgtgtgtaaggatgagcactgggacaattttggtacctctctttgtaaacccacatcaggtaccaccatgttgcccccctaacatggacccccctctgcttggtgaccatgccagcccactctgccccaccagtgagancaggctcgggtggggcacactcccttccctgcwtcttcatctagtgtccaaggccacrtgtccatttcctcagaagcagcagsaaggactcggcctgaactgctgcaattgtggggagcctgggccaccactctttcctacctgataagctgaagttggactggtggaggtttctgatgggtgggggctggtgtttagaaggcgaagatttggctgaaggagcgggagttgcatatttgggtgtagctggtacctcgtacacaggaccgtcatacatgcccctggaaaccccttgcaatccaaaaacctaaacagaggaagggagagtgtgattgatcracactgtgcatgtgtgcccttctgggcagataaagcagagccctgcgggcgagagagaaacctgaggtcacttcaaatgtgcatgcacacacacacacaacacgcacacacgacaggtgcacttcacacacatgcagccgcacacaggcattcatacacacaagcatgcatacacacacatctacatacccacatgcatacacatacagacgcacacaccacgcacacgcactcacatacatgcagtcatgcacacatatatgcatgcacatgcagtaacaaaacaggcctacacagtagcatacacgcgtgaacacgcacacacacttaaatcacatacagatcttcacaaaggcatactcacatatgtatacacatgcatacatgcccacacacacactcatacaggtatacacacccatatatacacttacacacacgcatactcatacacacaaagcttcatgcaggaggaccccaaatcccttccaaagagaagtcactttgcctgacactaccacctacccacccccggaaaggacccctgagtcccagacaaggcagcagcaacgggcccatcttcatgtatgttcttgtagaagtcaacagcgaggcaaagattcggggggcagatagtttgttgggagatggttccagaaagggggaaggagtggggagctgagacagggagggagaaaactcagtacagagggacaaggagtgggccaggtctatggggggcagggctggggatgctgtggggaggacacctccacaccagcctgcaggaggacgrggaaggagggcaatggagccacagccctagccccactgggaaagggttgtgggggcagagaccctgaaagcagcagggcttccaggcaggaggctgtcagcctgctgggaactgctgacagcagcccaggtgacctcagggatggccaaggttgggagggcacctgctccaggcactggagaacagcatgtgttcagggacctgtacagggtcccagcatgagtcagtggcagtgccctaacccaacacggggcttcatcctccatatcaggtgacagtgccctgaccccaggcctggctccctccttctctgcaggtgatagcaccctgacccccagctctgggctcctgtctctccataggaggaagccttaattttagcaccaagtttaaagacccagcacctgcacatcatgtcaacggccctcccctctgtccctggagccctgctccccgactccctgggcctcactgtatcctgtgcattctctgtggctgtggcattgcttcctgggtgaggccgttcatcactccctgaagctcaggtggccagaggcaggctctgatgcaggtctctccttcacctggtctagctcctgcaggcatgaaggaatccctgtgcaatgggaccccccgatcctattgctcctgcaaattgctgtcttggcatttggggtcagatatctgccctcacggaagctgactgttaaccgcaggcctcagcttcagaccaagaaggaaatgaagccagccaaggggtgtgtctgcctcttcagtgggtgtcccagccagggatttccatgagtccccttgtcctcatatggcctgctgcctgtgcctggccttgtctcggatctgacttgtttccaccccatcccttgtttccccatccagtgcaaagcatctgtgcgacttggtgtctttgacctggtgctacaccttatggaagctggggagagaccaaaaccagatgcagagcctcccagtccgggctggagcctgggaatgcaggaaggtctctggacttctccatctcaattggycacttaggaagcatacaaagaacaggaccacacaggtacacacatggccacacacacagagctcaccacatgctcgcatacacacacgcgcacacacacacactccaacacacgcacacacatccccatatgcacacatacacacgtgcatgcatgtacacatgcacacatgacacgcatagacatacacacatgtgcgcgtgcacacacacacacacacacacgaagctggcctttctggcaaacatcagctgtctcatggggaaagcagctgccatggggatgggagggcctggctggggaagatgttggccacgggcgggagtctctctcagctgtgagaaagttccctcctctgagttgctctaaagttaggaatagagcctgctccttccctttgacagatgtcctgaggtcagtgctaaggttgttcaaggaaaataaggaacgacagggcagaaacgtcaagggaggaaggaaaggaagaaagggcggatctgaaggaagccctgcctgcaagatgccaggggtaacaccttkctccacagggccagacccgagggtttctgagccgtgactctggytaagcccttcactgctctgggctgcaaaaggaggatcacagcacctcccgtgggtgggcaggattacttaagatgacgcaggacagcgcccagagcagcttggtaagcgtccctcccatgatccacccaccctcacgggtgcacacccctctacagtttgcaamgccctggaacttgcatgtcytcatttgatgctcactcctgtcctcagacaggagcccaggccagcgtctcaacccatttaacagataaggaaayggaggttcccagggcgatgacattattaactctgcacacgtcagatctcgattccccaagagacgctgtcggctctggtcccacgggtgggcccgctcccctgcagacacactcaccttattcctgattttgacgcgctggtacaggtgctccgggaacgccttccgcggaatgaagcggcccatgcccttgttgaygttgatgtttccgtcttcaaagacgatcttgccctggctgatgaccactagtggggagccgtggcactccataccctcgaagatgttgtactccacygcctgcaccaacagcctcagygttacttcccaggatttgctctgccccaaacgagctgttcataacagcgattttgcctaacattatatcataagcgtgttccaatgtttttttttctctctaaaaataccttttattgactgtaatattccactgtatggtccacagtgtatataaccaacaactcaccgttgcgcatgtaggctgccggtggctttctataatcaaatcaatattgttctggggcatcacaaagaggaagggggtccccyggggttatgcaatgtggctgctttgactgtactggacataaaaataagtaaaatgttcttcattttacttaaaatgtgtctttaaataaaatttttttctctaggtttctaaaatcaaattactgggtgaaagaatagagctgttttaaagcacgtgtgccatatggccaaattattttcccaagggttcagatcaattgacacgatatcggcacttaccccctccagcattgggtaatgccatttttttctttctctgctaatttgaaagacaaaataacatttcctttaaaacacacattcggccgggcacggtggctcatgcctgtacccccaactactcgggaggctgaggtatgagaactgcttgaatctgggaggtggaggttgcagtgagccgagatcgtgccactgcactccagcctgggggacagagcgagactctgtctccagaaaaaaacaaaacaaaaaactcaccttctttccattattcttcaagtgaatacttgacagttgtgtgtcaactgtcaccagccaactgctttttattattttaaaagtaggtcacatacatggttgaaaacaatcaactggtaaaaaagatattggatagaaaggtaagtctgtgttctacttgagtctgagacatatgccctgaagagtttcttctgtatctctaagtatgtccgaggcatgaataactgtctgacatatacacatctctacacagacatttctcagcttaatttttctttacctcagcaattgttccatatcagcacacatacaaaatacttttacactgctacatttcatcaggaggatgtactaccatttatatgcccagttcccaagaataaacagttgggtcattaccatgcctttgctaaaaactgctgaaacagactttgcatccacagtctgcacacgtgaacatgtttctagatgtggagttgggggccaaagagtaaatggattttcatctttgacagatttgccctccaaaaaagacaacactagtttccattcccaacaaaactccgtgagcttacctgacagcctttggtaaacagtatctatgtatattaaactcctgatctcagttgctggcacaggtgaaaaatactatctctaggtggttatttgcatctgtgactgagactgggtctctttttaaatcaacacatgccatttctatatttatttcttacggtgtcactgtgttttgcacattattctatttctcagggtcttggcattcttcttactgatttctaaaagtacacactcaatgttaaagaatttatcctttgttatgtgtgttgcaaatatgtcctccctccctggtcctctgtctctggaactcaaatgaagtaattgtttttgccacacagattattttgtataatttttgtgtagtcagtggtcaaacagaccattctttaccatttctaagttttgtgtcttgcttagcaagatcctttccccttcaaaattatcattctttcaaaaaatgtgtgttgtattctagtcctttcatagctttattttatcttaatctttgaaccatggtttgatttgtttgatagtaaatagtagggcagaggttaagcctcttgggccaggtgttctaacacaattggatgagtaactatcgtttcctaattctaattgtctcctttattgtaaaccaaattctcatatgcagtcagtctattccttggctctcttttcttgtacccctgccaaactgtttggtttattgcagctttatgacacgttttaataactgggatgactgatacccccgggcccagtcttcccttttttcagaactatttcagctactctcacatttctcatctgggaactctgctttcctagctaaacaattaaattttctgatgggatcacatcaagtttatagattagattagaaagaattgatatgttcactatattggatcttctcagtgtaaaagtccctgaatttatgtaagtctttagttttttatttttgtttgtttgtttggttgttttgagacagggtctcagtctgcagtgcagtggcacgatcatggctcactatagcctccaagtcctgggctcaagcaatcctcctgcctcagcctctcaagtagctaggactacaggcatgcaccaccatgcctagttaatttttttatttttttgtagaggcagggtctcactatgtcacccagtttggtttcaaactcctagcctcaagtccccctacctgagcctcccaaagtgctgggtttacaggcatgaaccaccacgccaggccaagtctttagtttttattgctattacaggattttgatttccattctattttccaaagtgatttttgattcttccatagaaaaactatcaattctttatattggtttgtaatctgatggtgtttgatgatttttaggtgcattcttgggggttccaggcaatcacgtctcctacacacagctgttgacactgtgccagcctcgcaggacccaggcagacagtgcgtttccagtgttagcatttgctaacctaattctccctcaccctaaagtggctccactatggagtgattcataactgtgccgagggacacatggattgtgaatgcggaggggcggtgcaaggaaccagtcacccatctcccagctgaaactggccagcccttggggacctgggctgctgtccctactcctgggtgaggaacgtgctgtgctttggtgagaatctcaagctgcagaggtgtgaggaggccctggtcatatcacaaatgccacaccctgcatttcacaagaacactgaattgtaaacatcaattccttcatttcttaaaggtaacatacaaacaatgtaaaaatttaaacaacacaaaacaccatgatgaaaaaacctcttgccatccatgagccccatttccctggtcccctccagggagaactggtttcttttataccctttaaagagcagccactcaagctcatgtgtgcataaactaaacgtggtccatccctacaagggggtattattcagccatcaaaggaacatggtacccatccatgatatagcacggatgatcctcaaaaatatgatgctaagtagaagccagacataaaaggccacatattggatgattccatttatatgaaatgtccagaataggcaaatccatagaaacagaaagcagattagtggttgctagggaatgggggtgagagagagggactgattgttcatgggtacagggtttcttttctggaggtgatgaaaacattctggaattatgattgtacaaccttctcaatatactaaaagccactgaattgtacacttcaaaatggcaacacttatggtatatgaattatatctcgataagaaacttaaaaacatccagatagtctatgatatacaaacatgtatgcatacccatgatgtggcactttgatgtgaatgttttccacaaagataggaaagaataaaagttgtgttttatagaaaagtagatttaaaatctaatcactggtcaatatataaggaatgatctcttttcattgttaaaagtaacatttttttaaaacatataaaaacaaaacgaacctctaagcatttctcaatccatgttctgaaaaaattgcaattatgtggatggcattgctttggacagagaaaatgaaacagacaaaatcctttggtcaaaccacctcacggaatcctcaactgtcctcttgctgctatgaaaagaattcaaatcttgcctcacacagagaggggatgcttccccaagtttaccctgaagacagttacctcccagatgggtaaccttgggtatattacatattgttatgggttgaatcgtgctcccaaaaaagacgtgttgaaatcctaacccccattacctcagaatgtgaccttatttggaaacagagattttgcaggtataattaggtaagatgaggtcacattggggtgtggtaggcgcaaaatccaatgactggcatccataaaaggagaagacacagcagagagggccacgcaatgacagaggcagatgatgtaagggatgccttacccgccatggaagcaagtactgctggggacgtcagacgctagaagagtggcctggaaggggtctgcccccagagccttcagagagagcatggcctggccaacaccttggtttcaacttctaccttccagaactttttttttttttttttttttttttgagacggagtctcgctctgtcgcccaggctggagtgcagtggtgggatctcggctcaccgcaagctccgcctcccgggttcacgccattctcctgcctcagcctcccgagtagctgggactacaggcgcccgccactacgcccggctaattttttgtatttttagtagagacagggtttcaccgttttagccgggatggtctcgatctcctgacctcgtgatccgcccgcctcggcctcccaaagtgctgggattacaggcgtgagccaccgcgcccggccccagaacttttaagagatgaaatttcttttgtttaaaccacccaacctgtggcactttataacagcgtccagaggaaacttacacatgtgtcctctctctctctccattttctcatttatcaataacaatatacctaacttagaagatcgtgaggattaaatgagatgatgcatggagaatgctaagcacgaagtaactacaaaacagtatttggctggattgtgatgataatcagagtgcccactcctgagcatggaatctggtgtggcctctgatcccacactgaaatagtaagaggctgggtgcggtggctcacacctgtaatcccagcactttgggaggcccacacgggcggatcacgaggtcaggagatcgagaccatcctggctaacatggtgaaacctgtctctactaaaaatacaaaacaaaattagccgggcgtggtggcaggcacctgtagtcccagctactcgggaggctgaggcaggagaatggcgtgaacccgggaggcggagcttgcagtgagccgagattgcgccactgcactccagcctgggcaacagagcaagactccatctcaacaacaacaaaaggaatagtaagacaatcccagctcagtctacttccttctgggtccttgtccgccgacctttgactggctgacacagacattcacgttcctttctaaataaggatcacccttgtgaagcaaggggcagcttcccacagccagattggcggtaggagtgcacacccttgtgccttgggttggaatatccccctcaaaactccacctgaacattgaccttgcccttgcccaatgcgtattaagaatagtgagacccctttaaacagctgacttccgcccatgaagggctccttcccctccaattaatgggctaaagccctttttatccccacgaaatgcacttccgtttattgtgggaaaactgcgcctctttttttaccaaacccaaaattccaccgtgccccctttgaatccctttttttaccaccttggggcccgttccttataccctctctcccccctttgccccttgggaaaaaactcttaaaccaaaaaaggccctttttcccccaatatccccggttattttttaaaaaccctgaaactccccccaatgcttttaaaaaccctcttgaacccccccctcaaaacacttctcttcttctcccaccacgaaaaccccagtcttgcccgcgccccttttttctcgagagttgtccccacaaattggctccgaaaatcacccccccctccttaattggaaagaaccccttttttcatacccttttttcccttgccccttttcctctatttcgcctacacacccccctatccagcggtttccactcacccgctcacatattctcctctctcccaatccnnnnnnnnnnnnnnnnnnnngacccacggaccgaaaagcacaaccccaacaaaccaacccacccaccagacagccccacaaatcaaccccagcaaccaaccaaccaatccacaaaaaccaacagccaaaaccacccaacaaacccggccaaaacatttgtacgggcggctttttcagattgaccccacccaacgacgggaccctattaaaccgggttcacggataactatcacgcgtgacaagaaaccacacccaaacaatccaactttaaaacatgcaaattagcaaacttcggtcggaccaggaatatcaaaccgaaacccgcatggagcatatttaagcacgaactgtcctagccaagaattattgcctggaattgactcgtaatccagaagccccaactggaacaggaatcggtagggcctctgatcacaaacgaataattaagaggttgggtgcgtgtttgaacctgaatcccagcactttgggaccgcacacgggcggatcacgaggtcaggagatcgagaccatcctggctaacatggtgaaacctgtctctactaaaaatacaaaacaaaattagccgggcgtggtggcaggcacctgtagtcccagctactcgggaggctgaggcaggagaatggcgtgaacccgggaggcggagcttgcagtgagccgagattgcgccactgcactccagcctgggc

SEQ ID NO: 95916 - DNA, 233308 bp, Homo sapiens
  misc_feature (1)...(233308): n = A,T,C or G
tcaatagtttatgctaaacttataggtatgaatatgtttttaactaccaaagagtcatcacccaaggcttgtaattaactacatacctatgatcagcacataagagtttaaaatagcctcatgtagggaaaataactattcttgaggaaaacacattcagaatttaaacagaaaacaatgtgtagaggtaatttttggcttagaattttttttttattaagacaggataaaataaggttatttccttcagcagggacagtgtaaaacactacctattctactaagaaaataatttctttctcttctttagtgtgttttaaatgatcactgatgtgcaaggcagtgcccctggagcagggagaaacacaaaatgaatcggtaacagaggcagcactcgaggtaagagtctggcattcattctcccatttccaaattttgctatttttaccgtgacaaaggctgtatatttttgaataagtcattttattttctttggtagtttgcctaattgattatatgaaaaactaattagaatactgaatttactgtatatttaccacgataactataaaagcagaaaattagctttgaaaatcaaataacatatttagtaacacacattcatttttataaacacacataaagacaccgggttctcagtaatgctctagtccaggggttctcaaagtatggcttcagacaagccccatttgcatcacctaggaaattgctaaaatgcagattctcaggccctacctactgatctactgaatcagaaactctgagggtgagaccaagcaacctgtgatttcataagccctatagcgatattaaggcacactaaagtttgagaatcactgctctaatctagtatactaagctttaaagtggtgtttcataaaaataagatgagactttaatactactaattcagccttcattacttttcacaggaaatgtctgcaaggacacttagaagcaggtgaaatttatctttttgtggctttagggcagccagaaaggggcataccatctccttcctccttcctccttcctcccaaccaatcattttgctgagatttttggttttgatgtgttttcactttgccacctcttgagacaatcaaagttggagtacatttccttgggctgagttagcagttcctagctagaatacgatttctattaaatcttcaccctattacctttaagcagcttaacagtgtcattaattactataaagtccaggctgaagatttttaaagaaattgtaatcttatagcttattagctgtttcaggttagaaatactaacatgtcctatataaatacttgtactttttaatatttgtcataatagaataatatatggctttaaactagacattgaaaaatagaagagacctctggaaattgaaattagtttcccaaaagtcttttataatcagcaccctccacatagaagcatttagataaaggacaaaaaaccatcaaaagatataaataatttttaacttatataaagcataagttattaaatctctacatcaccatgagttgctattcaatgcctttggcctcagtgactaaatacaaggatgatttcaatattaaaagtacaagttttactcttttttcttctttttaatgatttcttttttcttttcttttatcttcttttttttttttttttattttttttgagatggagtctagctcagctgcccaagctggagtgcagtggcacaatctcggctcactgcaatcaccatctcccgggttcaagctattctcccgtctcagccttccgagtagctgggattacgggcaccgccatcatgcctggctgattttggtattttagtagagacagggttttactatgttggccagactggtcttgaactcctgacctcaggtgatccgcctgcgtcggcctcccaaagtgctaggattacaggcgtaagccaccacgcccacccctttttaatgatttctatagggatgtaatttacaagcagatgcttccttttgtgtctgaagctgggatgctaataaaaatatttcatattgtttcaaggcttctcagagtttagcaatagttgagcctcttccattttttgagattctcagtatttatgtaaatagtaataacagaaatgccaaaggtggttacaaaaactgtagtatatcccaaaaggttaaactaaacataatcaattgatcctattaaaaaaatattgcacaagttcagtccgggcacggtggctcacgcctgtaatcctaacactttgggaggctgatgcaggtggattacctgagctcaggagttagagaccaagctgggaaacactgtgaaaccccgtctctactaaaatagaaaaaattagctggacatggtggcatgtgcctgtaatcccagctacttgggaggctgagacaggagaatcgcttgaacctgggaggcagacattgcagtgagccaagatcgtatcactgcactccagcctgggcaacagagtaagactccatctcaaaaaaaaaaaaaaaaaagaatatatatatatatatatatatatatatatatgtattgcacaagttcatttggagatgaatctatttgaagcgcttcacaaatgtctggccctgaatcagatggccttctccacctctacttgggcactgccacagtgttagactaaataggaatacctctctggaggaaaatttttcgctggccttaatgtccctgggttaggaacagaagattggaagggagggctacagggggcaatggttggccctgatgtctgtcccttcttacctctctgctgggcacgcagcccaggagtgaaaggaaatataggcaacatatcaatctgctattacactggcttagacgacatatgtgtgcagatgaggacttctctaatagaggtgtaagatttgaggatctcataggaaaagacagcatgatcctaagctgtttgtaattccagatggatggttggaaggagcagtagctggtaaaggtaacaactctcccaaaaacaatgagaaatttgattatgtctcctatccatcttagctgaagaaaaccccaaaatacagtcataagaatagtaagtatcttattttgtagaagaagtttttctggttttgtgtttttgtgcagaggaggtagaaaaagaaaagaaaaagtgaatatcatttctgaatctgcctacattccctgaaacatttaggaatttatgaattcatgaatcttgtctattctctgaaatcttgtagaagagcctgacctcctacagctatatcaatataagcgactgaagggcagagagtggtcctgcttttcttttttcaatattattgtattcccagagccatttagtaggtgttcaataatttttttgattactaaaatgatgaatgcatggctgctcggaagacagagcaggctctctcttgggtaaggagtacatagaaaaataaatgtgggttcttaaaattcttaaaaggcacaagacttccagggaacactccaactaaaaaataaataaaaccaatctaatacatgttacttggccaaagaattctagcatcctgacatttttgtgggcttccagaaggagcaattggttcagtcacatctgtaacccctccatcacatagaacaaaaaggatatataacttcctgattttaaaacacaattccaactaaccctttcaggacattgggttctaattgaaggtcttgaactacgaatccaaataccctgataaagttaataaacaaccagaatatttaattactgtatcatcgtttgtgtctctttcagtttcaagggacagcaaatgcagtccaagctgccttaagacaaaagtgaatgtggccagtcgcggtggctcaagtctgtaatcccagcactttgggatgccgaggtgggcggatctcgaggtcagtaaatcgagaccatcctggcttacacggtgaaaccccgtctctaccaaaatacaaaaaattatccgggcctggtggcgggctcctatagtcccagctactcgggaggctgaggcaggagaatggtgggaacccgggagacgtagcttgcagtgagctgagatcacgccactgcactccagcctgggcgacagagcgcgactccgaatcaaaaaaaaaagtgaatgtatttgtttatgaatgaaaatatccagagatagaacttatttcagccacagctcgattccaagctcgaaaatctccatctgggtttcacttttctccaactctcagttctgccttcctgagtatcagctttattttcagacttcaagctctaagctcacatcttcattatgcaaagtccagtagaagagagtccactttcttaagagagggaggaaaaaaaaaagtcccagaatggtggtttttgtctgtttttctctctgattggccagacctgggttacatacctacccatgctaccaggacagaaagccatcactggccagacctgagctgtgggtctaccagtgagtcagcagcggctgacatcacctaaagcaaatgggctgcggggtgagatcaagtggttggatcttccaaaatgaacaggagtactgtttcaacaagagtgagtgctgggaagcaaaaccacaaatggccaatacaaagtatcattagtagaccccacttaatacaattcacatgttagtggaaccaaatgaaatttttaaaaatatatatcattcgattcacacttctaatcaaactatagttctggagagggtaacctcacaccttgaatccaaaatatctcttcagttgctggccttccacttgtcttcaggagctgaaacacatggcatttgaaaaaaactggcgaacagaggaaactcttgcagcctcgcagccgccctggtccagtgccaacggcaggagcaccacaggaagggaccgcgcgggtgcgccccacccttccagcgtcgcctcggggactcgcacccctttccctggccgcacaagacgtttcatccttggcggccgccgccaacccgccgggaggggcggtcggaactggcaggccggggcggaacccccggggtctccttgtcgaggcccgggcagccagatcctcagggccggtccgggcgggagcccggtcgatggaggcggctcccgtcctcagctcccgctccctccccttccccggggcgggcgcgcgcgggccgggagctgggaggcggcggctcccgcccgggaggcggtggcgagggcggcggaggcgcggccgggcgggtcccagggccgtggttctccagcgcaggagtccccggcgcacccgctgcgctcgccccgcagccgcagcctgagcggccgaagtcgccaccagctgtgtccgcgcagatcccgggcgcggaggggagaggtcgcccgcttgtcgcccccgccggaccccgggcaccgcgtagcacccaagcgccacccggacgaggggccctggggagcggctgaggccgaagacccgagggaaggaggagcccgcggacggctgcagccccaggtaatctccatggaggacggggccggtctcctcgcccagaaacccgatccgggcgccttggaatgcggactccagaggcggcatctcgaccagacaagtttctcgcggcttggaatgagggagtcctgaaaccgacactcgttttatttaaccagcttttttctcctgttttaaataagtttatttagacaatggaaagaaaaaaacaaacagcctcttgagtgactgtgggtttgtaaatataatcctaaaagtttttcatggtgtggttatttgcttgctcatatttattaacctgttaactcttccgctagtcagaaaattgacatgtaaaatattctttgaggaacgttacaagtttgctgttgtattcgggcatcctgttattcatcagcttagttagcatctgtcttcccccgaagtggtaccaaagccggtcccttggcgacgggtcttgcatgtgacactcttgccctctagtgcctcaccagcttggtagcagtttgatggctaatattaataagatgttacataacatgagagtactgggccaggactggtgttgctaccacttgtaaagtcaaaaagcctgagccgatggtaacgagtggtactgtttccgtttcttttccatctattgcaactttctcaagcattttcagctctgaactttaattccaggtaagtgtatttatttatttatactgtgcattaatgcctcactcataaatgtaggggcttttaagagataacaactttgctttcaaataatctaaaaatttcaagattgaacaagtgcttcattttattcttgaagaagaaatatagagtattttgattaaattaagtgaaacaaaggaccgtctcattcagggatgattttaaagcttccctttcataagattatggtactaaagaaatgacctcttgtaattgtttaagatattcaccaacttataatgattctgaagtagatctgtttaacagaacacatgtctgttgccttgacagaattttgtaaggaatatcagagactttaaactacctgcctatctacacagtaatgatcctcaaaaggctttctatttgatgcagtttatagacattatttaaaactatacaattaataaaattaaatggaaatggaaagaatcaatctaggtatcaaatacagaaactttaaatttaaagaaaacagatatatcttctatttaatatatccattttgtgggggcaggtaaaagcaaagttacatctttaaggggtttactcagatcctttttcaaatagtttttctaatagctggatactgtttaagcatcagagttatttaatgtcgaaaatgtattagtatctatattctttataaacatattgaaatatagcaacatgtaatctggaagagtttagaagaaaacccttctagacaatgcaaacagctacattcttaatacatttgtattaaattaaaatacaaatcaaatattgagatgtgtgcaactgatctgggacacacactttttttttgttttttttttttgcccttagaaaatttcatgttatcaactactgagcaatgctgttcaccaccagagagcaggatgatatggcagagaaactctagaatatccgatattcagctgaagggaatttttttccctttttcttcatccataccttcctatcaatattatatttaagatggagatttcaaatataagtttgaaggaggctcctttttaaaatagtactgaacatataaagaggcttgcctaagataagctcttttttttctttctctggttaacacagtatctaccatttctaattttgttatcatttttctttatcatcttgatggtaaaacagaagatttgtttctttgtgtaaataatgttaattttgagcttgtcacatgagttaattttcttcatagtctttaaaatgaagaattcttacattactaaaatgttttagataaaataaaacttttatctctttctggagatatttgttatagtttagtttggtggagttatatataccctctttttaaattaattttcttgagaaaagcattatttctgaacattgaggcaaatattaatttttggtgtaactgaaaagtttgttaaaaaatatatagtagaagagataatcaggcattggagattctttttctaaaccatatattctgctaaagaagttattataagctaaaatgtaaatatgtaattgtctacctgtcatttcaaaattttaaaactgtaaagaaattacaattttttttcttttaatcttgggactctgattatatgacttccttgaaacctgattgagtttcagctgctttttggtgattagagccttaaaagtgcatttgttaagatgcaaaatatatttttttaaactatatgtaaatactttgtgatttatatacactataaaatcagggaaattgaattaaggataaaaacactattctcaactaaatgaatgccttgaatttctaattgcttaacagttctgacagtaagggaaaacagtagaagtttactttccctgtgctgtgtctattataaatgagcattcacactgaaatgcatgaactctgaacacctgtccagattaggaatgctgccaggccacaaaagtaacgacctacattataaagataattagtctgaacaatcctcaaaactatttcatgactgaagtttctcgtaaaggggtgattttaatatttcttggtttgtctgtttgtttatagtaaaaaactatactcttagatacctggatatcacagtgagtgatttattctttcatgttactctaaacattttcatcgatttcatgtaagttacaggacaagaaaaaaaaagtagtcaggacctactacaattaattaatgtctataagaaattatttccccaaatcttctacaaattactgagggctataattcttgattacctgttgccaaataagagcttaaaaatcaattattgcagtcctatcctaaaacctttaagcatctcaattatgggtatccattttacatgtgtttcattgctgaattttttttttcattaaaatatttgaaaataacatgaaagtagacctaaattctaggactggctctgccaagacaggagtggccttgaacagctcccttgctggctctggggcttggtttcttcacctgaaaaatgaggattccagagacccttttttatcctgtttgttcaacattttagaaattgatctggaggccaggacgaagatagatgagaaaacatcagtgaataatacaaaatttaacttggtgataagtactattgtctagatttctgctaagtagagatgttacagtttttactcatagaatagttacctkgtaccaggcactgttctactttacatattaatttttagctcatataatcttcacaaagattatttaaggtaaatattattcctgtttcacaaatgaggaaattgaggcactgagcggttacctacctgcctaagatcacatccctggcaagtgctgaagctggtatgcagtttgagtccggctccagcacacattcctttaaccgttatactacattgtctctctataggtttcaaatatttgttcttgatatgcctcttgatggaacagaggtaatccatataccactccaacaatttccatcacttcccttacatatgaaatactcaytcattcacccaggaggtatttactaagcatctacttttgcaccaggcataaaggagtccacaggacaattaaatgtggtgccttccctagctaagtatatacagtctagttcaggtgatttctttctcctcttttgctactgctgttaggttgagtctcacttgttctaaaatgtgcccaaggtaacagaagaataatttacctgacgcctttattgatgtgtccatagaatagagagtaatagaaccttcaacctcctcaagactccctatatcatattttttcattattcgtttctactctttttgcatcatcttctctctgcagattggctgtctttccttatctgtttcatgtaacctgccctaaaacatagccaacactgatctgtaactttacatctaatggtccaggcaaccaatgagaggccaggttaacactctcttgttcccatgagtctaatgaaggacaaagaaaaggtttggattagaccctaaaagctgcattgtcagcactcacatatgtcatatgtgagcatgtgtgacagaatatgtcagcgtattttgatgcatgcattctggtccaatcttagagggtaaaggcagacattttcccccttaagtcatatagggcagaataaacagcaaacagcagtggggtagttttcttctcttgcatcactggatggcataacactgagggaggtgaataaaacatattcttctcttcataatttctaatacaaagatggagggagaatgataatagaaagtcattttccatttaatgtaccaaacaaagctaatgccctcaagtgcagcttttctcccatccatcttttaaaaattgcagttctagagacagagtgtattcttggtcatactccatgtaaatcagcttcttacttgcctaccacagcagggtttaattaacatgacacaatttcacacattctttcccaaagaaaagcttgcccttgtcaatttttattattattactaaattacttttagcaagtccatgtaacatatttgaggcctcccactgcatttttcaacattataaaatatagttttatagttcattcctttttcagaaaaaggaatattgtcaggatcttttaaatatctttcatttatgttagaacctgaagctctttagttattaatactcattttccagatggtaatcttttttcacttttcttgtactgccaactttaacatgattctatttcatttakaaattgatttttactttgggatgatggtgggtgttagtggaagagaaaagataggttacattgacaagcaggcacttccccttgcagatattgcaatactttgcaraatatatgtttgtatatattgagttctttcactatgttatggaattgtctgtgattccaaaaactaattgcttcttctgccttttgttaatggtaaataaytaatggttaatatttgcttggtggagtctttttaaaaacagatgcattgcaaagcaactctattcatgctgaattctgaaaaatctcagaatggaaaaaataagtaattgagtaaatttcagtgaaaagcacattctggatatgcctgatttatggctctgatcaaggtggtcactgctattcrcaatgtttatattattgccttgactgtttgaggccagtgtgactgatgaaggtagctgttcatagaagatggtttgacttaaatactgccctagtttgtgagtgccagctgctatttgtaaaatttagtagaggccttttttcactcattcaacaaatattcaatgggctattctcacttcaagtactctattagacattaaaaatatagaagtgaacaggacaagtacttacagatgcttccaagctatggagaaaaattgcataactaattataacagaaaatcacataactaattataactttggaacatactacagaggtaaagtagagagtgatgtgagaatgtgtaacagggaggcctgacagataagggggatcagggaagacttttgtgaggcagggatatatatacttagaaccataggatttggaagatgaaaccagatggggaagtggagaaaaaactttcagacaaaggtagcagcatgtggaaagaccctgagacagaaaagagattatctcttttgggaactgaaagaggacccacttgcctggaacttagaagggagagcatcatctaaccaggcctgagagataaaagtgggaagcataccacacagggtcttgtgggacatgtacaagaatatgaattttaaccagcaagtaaaataagcaatcattgacaggatctcagctggaaagaagtaacagagttccactttgatgctgcattgagaaaatggtagaaggagccaagaacatttgtggtgagattagttgctgcaagtaaaagaaggtgttaaggatgcacgtaggtgattgtgggaccatgaggatggttttagcggaaagatcataaattcagttttagacaggttaagtttgcttgtgacatgattctagtggagccaaatagtggctggaatataataagaaagggcacagtctatgtgagttgttgttgctattatatcaagttgatagttcaatataaaatcctagagcttagaggaaggaggtctgagttatgaatgaacattcagaatttactagagtgtagatgataatgaaaaccaagaagtatatgagctcatctaaggaaagggggaggggtgaaaagaagcccaaggacatggtgctggttatgcctctgattgagcctctttctttctttcttctaagatccatccgactttagatctctgcactaagggtgggcttatgtgcttcccacaactctacttaagctaaaatgctcatagctatccctttatgaacccttagtgtactttcattggtcatcttcaggatatttccctcatttcctgtgttatttctattatcatcatcatagcagataaattttgtttgttcattgtatgtgccaaacactattataagagtttggtttttgttgttgcttttgagacaggattttactctgtcgcccaggctggagggcagtggtgtgatcatggctcactgcagcctccacctcccaggctcaagcgatccaaccacttcagcctcccaagtagctgggaccacctgccaccatgtccaactaatttatatatatatttatatatttatatatatatatatttatatatatatatatttatatatatataaaattttgtatattttttgtagagatggggtttcgctgtgttgcccaggctggtctccacccctgagctcaagtgatctgcccacctcagcctcccctcgtgctgggattataggggtgagcccctgcacccggcctctaagagctttaaccctcattaaaatccccttaggagatatcatagtagcccattttcttagaaggaaactgcagcatctaaagataatagctgcccaatatgcatttcctacttgttcctagcatggaaggatcgtgttgcagttatcttcccaggtgtatggtatctttgatgcaggctgttggagttcatatttcagttctacctctactagctgtgacatcatgggcaggttacttcacctctaaagggtccaacacaatttcagtacctatgtaaatgtttattaatattagctgcattactattgktattctatatcttcccatatcatattatttccttcagggtgccttataggaaatcttgatgatgtgttgacatttataactgatccaactttgtaactttctcgaacctaactatttcagaatgcctgtctaagtgatctgttgattttcaaaatttaaaatacagtttcctgatcagtcagcatagtcctcatcataggttgaattcggagcagaattcaaccacaactgtcagttctgtactgctgatcaagacagttgtgtctgtgggaactctctgacatgcaggctagtgtgcttgttctgtacttattcagagtaccctactgaccatgcaaaagtcttcaattttctatgtatttttgtgcaagcatttcacgaacatattcatcactatactgaaatgtttacatgttgatcttgttggcctttaaaagtgttttcatctcatttctttttgaaaaatttgaaaaattactgggaaaaaacatgagccctatgcccttggaaatttcagtctaacaaggaagacagacattagacaaataatattgttaataatatttcatgagagttatgataaagtctccaaagggagcctcatctaaaggggaagaatacagttggtcagcaaaggcttccctgaggaattgggtttttgtagcacattcagacgtgcctgtaacctgtcaattccaaagattttcttgacattttgtatttgtctacatccaactatgttatataacattgtgattttgttatctaatcatgtataacttagtccatctatctatctgaatctgaagtgtgcatcactgagtcaagccaatttcccctcttagttttatgtttctattatactggcatctttatcttctagtccccaagactgctacctcccccaaccataatttaacagtaagcatgttttttttcttctttcttcccaaatatctctcatttccattctctctcaaaaccaccttagtctggacctataccacctcacacatggattacagcagcagccccttagctgggactgtcttgactctgcctacttcttcactctgcacagtgtggcatgttctctctctgttcatattactgctgttcatcattctgggtgtcactactacactaatcatctgtaaacactgtctttatcaaatccctctgttcaaatgcacccaatgctctttattttcaagctcatactcttgtacttcacaatcactttcaaggacattcattaatctgcaccactcttttaatcaaatattatttccattttcaaccccaaacatagtatcctatattttagttaatttcactctgagctaagcacattgtaaccatttcatttcttcaaccttgccagggagttttgcctgacatgttgtccccatcctcatatccaaacccagtgcatcatggcatgtcactttcaagcaccatgtctcttagaaactgccactgactttactaagcttcactaatctctctctttctctctgtctctctctctctcttctgaaacctgtaacagatagtctatactgcataaatcactatttattatgtacaacatactgttggctgctgtctcacaagtctcatttcccttaatagagtccattatctaggggaaaggattattcctaatatcctaatatacttccgtggtgtccacagtatttactacagcactaattccaaagtaggtgttcagtaaatacctgatcactaattgcataatgataagtatttttggtgggtgaaggttttatctaccatagatattatgatattaaatttatcccatgttgggatgctatgattacattaacttaacattgaatgtaatagttatttgtaacttcaaaagataagttaaagcattagaatacagtaaaagtgtcaaattaacctacaggtgtaagatgccattgtattccattaattccacaaaaartcattgctcctggcacaagtggtgcaatgataggcaaaagaaaggtactatctctaccctcttggagcttccaggcatacagaaagtctgactttaaacaaaattttaattatggcaataagtacaaaggagatgctcttttcacaaagaccatgtatacccactggtcttaccaagtttgaaaagtcagagaaggcaccacagggcaattgtggcgaggagcttaattttccatattcatscatctgcatgatgcctcacaagtgaagggctcaggtgaagtctgtaactttgcctttgcctactgctacggtgccaccttccacaggaggagtgacagcaacaggtcagtccatcctgaagttttcagagctaacagaaacatggaagagaatgggaagtagctgtccttggatgagtttgtagtatgaatagaaagctctgagaatctgcaccagagactgaagttggcatggcaaagtgagatgtgcaattgaaaaaggtttgcagaaaacaggagaattttaatgtatgcatttaaatatgttagaccamttcctcagggacgtgcactggaattttttctttagcttcagaaggaaacttgaagagcttaatagaaaagaaatgtccttcagcattttataatggcttacagagaaaataactttgatagattcctaatatctgtcctaaacagtgagagcaaatactcttcaccactctgcctcatcacagataagaattgtataagttacatgcctttcacttttgacaaaggggacaaattgtaaaatgctgctatctaaaatggaaaatgtagcaatacattttatgtctagtcaaaaacacctcacaggtaaaattgaaacgtagaaatgggaggatatgagattttgtattctgctgttatgctccagaatattatagtcataagaacgtacataactgtaaaagcgcaattacttatcaaaatgaaataactataattacaatgaaaactctgttgtccaggtaaatttttatttgcttaaatatcatctgtatctataccagagcatttaaaagagacctcacatggcatgccaagttcttgtccccctttctctgcagtgtttgtaagatttgtcccttccctacaattctccctcacctatgatgattaacagtttacgactacattgtgagaaatgagactgcactggcgtgccagatcaactctgtaagattgctctatgatattctccatgttattaattcttgtcccagaaaaatctgttatgttatccccctaatcaagaaagttgtgtgtctctaacagaatatcacagactggataatttataaacattaacaatttatatggctcacagttctggagatttggaagtctaagagcatggtgctggcatctggtgagggccttcttactgtgtcatctcatggtggaaggttgaagggcaagacagcatgcacaaaggggcaagagagcaagagccagccaaacttgcttttatgacactcttgagataagtaacctgctcccaagataatgacatttatctattcatgagggcagacccctcatgacctactcacttcttcttaggccccacctcccaacactgttgcattgggaattaaatttccagcacacaaactttggcggacacatacaaaccataagatctccctacaatctttcacaacctctgtactctcaagtcttagcataatctgggttacccatacatagtcaaatttattttttaagtatttctcactctttcctcccactcattattcatcatccttacccaatattgtgctcattcctgcctctgtaacattccctctatctcaaatgtctcttcaaattactcccatccttcaaggctctacccaaatcctactccacagtacagcctcaccaccccctggagcattccacagactcccccacttgccatggtctctttcttctctcatcctgttatagtcattgtctctaatccacaaccctcacattattatcattcttgtcactatctctgctttataatttagaacattttaaataaattcagtctgctgaacatttatattttaaatagcatgagagctaccccataaatgtttgaatgcatgacatatataccctaaatattttaatgaatgaactacaatatataatttaaaagataaataacacatttatcctgtaaatagaatatactataaatatcctacaattctattctagaatgttatattattcataaagataaacatattgttcaaaatattgttcattgtttatgtcatagaattttggaagcagaatgttattcgtgaacttcatcattttacttggtacagaggcccaaatgacacaataagtaagaagcagatgtgcgatagactctaatcttatgacaaacactaaatacagtatttttcacctgtgcttgttgttgtaccagctagcttttagcctgccttatgtagaatcacaggacctgtcttaatttttttatgttccattataatttcttgcaaagttccaggaccataaaactctaataaggttttgctctaagaagcacccaggaattccagagggggaaggcaagatggccaactagatgcagcaaagaagtgctactcccacggagaaaaaccaagggtttgagtaaatcarcataatttggacagatctctagaaagaaaatgcttaaagtagatggagatgcaatgcagatgctgaggctgagaagggagaaggcaggcacagggtactggaggcagggctagtccctggccctcaacagctccgggggaataggttcatgatgggactgtgggactgcccaccctcacaatgtgcctatgggatcctggcttagagggccccgcatcccccatggacacttgatctgacaaggggatctgattggagagtagataaagacagagcttcatccagaatggaacaggagcctttgtacatggtgcagctctggcagaacatggtaataggygtccataacccaggtctctccatctccctccaaaaagctctagccacagctgaccactaggccagaagaaagtagagctgacttccctgtggaactggatcatgtctgttctgcaggccttccagcctgccagcccctctcagggccacaccctagcagccctgcaggaacatatgcacagtacagcctctgctgcccagcctgggtgccttgctccacctgattatgttcctcgtggcttgggagcactttggattcctcagagcacccagaatccaactccaagtacctgaaggatggagccccaattccatccaagtgcccgagggctgcagcagccacctcaggaatgccaagccaagttctgtggctggcactcaagtgggagaggagctcacactctcaaagcactgagaggggtgagatgcctattcatgggctggagtgggagggggcatgcctccctccacaggatttgccaggaaaggttgtctcccatctacctgctgcaacttcggaccagggagccctgcagcacagaccacctaacaaaagaaatgcagacgcactgtcagtgatcagagggactcccccaaggtccaagagtggacatggtgaggaggtcacctctctccctgcccactgcagagcacagctgcaaatgtgagaaatacagaggagccatgcagctagataagaggctatctactgcccattactcttcagcatcatctactggatcccagcccaaactatcacgccaaaaatattttgctactatacacccctgtgaaaccaagggcaagaattcagccacaaataaaggccctatagagaggcttgggcatgtgaaaacatccagaaacaaatccaactgaagtactcaaattacgtcattgttaaagaaacactggacttcttagatgcgaaagaatcatggtaagacctctggcaatttaaaaagtcagagtgtctcctcatctccagatgaatccactagctccccagcagtggttctcaaccagtctgaaatgactgaaatgacagacatattatttagaatctggatggcaagaaaggttgagattcagaagaaaattgaaacccaattcaaggaatttatttatactatccaagagatgaaatatgaaatatccattttaaaaacgaactaaactgaactactagagctgaaaaattcagtataagaatttcataatacaattagaagtattaacagcagaatagaccaaactgggaaaagaacttcagagcttgaagactggctcttcgggccaactcaactcagacaaaactaaagaaaaataattgttagaaatgaacaaaacctctgagaaatatgggttatgtaaagacaccaaatttatgattcattggcattcttgagacagaataagcaactgggaaaatatatttgagtatatttccctaatcacactagagaggttgagttgcaaattcaagaaatacagagaacctaggctgcatactatatgagataaccatccttaaggcacacagtcatcagattcaccaaggtcaatgcaaaagaaaaaatcttaaaggcagctagagagaagaagggtcaagtcatgtacagagggaatcccattaagctagcagcacacctttcagcagaaacattacaaccagaagagattgagagcctatttttagcatttttaaaaacaaaatttccaaccaagaacttcatatggcaccaaactaagcttcttgggagaaacagatataaaatccttctcagataagcaaatgctgaatgaattcatttcaactagaccggccttagaagaggttcttagggagtgctgaacatggaattgaaaagcaacacctgctaccccaaaaacacacttaagcacacagcctgcaggcactataatccacctagacaatcaagtcttcataacaaccagctaacaacatgatgacaggaccaaaatctcacagatccatactaatcctgaatgtaaatgagctaaatgccccacttaaaagacacagagtggcaagctagataaaaagacaagacccaaccatttgctgtcttcatgagaccaatttcacatgtaatggtacccacaggcgcaaagtaaaaggatggagaaagatctaccatacaaatggaaaatatacaaagatcaggagtggctattcttatattagataaaacaaacttcaaaccaataaaaatttaagaagacaaagaagggcaatacataacaataaagagtacaatccgacaacaagacttaactatcctaaatatatatacacccaacattggagcacctagattcatgaaacaarttcttcttcacccacaacaaaacttagacaactatacaataataatgggagatgtcaacaccccactcacaatgttagacagatactcaaggcagaaaactaataaactccggacttaaacttgacacctgaccaactagatctaatagatatctacagaactagtccacccaacaaccacaaaatacacatatttttcatctgcacataaaacatattctaagactgaccacatgtttgttcaygaaggaagtctcaataaattttaacaaactgaaatcataccaagaacattcaccaacctcagtgcaatttaaaaaatcaatatcaagaaggtctctcaaaactacacaattatatggaaattaaataacttgctcctgaataactccttggtgaacatcaaaattaaggcagaaaccaaaaaatactttgaaattaatgaaggcagggacacaacttaccaaaatctctgggatgcagctaagttagtgtaaagaagaaagattatagcattaaatgccttcatcaagaagttagaaagatctcaaattaacaatctacctttgtacctaagggaactaaaataaaggaacaaacatacccccacagctggcagaaaaaaataaataactaatattaaagaagaattaaatgaaattgagatgccaaaatccatataaaagaccaatgaaaccaagagttgtttcttagaaaaaaataaacaagaccgatagaccactagctrgaataacaaagaaaaataaagagaatatccaaaaaagaacaatcaaaaatgacaaagataacattacaactaatcccacagaaatagaaatatccttaaaaatactatgaatatctctactcacatgaattagaaaatctagaggaaatggataaattcctggaaatgcaatctcccaaaactgaatcattaagagattgaaactctgaaaagaccaatatcaagctctgaaactgaatcagtaataataataaaaaaaaaaaaccctacccaccaaaaaaagcactggagcagatggattcacagccgaattgtaccagacatactaaaatgaactggtaccaatcctactgaaattattccaaaaaattgaggagaaggggcttcttcctcacacattctgtgaagcaagcatcagcctgataccaaaatctggcagagacacaatgaagaaaaaaaacttaggccaatatctccgatgaacatagatgcagaaattctcaaccaaatactaggaaaacaaatccagcagcacatcaaaaatttaatatgccacaatcaagtcagctttatttctaggacgcaaggctatttcaacatatgcaaatcaataaatgtcatttaccacataaacagaattaaaagcaaagccatatgatcatctcaatagatgcagaaaagctttcaataaaattcaacataccttcatgataaaaacccttaacagtctaggcattaaaggaacatatcttaaaataataagagacatctatgacaaactcacagccaatgtcatactgaacaggcaaaagctggaaccactactcttgagaactggaatgagataaggatgcccaccctcaccactcctatagcactggaagtcctagccagagcaatcagacaagagaaagaaataaagcatccaaatagaaaaagaagtcaaactatctctctttgctgatgatatgattctatacctagaaaatgctaaagattctgccaaaaggtccctagaactgataaatgacttcaggaaagtttcaggatacaaaatcaatatacaaaaatcagtagtgttcctatacatatatcaataatgttaaagctgagagtccaatgaagaatacaatcccatgtacaatagccacaaataaaatgaaatatctaacaatacagctagccaaggaggtaaaagatctgtacaaggagaactaaaaaacactgatgaaataaatcaaagacaatacaaataaatgaaaatacttttcatgctcatggattagaagaatcagtatcattaaaatggccatactgcttaaagcaatttacagattcaacactactatcatattacaaatgctatttttaaataaatataaaaaaactgttctaaaattcacatgaaccaaaaaagagcccgaatagccaaagcaattctaagcaaaaagaacaaagccagaagcatcagactacctgacttcaaactatactacaaagctacagtaacccaaacagcatggtactggtacaaaagcagacacatagaycaatggaacacaatagaaaactcagaaataaagccacacacctacaatcatctgatctttggcaaggccaacaaaagcaagcaataggtaaagcactccctattcagtaaatggtgctgggataaatggctagccatatgcagaagaatgaaactggacccttaccttttaccatatacaaaaattaactcaaggtaatttgcctaggctgtaatcctaagcaaattaagtaagcaagttaattcaaatgcaggacatcaaactataaaaattttagaagtaaatctaagaaatactgtttatgatatcagccttggcaaagaatttttggctaagtccccaaaagcaattgcaatgaaaacaaaagttgactagtgggacctaattaaactaaagagcttctgaacagcagaagaaactatcagcagagtaaacagacaacctacagaatgggagaaaatattcacaaagtgtgcatccaacaaaggtctaatatccagagtctacaagaaacttaaatcaataagaaagaaacaaccaaccccctttaaaaacaggcaaaggacatgagcagatgtttcttcaaagaagcaatcaggcaagagaaagaaataaggcatctaaatagaaaaagaagtcaaattatctctctttgctgatgatatgattctatacctagaaaatgctaaatatcctgccaaaatagtctctttattaaaagaagacatacaagtagccaacaaacatgaaaaaatgttcatcatcactaatcatcagagaaatgcaaatcaacaccacagtgagatatcatctacaccagtcagaatggcaattagtaagaagttaaaagataacagatgctggtgaggctgcatagaaaagggaatgcttatacactgttggtgggaatgtaaacaaattcagccgctatggaaagaagtttggagatttctgaaagaacttaaaacagagctatcacttgaccacagattccattactgggtatatacccaaaggaaaataaatcattctactaaaaagatgcatacacttgtatgtttatcacagcactattcaaaatagtaagataaacaatcaaactagatgccaatcaagagtgaattggataaagaaaatgtggtacaaatacaccatggaatactatgtggccataaaaaagaatgaagtcatgtcttttgtagtaacatggatgtaactggaggacataatcctaaacaaattaactcaggaacagacaacaaaataccacatgttctcacttacaagtgggagctaaaccctgagcacacatggacatatacacaagaacaatagacactgtggactattagagggaggaagaaggaaggaggacatacacggtggaaaaactacctattgggtactgtgcttactgcctgggtgacgggatccataccgtaaatgtcagcatcccacagtatccccaggtagtaaacctgcatgtgtaccctctaaaataacggttgaatttttttaaaaggaaaagaattccttaggtgcccaggtaaatccaagcatggctgtacattattttggatttgactagccaggaaatatgtgtttgtttcccattagttcaactatctgagaaaaaatattgttcagttgacagagatatatacacagtttgcttaaccttcatgcactcaaaatactcttaacagtaaatctgtatcagtgtgctgtgataccagaggaagtgtaatcctaataaatgtagaacacccaaataaaaaaagaagcactcatgtttctttcttattatttttcaaagttactaaattttcaaaggttactaagacttgaaagggatttcaaattattgcacaacaaagtgtttcatgaagtctcagttgttttcattacatttttaaaaacatttttggagtagtttttcacataattactaaactcctcaaaaagcggaaatagaatggtatagaaagtgaatcaataggtaaatttgctcttctccaagagtatatggttcccaatggtctcacaccagatttgcagaaaccctgggaagtattttattcctcatattcatcttaccacatgactgttttgatttttggaaaatgcaactatgaaaatatgcagttctaaaataatgaattgcattgtgggaccatatatgcattttgaaagggttattttaatgagagcaattatcataaggttgtttctctaatgaatgtaaaatgtgtatacaatgataaaattgactgtgccatcgactttgcagaaaagaaaaacacatgttttaattatggcataaacattcagtacctgtgattaaaaacaaacagcttgagtatgtattacataatgtatagccagatggcaagaaatggcagtgtatgacttaggtgacctctccgtggtctttgttgtatagtatctacagagtttgatgcaaagcacagtgaatatcatgaaattttctgttagcccaaagtcttttttttactaggaatagagggctcaatggaccccttttcctctttctaycagtcccatgtcctcacacagatctgggagaagaaaagggagggcttygaatttactatacaccagttcatctgccaartactctgccacttatgctagtcaacaagataaaaacttgcttattttaatgctgcaaactgactgttttatattcttttctatttttcagactgtattttctgtgagtcctgatcaagtgatacaaatgagctgcaatggtgacataaactcttgacagagattggaaaagtagctggaacaccatcttttcttttaactttttatggtgcttctgttggcatagttggggaaagcacctacaasatgagttttatcatgaagcttcacagacactttcaaagaacagtcattctgcttgccactttttgtatggtgagcattatyatttctgcttactacctgtacagtggctacaaacaggaaaatgaactctctgagacggcttcagaagttgactgtggcgacctccaacacctaccrtatcaactaatggaagtgaaagcaatgaagctttttgatgcctcaaggacagaccccacagtcctagtatttgtagagagccagtactcatctcttggtcaagacatcattatgattctagaatcaagtagattccagtatcacattgaaattgcccctggaaagggagatctcccagtgcttatagacaaaatgaaaggcaaatacattctcattatttatgagaatattttaaagtatataaatatggattcctggaatcgaagccttctagataaatactgtgtagaatatggtgtgggtgtcattggattccacaaaactagtgagaagagtgtacagagctttcagttaaaaggtttccctttttccatatatggaaatcttgcagtaaaagattgttgtattaatcctcattctccattgattcgtgtgaccaaatcttccaagcttgaaaaaggttctttacctggaactgactggacagtttttcagattaatcattcagcctatcaaccagtaatatttgccaaagtaaagaccccagaaaacctttctccttccatctctaaaggtgctttttatgccactattatacatgacctggggcttcatgatggaattcaaagggttctttttggcaacaacttgaacttttggctgcacaagctcatcttcatagatgccatctccttcttatcagggaagaggctgacattgtccttggacaggtacattcttgtggatattgatgatatatttgtgggaaaagagggaacaagaatgaacaccaatgatgtaaaggtaaggctctattttctcaagtttcaaagttcagttcatcttccagcagggatacaactatcccagtttgtactacaactgggttacccaggacatgggatttactgggaaagtctgggcaatctaggattatcgctcaccctaaatcaactaagaagattatgtatttctatctgaatcaagaaaaataaagattttactaaaagattgagtgtggcaggatcctgaaatggttttctacatgtatttacaactagagtagaagtcattttgtttaattactttccagaaactatctacctcaaaaaaaagctattactaatctcagacttagctcatttaaatatgaaattaaagtgaatttgtcttaatgataataaatatttccacaaatttcaagaattacagatctcattgtagcaagttcagatacttttggaagtcagatatgcagtgcattttctcttatcatatttttctgaaactgaaaatcagtactactaaatatgaagatcaatgactgtataagcatatttattcacatttaaacatgaggatttaacttgatttcagtgaacacttctgacacatatatgaagccaatcatgccaaatttaaattgtattacatttcttattgtgtaaaactgctgcccttaaacagaaaacaattatttgaaatagtttgtcattattatgagttgattgtgttacataaacagctgattgtttactattaaaaaattttaaaattaaagttatctacatttgtcttagtttccmattcgaaatgtcataggattctatctctgttatactatgtattgatttctcataaaagtgagacttttgatacatagtttttattctacagttttgaccttttggtagaatatctagaatcaaatcagagagcaaaaaatacatcttgaaaactttgttcttttctctagtcactaagcatctggcaaataatagtaatgttcatcacactagttaagtgggctaagaataccagaaggaccattaaatgttactgtaagagagtgtgaagactgaaaagaaaaaaaacttccatattcttggcactattttagtctcttccttttagctaaacagaaattaataaagaagctgtatttaagtttccattaagtctttgtacttacttttgaaaatatagctaaattaaaacyaagctggtagtttaagcatttattaggtgtttgaagattacaagcaatatataattcttccattttttttccatttcaaatgattttggtgagaaatgttttcaatatgaatatatttctgaagtgaaattgtttgaaactgtcaaatatatattgttatagaattttaaaatatggtaaataaatccctgagttttgtatgtagccccctgtttcccctaatattatacaaaatacaaaatgccatttgtgctccagaagttaagccagttttcaggggtatgaaaaattagaggcttattgaacacattaaagaaaaatttggcatgtctactttatgaactgctcatatttagatagaaatatattttctaaactamctaaatgcttttttaaaaaatgtgttttgaataatctgggttttttaattacttctaaattgcatcygtgattgtgtctcaaaacactaatttactacagtcaattgccctgagagtataaacagtcattcatgtattcattctgtaactagttattaagcgtgtactacatgtgaagcactttttggaacttacagatagaatcttgaactgtagtccattccagagaagaggggcaggggagagtagagtcataggaaagcacattgtgctgagcatctatccgttcagttcttgatatggctatatcccattccagrcatagaggcaggctttagggatacaatgataaagygggggtgataartaggtaaatagcttgcaacatggtaagcacaatagcaaacatatcgacacagtttcatataaattatgytgtgggaaacactacagtgtgtgctgtgtacctgtaacttaagtatgtacttaagtatgtacttaagcatgtaggacagagttcaaaggcaagactagattgatgtgatgatttggaaagatgtagcagtaattcagacaaagacagcaatttcttgaaaccaggaaattggagtaagaatggagaaggaaggaccaaattaagatctatttaggaagtaaaattgaacaacttagtaattggctgaatggagatgaaagagaatataatcatgacattagaatttgtcatgaaagagaatataaggatgactttaggatttttggcataggttgataattgttgatgatgtgaacaacagtaagtaagaggatcatagtgaagatcattaaaggtcataataaaaatttcagttttattaaagtccatgtgggatgcagagcatttcacaggtagttgcctcacaggaaaagtctgggtaggaaatacagatttcaaattcatcatcctatagggaatcattcaccacatgaaagtgtgtgagctcagccagggaaaaaatttagagtgataagagaagatgatcaaatgtagaatattgaggaaaatcatcatttagaagacaagtagagggaaatatcccttgaataagagtttgaaagaacagtcagagaccaggaagctgagatgctatagcttcagaaaaagagtgatcagcagtataaaacccaacagcagggcccactgggctaaggactggagagtctcctttgggaaaagacaaagatcactggggactcttgcataatctatgtgaatggaatgatagagaccgaagcccatttgcagtcagttggagtcaggagttgactaagggggtcaagatgtgaagaaagagagtgtagagcactcagtggagacatttttgtataaaggaaaaaagagaaattatacagtagctagagggtagactggttctaggaagaccaaccgtcctggtttgtccaggactgagagtatttgttgctaaaacgtagagtccaagagttagatagggtgacctaactaaatcagataaggaagaataatcaaaaatcatgaggtctaaaaaaatcataaattttgtgattaagagtatataattagtataaatgtttaaatcaattattttatttaattattaccaatvttatattttccctatttgaagtattgggaaaatttaaaagaatgtgagaaaatcaaaagttacataaactgttatgtacaaaattggaaggagagtgcaagacataaattttaactagcaaactaatcactgcatggatgttattttttttcttatgtggaatagaaaatgtgcttccttatttaatgggaagatttgaatagcaatgcaatatcagctttacccacctagatgttgaataatatgrgtatattttaaagatcctcaaagccacagaagaaactgtgacatggcacaaagtgtttcattctttgtgccacaaaaagacaaaaaaaaaaaaaaaacagacctaagttgaggtctttgtttgtctaggaatatgcaagctacaagccatagcctgtaaagaaccaaagaagaaaattgtttagataattcaaatattcctttaaaaaggcaggacaaatttcagtgaaattgaagtcaggaaaagtgtgtgtgtgtgtgtgtgtgtgtgtgtgtgtgtgtgcacgcatgcatgcaaacgtgttccattggactattggatgagttttagtgacgttcaaaatttcaagttccttgtgatctacaacctaccctcaaacttcccgactaagggttttgggagagagaaagtgatgtttctacaattaaaaaaagcttctaccattaaagcatttgttttacatgaaagcacttcatgacccagtgaacactaataacccatgtgatcttttaggcgcattaactcactcttgttgtaagatccattatacctttagacctaccatttcatataacatttatctcccaagacatctgagaagtcaaatgagaagattctggagaaggtggtctttcagggttttactgaactccttgcagttgaatactctcaatgcataaaagaggttacatatcactccctcctgcatctctcccttcctctctctctttgatttctgtaataggtacacattcctttcaaactttgagaaaattcctaacattcttcggaaaatgaagaacccgcccagtcacatctgagcttactgaagaggtaactgtggctcctcctggagcatcttgtacttctttctggaggtactcaacagccactttccttttttaactaccccagacctttctcactattttcttacatttcaatataccataacttgtctatttgtggattagcccttaaaaaatctacatttttaaagtggccccagaagaaagggaagttcttaaatttttaatacaatgtcatgagtggctatatcattattttcctctctaatggaagatcccagagtacctagagaaaagaaagtgctgaaaatagaagtgggaagctagaaaactgtgaaaaataagaggtatcaagctcagaagataaactcagctgacttttcagtcttgcttggggctgactgtgggaagctctaattggaatgtaaaggtgcgctctgtgctgcttgacttcaccacgaatattcaccaccccagctaagcggaagccagaggcttcataaaatcactaaaaaataacaacataccaaatattgggaggaggaggaaaacacaactgcaatcaattattctgtcataagtacacataaaagggtagcaaaaatttctccagacagttcactattcatgtgctctgtatgaatgtcaagatctgtacattgtacatagtattaatgttttgtcatttttctcctaaactcatatttcttgagttcctttccattatatctgatgtttcttatctcttatttactgatattcatttaattttattatgctatagaagcatgtatctgcttgatcccattacttcaaatttgctagatttactttataactggatacagtatgcctcatgtacttgataggaacatatattatctaatcaaggtataccaacacaaccttgttaactacatttttcaaatctgtcttcttactgtattcttttttggggggtgagggaatggaatggtatccctgatgctaccaaaagagttatgtttaattttccaactctgatggttgattgtaaatatttccttgttctgaaaattattgccttctatattttgaagctatgttaagtgcacatattttgaaattgtattttaatatgttttttcattctatgttatctttttaactttattaatgttgttttgcctttgttttgcttaatgctaatacagctataccagctttcttttgattactatttgagaaatatatcttactccttttttatatatttttaatctctctcctgtctttgcactgtaaattagctttgaaaacagctcctaggtgaactttgcttttggtctactctgtcaatatttgtcttttaattaacaagatcaatctacatatagttaattggattatcaatgtatatggatttatttcagctactttattttgtgctttayatttgccccacttgttatatttcttctcttctttctctctcttcctttttaccttcatttgaattgtcagtttctttcttttttctatccattcctggtttaaatgaatgtattttatctctttttttttagtagtttctccaaaaatttaaacacatgcactaaacaagtgccaatatcttcatacctcagtcaaaaggtacaaagttctttatctccaataatgctctctctcctttggcggttgggttattctggttctagatgttaatgttgctgtttaacaccggatattaggcactgttgtttttactaccatcaaagttttattagatttgccagatttctactgtttcctttgccaactgttcaccttttctcatccgatgtgattctcagcttctacaccttacccctttctgtaaagagcagacagtcatgccattgacacgtaattttgatcatgaccccgctctgctcaaaaccctccagcaacttccagtgtctttatctctgctacacgcccagctccttttccctcacgctactgcagcctctctagtatctttgctgttccttgctcctgtttcagaattttgcacttgctgttctttctccctaaagtgtccttcccccagattggtgcatggctctcttctttgcttcctttagatctttactcaaatgttactttctcagtgaagtcttctctgaccattctctttaaagttgcaacctctaaatctcccatctttccctgagagtgttttgttctggcacttatgatcaccaatgatgtgctaaaactggctcacattggcttacaaggtcaattttgtgcatctccttctagctttatggaaggaatatttacactgtaaaatagacaaatgcgacaaatctgggctttttattcacacagacccagttgttaaaggcttcacagcatgctaccagacataccatgtattttactaatttattaggttggtgcaaaaataattgtggtttttgccactactttgttatttggactattaaaatgtaagctttattagggcaagatttttttcatctattttgttcacggatgtatctccagcacagagaaatgtgcctggctcagtatatatttgttgaatgaatgaattgcattctttctgaagtatatcctttagacatgataaaagaaaaacatcagctgaattaaatttaaaggagtttaattgagcaatgaacaattcatgaatcaggcagcctcccgagccagagtaggttcagagactccagcgcagccacatggtggaagaagatttatgaacagaaaaaggaaagtgacatacagaaaacagaagtgaggacagaaacagctggattggttacaggttagtgtttgccttatttgaatataatttgaacacaactgactggccaaaacacagtgattggcacaagtgtagactacggtctgtttacacctccacttgttatagctcacaatgtacagaaaaacctttaggctgaactgaaattatgtaaggaggtggctttagtccaaactttattttaaagacttccttcaatgagaatctattcatggtaaaccttctcagattttatgcattgtaaatgtctttattttccctcatccttaaaagatagtttggttgacttcacaatgcctaattaagttccctcatatatatccattgctgctcacactgggaagattggtcctccctggaagtcacctaaacatttttggtaatagaatgtccagttccactggtccctaatagttttatgattgtcacaatattaggcaatttgagaccattcttctctccctccctctccctcactctctctctttgtttggtggaatacttacttatttctacatttgatataacgtgatcatattaaaaatacacaggaaaataaattactgtcaatattattatcacattcaaatagccatagtgtgctagcaactatacaactgtacagttattttaaggaaataattttataatttaacatggsgaaatcataaaatagattagcaaagggaaaaaacatttcatattcataatctatttacttttaatatattgtattaaatttgttgttacattgtgaaatggaatgtttctctactattaaggagtgatttgttatgcaatgacrttctaaaagaatgagttataaattatttaaagaaagcaaaatgctgttactgaacacatgaatatgtaaacaggatacttggtgactgattacattttttaaaggtctgatacagtctgggcacagtggctcatgcctgtaatcccagcactttgggaggccgaggtggtcagatgacctgaggtcaggagttcaagaccagcttgaccaacatggagaaaccccatctctactaaaaatacaaaattagccaggagtggtgrcacactcctgtagtcccagctactccggaggctgaggcaggaaaatagcttgaacccgggaggtggaggttgcagtgagccgagatctcaccattgcactccagccccggcaacaagagtgaaactccrtttaaaaaaaaaaaaaaaaggtctgatgcaatgaatccaacccacgcatgatacaggagggctgtcataaatggtaccaaagctcaaccagacaatgatgagttctacacactgtagtagcagaagaatacaagaggcaaattcagaacagagatttaggttctagagatattaagaaaattatgcacatttactttgttaaaataatgtcataagatttcaaaggatatgctgatgaataatgaaacacatttttgataaaggaaatcaaaaaccttggagaaaattgtackatttgccagttactggattatgtccttctcttggttaagagaatttatttcttctaacattccatgtttctagaaaataaatcagcatgtaaaaaatcttttttgtatctctatgctggtgatttaaacctgtacagactgcagtaagttactcccaaaataggtaacacttactgagtatgtacgttgttttaagtgctttgcttcatcatttaattatcgtagaaatcctataaaacaaagattataagcagcatcattttacataaagaaactgaggctgatagattatgactaacttgcccaagatcttacaactagtaagtggcattcctagaatacaaaatgcagatctacctggctccaaaatctgagcttttccacctcatgtgcttcacagttatgagcttaacacaactggtgttaggtggtgtccataaaaatttcttcctaccaagctccaccttayggtaaattacatcctatcagaytctgttatagtttgatgggttgtatctaaagctttgccctagatttaccgataagtctggaacaaaaattagtattagtcacttcttgaaatgtcttgggctgaaataaattttggatgaattagagtggcakagtgacagcatagtgacaggcccttctggcgctcaatcaattaaagaaccaaaattgcccataattctgataatctcactttttctatctgtatgtactcagattttaaagtctgtgtgatgttgtaaagtgctttatgaaggcattcctaacatttttttaaagcacacaaacaaaatagaaaaagtcaaggaaattctgacatattgtcacttagtctctgggaaacatgaattagtagctaaagcacttttttattcttaacttttataggcttccatgaataatgaaactggagactgaagtacaaaatggatcttaaaatcatgatgttaatataaaataaatcatgagatctacttgacatcatttataaactgtttataaccaaagaaatatagccaacttattaaacttctagataaactgaaatttttaaaattaaaattaaaatttacctataaaatacatattagaattttaccttaaaagattatatgctttctcattttaatattaatagttataatgattatacaggattattaatagttattagttacaccaattactaaaacagctatgtatggttttctattaatgccaaagcaaattaccaccaacttagtgtcttaaaacaacccaaatctgtcattttgcatttctgaaggtcagacatccaacatgggtcttactgagctaagttcaagatgtccacagggctgtgttcctttctggaggctctaggggagaacccatcaccttgctttttccatcttctagattccgcacacattccttggctcatattcccttccttcatcattaaagccagaaatactctctgtgccttatttcatggccacatctctctcaaactggaaaaggttctctgcttttaaggatccgtatggcccacctggataatccagaataatctccccatatcaaagtccttaacttaatcacatctgcaaaatctcttttgccatgtaatgttcacattcacaggttccagggattaggacatggatttcttggcgggggaggtaaaggagatattattctgtgtaccacaagctatgctcttcaggtaatcatgctacaattcttacaacgactcaactcccgcaagaaactctgctactctactactgttttcctcactgggaaatgaaatcttgatggcatatacatgctcaaacaattactctagatctctgagtcaacagtagttaactagggaaaattaaattattgtgctgttaaacgcttcatatcccttacacacaggaggttaaacatgggggagcaagtaactcttccttcacttagatgtcttaagaaatgtacctcaccaaagattgcttggttggagcagatgtgtgactatcatcaattcattactttaggagtttctaatatcatgtttctagaagtgcatcaattatgagactagagactgttttgaaagccagttgattaggactaccacatagtcacctaagcacagtttaccattttcattgttaccatttcattatacttttatttttctattttgttctctttgatttatgtttctgcatccacctcagtttcagtgcccttattgtattggcctttccccctttggaatttctattctaactaccccaacctaaaaacaacaatggtgttttatctgttcatcccttctgtctttatctcccctgctttgatatcctggtgcctggtgcagtaatgtacctttttccccccttcatacatagatctttattttatgtaacttcttgtctctattttcttctctgactatataaactgagtagaatcagatttctgggaaagaaaaatattgcgtgtagaaattagaccaacttgttgaggcactgaacaaagatctatcctcaaaaataataataataagttcttcactattcttttggattaaaatatatattttatatataacatattatatattatatatattatataatatattttatatattatatatattatatattatattttatatattatatattatatattatattatatatattatacataatatattatatatattatatattatatatattatatattatatatattatatatattatatataatatatattatatattatatattatatattatatattatatgttatatattatatgttatatattatatgttatatattatatgttatatgttatatattatatataatatgttatatgttatatattatatataatatgttatatgttatatatacattatatatatgttatatgttatatatacattatatatgttatatattatatatacattatatataatatgttatatattatatatacattatatataatgttatatattatatatacattatatataatgtatatattatatatacattatatataatatgttatatattatatatacattatatatatgttatatattatatatacattatatataatatgttatatattatatatacattatatataatatgttatatattttatatatatatatagtgctagaacaacatataacagagtcatttttatctaagaatcctaagagacaaagtagttgagttcacagagaaagacaacttacttgatattcttgaataaatgaattcaagtggttttgacaataaaatgaagattagagttgctgccaatggggtaatgaatagttatatcctgccaaactcagatttctgatatgctgaaaaatacttctaggaaattttgtataacatttaacaaaaattatttgacaatattttcaggaaaaagacattataatgaaaacccattttaactctagtgtgattgctttaaaaaagtaagttaggttaatattcaaaggatctcgacataatttgctaatctgctctagaaatgcaataagtatttaaaggaagtaaagggagaaaatactttcccagtctatgtcatttcttatgtgatacagggacactgtcattgctctaactgaggggcaaatgaacaatggaaaactaaagacacatttttccttcttgctaggactgtcctgctagaagcatatctccaatagcattgtcatttgcactttgcaagaactaattagtactcagtcaccattctcaaagaagacacagctgctcattgtattcaaaaaagttatgtttacctaagtggaatctatctttaaggatgccagtggcaagaggctgttcatcaaacttcagaatagttcagagcctctgaagaggcctaggagggcctatgttcactgctccgtacttagaaattgacacaatgtcagtgtggagggtgggggtgatgggaggaagagcatcaggacaaatagctaatgcatgctgggcttaaaacctaggtgacggattgataggtgcagcaaaccaccacggcacatgtatacctatataacaaacctgcacgttctacacatgtatcctggaacttaaaataagtaaataaataaataaaaagaaaaaagaaaaaaaagaaaagaaattgacacaatttcagtgcaacatcctcaaaagcaaggaaagtctatgagagtaattaattatctttgttttcaagccatcagcagacttcagattgtttctctattgtaattgaatgtctctaaggagcaaagttattacttaattaaaactaatccttctggtcacttacatatgacatagtcaacagcttatacttgatctcyttttttttttttttttttttttgaggcagagtctcaccatgttgcccaggctgaacttgaactcccgggctcaagctcagccttccaagtagttaaaaccacaggcccatgccagcacacccaagtatacctgtacttttattattgatgaacctaaaacacagatattactgggcaccagtgatgaatctactgttaacttgtaaatgaacagaaagcaaagtcctactgtattttttttaaagaaatggttcaagaattcgtcactagtttcttcttaatcattcttttactctgtgatgttcagatgcatttaatcacttatcaatacaagacaattttcatgagtttccaaaccacggaaaagccaagaaacatcactttaaatgtttgcttaaaaatgcagattccccaattccacactcaaagatttttgtcttggtagatcagggggaagtgaggggcccagatcacctagatgattctaatgcaggtagtagaaatgcacatttggggaaacataggtttaaatagactacatttgatattattgtaaaatatgaagacctgggtcctattattttttcctgtagaaagtatcttaaaatcatgttgtataaaaatatttaattttacatatataagcaaatatataatggaaagaggtcacaatagaattaatagttttgtgactgagtttaatctgatgctggaagagttcttacatttagttattttgaaccatgtaccaagacagtgtgataatattttggcaaatatgtgtacatgtgaaaactgcctawggagatcaatatagtggattttacatgaagggacagaaacagaagattgaagaaagtaattccaataagtggatgacttgttagtattgcctagtaagaggacactggataattttgacaaagtaatgaaaggtacattgcttctgtgatctttcaggaacctgtgcatcagatcagtcagaagaaagattccagcagagaaggttatgatcaggaggtgtaagagttaggatagagaaatgggaattgttttcctaaaggggaaggaacagagagagagagaggttaattatacttcaggtttaattgaatgtgcttctaatgaaatagcaaataaattacaaaagagatctgaggttgaattatataggtgggatagagtaccccattaggtgatttttttaaatgttagcaagagaagtaattttgaatgaagaaattttaccttgggaagctttaaacattcgcctttgagaaactacaattagagtgagccctgtttggggtttttttgtctaaatgtccaaaatgaaaataaatttttattattttaaatatataaacaatccacgcactttgtaatgaaaataattaatatagaaaactacaaagaagaaagcaaaaagcaattctctcctcagtctctctacacgctggatttagtcaatctttaatgtttgcaaatctaataggtaaaattttttatttcattcattttttaattcttatttgtatttgtaagaaagagttaatatggtcacttatgtttattgtccatttgtattccccttttgagaattgtttcttgtcaatcgttttccattggagtgtttgtttttgaccaatcagttattatttttcctcttatttcacactccataaatggaacagcatgttcctttgttatttaacctttatgtatttatattcccaggaagttttaattattacaaattaagtttaaaargttttattaatatcatagagggggaaggctgatacaacctctttcaaaagataccaggttgtagcacctggtacagtgttcctgcagtgagcaacttattgaaatgtgtactctcagagctcatttctcccctgcaaagatggcaatgaaataagaatgcagcaaacctatgagtgtgaaagcactttacaaatcataaatctttatctctgggtttgtttcttttcctgggattagacaattagatttaatcattgctaaggtctcgaccagttctaactctgtgaaattctttaaaacattactaaggaaagcccagcaccaattgacttgagcagagtaattatatggtgaaatagggtgaacagaacactgcttctgagaattaggattcccatccttcctccacatggtatgctttacataacagccccagtgaatgcatgtgtgagaaggctggttggcctccctgacttctggtgaggcagagaattccaagactctctggtttccctgaataacattatccatctgttatataacttgtttaaaatattctgtaggtattcatatgattactccctacagtctattattttgatacagtccataagcttacttttaatttgaaacaaatttcccagcctgtggttcttatcaaatccgtcatctatgtgttcaaccctcaattctgtagacctcaaccattcttttttttttttttgtacactttaagttctagggtacatgtgcacaatgtgcaggtttgttacatatgtatacatgtgccatgatgctgtgctgcacccattaacttgtcatttacattaggtatatctcctaatgctatccctccccactccccccacctcatgacaggccccagtgtgtgatgttcccctccctgtgtccaagtgttctcattgttcaattcccacctatgactgagaacataaggtgtttggttttttgtccttgcgatagcttgctgagaatgatggtttccagcttcatccatgtccctacaaaggacatgaacttgttttttgtccttgcgatagtttgctgagaatgatggtttccagcttcatccatgtccctagaaaggacatgaacttatccttttttatggctgcatagtattccatggtgtatatgtgccacattttcttaatccagtctatcattgatggacatttgggttggttccaagtctttctattgtgaatattgccacaataaacatacgtgtgcatgtgtctttatagcagcatgatttataatcgttgacctcaaccattcttaccttgactttcatattttcttataacttttatttcagcttcaagggtacatrtgcaagtttgttatatggtatagtgcatgtcacaggggtttggtgtacagattatttcaccactcaggaaataagcataatacccaatagttagttttttgatcctcaccctcctcctaccctccaccctcaagtaggtgctgttgtctattgccttcttctttgctttcatatgtactcattgtttagctcccattaataagtgagaacatgcagtatttggctttctcttcctgcattagtttgcctaggataatggcctccagctccatccattggggtgttctacaaaggacatgacctagttctttttcatggctgcatgatattccatggcatatatttacattttcttcatccagtctactacttatgggaatctaggttgattccatgtctttactattgtgaatagtgctgccatgaacatgcacatgcatgtgtctttaaggtagaacaatttatattcctttgagtatatatccaataatacggttgcaatggtagttctattttaagttatttgagaaattgccaaactgctttccacagtggctgaactaattcacattcccactagcactgtatgtcatcttttcaacctcaccagcatcttttatttgttgactttttaagaatagccattctgactggtgtaagacggtatctcattgtggtttttatttgcatttctctaatgattagggatgttgaacattttttatatgaagatcagatggttgtaagtgtgaggctttatttctgggtgctctaacctgttccattggtttatatgtctgttttagtaccaataccatgctgtttgggttgctatagccttttagtattgtttgaagtcaggtaatgtgatacctccagctttgttctttttgcttaggattgctttggctattcaggcacttttttttgtttcatatgatttttagagttttttttctaattctgtgaagaatgtcattgatagtttgatagaaatagcactgaatctgtaaattgctttgggcaatatggcmattttaacaatattgattcttcctattcatgagcacggaatgctattcctttctttgtgttgtttttggtttctttcaacagtgttgtacaactctccttgtagaaatctttgacctccctagttagctgtactcctaggtattttggtttgtgaatggctattgtgaatgggattgtgttcttgatttggcactcagctttgatgttgttggtgtacagaaatgctacttatttttgtacattgactttgtatcttgaaactttgctgaagttgttcattagatctaggagtttttaggcagatactgggtttttctgtatataaaattatatcatctgcaaacagaaatagtttgactttctctcttcgtatttggatgccttttgtttctttatcttgcctgatttctctggataggatttccagagaatatgttgaataggagtagtgacagtgggcatccttgttttgttccagttgtcaaagggtacgcttccagcttttgcctgttcagtatgatattggctgtgggtttgtcatagatatcccttattattctgaggtatgttccttcaatgcctagtctgttgacggtttttaacatgaaggaagttgaattttatcgaaagcttttctgcattaattgagataatcatgtggtttttgtttttaattctgtttatgtgataaaacacatttattgatttacatatattgaaccaaccttacatcccagggataaaacccacttgattgtgatggattagctttttgatgtgctgctgtatttgatttgctaatattttgttgaggatttttgcttctgtgttcatcctggatattggccttaagttttcttttttactgtatctctgccaggttttggtatcagaatgatgctgrtctcataagataagttaaggaggagtccctcctcaattttttggaatggtttcagtaggaatggtaccagttcttctttctatgtctggtagaattcagctgtgaatccatctggtcctgggcttttcctggttggtaggctttttattactgattcaatttcagaactcattattggtctgttcggggtttcaatttcttcctggttgaattttgggtagttgcatgtttccagacatttgtccatttcttgtaggtattctagtttttgtggatagaggtgttcataatagcctctgagggttttttgtatttctgtggagtcagtagtattatccactttgtgatttctgattctgcttattcggatcttctctctttttctctttatttgtctagttagctattgatcttatttattttttcaaaaaactaacttctggttttgttgatctcttacatgcttttttatgtctcaattttattcagttcattttttcacatctcagtttcattaattaagttccaatattggttatttcttgtcttctgctacttttgcagttggtttgctattgtttttccagttcatctaggtgtgatgttacatttaagatatttctaactttttatgtgatgttacatttaagatatttctaactttttatgtgagcatttagtgctaaaaactttcctcttaacattgctttagctatatcccagagattctggtaggttgtatctttgttctcattattttcaaatagtttcctaatttctgacttaatttcattgtttacaagaagtcattcaggagtaggttgcttaattttcatgtaattgtatggttttgaatgatcttcttagtattgatttctatttttattgccctgtgatctgacagtttggttggtatgatttcagtttttttaaatctgctgagaattgttttatggccaattgcatggttgattttagactatatgccatgtgcaaatgtgaaacatgatgttctgttggttttgggtggaaagttctgtagatatctattaggtccatttggtcaagtgtcaagcttaggtaccgaatatctttgttagttttctgcctcaatgaagtctcccattattactatgtggttatctagatccctccatagatctctaagaactcattttgtgaatctgggtgctctactgttagatgcaaatatatttaggatagttaactcctgttgaattgaaccttttatcattatgtaatgcccttctttgtcatttttgatcattgttggtttaaaggctgttttgtctgaaagaaggataacaactcctgcttttcttgttttctgtttgcttcacagatctttctccatcccttactttgaggctatgggtgtcactgcatgtgagatgtgtccttgaagactgcatacagttgggtcttgcttctttatccaacttgccattctgtgccttttaattggggaatttagcccatttatattcaaggttaatactgatatgtacaaatttgatcctctcattgtgtttttggtgggatattatgcatacatgattgtgtagttgctatatagtatatttacatctgtttttgtggtggccagcaaaagactttcatttccatatttagcactcctttaaggacttctttttttattattatactttaagttctagggtacatgtacaccacgtgcaggttasttacatatctatacctgtgccatgttggtttgctgcacccattaactcatcatttacattaggtatttctcttaatgctatcccttccccatccccccaccccatgacagaccctgatgtgtgatgttccccgccctgtgtccaagtgttctcattgttcaattcctacctatgagtgagaacatgcggtgtttggttttctgtccttgcgatggtttgctcagaatgatggtttccagcttcatccacgtcactacaaaggacatgaactcattattttttatggcatagtattccatggtgtatatgtgccacaatttcttaatccagtctatcattgttggacatttgggttggttccatgtctttgctattgtgaatagtgccacagtaaacatacatgtgcagtgtctttatagtagcatgatttataatcctttgggtatatacccagtaatgggatggctgggtcaaatgatatttctagttctagatccttgaggaatcaccacactgtcttccacaatggttgaactagtttacactcccaccaacagtgtaaaagtgttcttatttctccacatcctctccagcacctgttgtttcctgactttttaatgattgcccttctaagtggtgtgagatggtatctcattgtggttttgatttgcatttctctgatgactagtgatgatgagcattttttcatgtgtctgttggttgcataaacgtcttcttttgaaaagtgtctgttcatgtcctttgcccactttttgatggggctgtttgtttttcttgtaaatttgtttaagttctttgtagattctggatattagccctttgtcagatgggtagattgcaaaaatttcctcccattctgtaggttgcctgttcactctgatggtagtttcttttgctgtgcagaagctctttagtttaattagatcccatttgtctattttggcttttgttgccattgctttttgtgttttagtcatgaagttaaggacttcttttaaggcaggtctggtggtaacaaattcccttagtatttgtttgtttgcaagggatcttatttctcttttgcttatgatgcttagtttggctggatatgagttattggttggattttcttttctttaagaatactgaaatgggcccccaatcttttctggcttggagggtttcttctgaaaggtctgctgttagcctgataggtttccctttgtgggtgacctgctccttctctctagctgcctttaatgttttttctttcatgtcaactttggagaatatgatgactatgtgtcttgggaaaggtcatcttgtatagtatctcacaggggttctctgaattccctgaattttaatgttggcctttctcacaagtttggggaaacttttgtggatgatatcctcaaatatgatttctaagttgctcattttctctctgtttcaggaatgccagcgagtcatagatgtggtctctttacataatcccatatttctcagaggttttgttcattatttttattatttttcctgtaattttatctgactgagttaattaggaaaaccagtctttgagctttgagattctcttcacagattggtctattctgctgttaatactttcaactatattatgaaattcttgcagcgagtttttcagctctatcagatcagtttggttctttcttaaaayggctgttttatcttttggatcctgtattgttttgttgtattccttagagtttttggattcagtttctactttcttttgaatctcaatgatcttcattcctatccatattctgaattctacgcctgttatttcagctatttcagcctggttaagaaccatttcyggaaaactacttcagtcgttttgaggtaagagggcactggttttttgagttatcagagtttgtgcactcgttctttctcatctgtgtgagctgatgatcatttagtctttgatgttgctgatggggtttttgcttttatcttctttgatactctttgaggtttgattgtggtataaggttggttcaattgactggcttcaattctgaaagatttcagggggccaaggctcagttcagcactcttgggctacatgctctaactctgaggaactggtacagggcccttggctttgttatctggcctcttgaggtaaggaacctgctgcgcaggaagggccaatgtgttcttagtccactggccacactctgatgggggggtgccagccaaagtgcttcactggggcaatggcaacaggatccatactcattcacatgtgccaacagctgcattggtgcattggggtgcacatgcgtcagttggggtggggtgccagcaaaaacctctgccttcgttttcacagatagaacatactggcaaaatattttggtgttgtattttgggctgtggtccagtagatggcgcttaagagtgttagcagatagactcttggcggcatggctctttgtgctctgtggtagcaggggagagagatgacaccctcacctaatctgctcctgggtcttggaagagccccctccaatcactggctttatgcctgcatttcttttcttgggtgttctggtccagagaggtccctcaggcagggaccacgtttggcagacaggtaatatmcttgcccagctggcccttcggagggaggtacaccccatgcctccactggcctgtggcatctcatctctctcagtgatccaagagtgagggctccttcctgcttgggcaccacccaagccagcaagtctcacttggcgatgagcagcaggagtgggtggagcccacctaatctgctatccaagtacttcctggggaacatgggattgtgcttgcctgccgagttcaggtagaagcagtctgctgggctgtaagctctagcaggcatggcccacctggctaccagtggcaggagtgagtggggttgcccgcccttctgtccaggtgattttcaggacaacagaagatcactccccttggactcaagagttgcccctgtaaaacttctgggtggctctgtgcctcagtttagaagtgtgggggatggagcgggcatggaggagagccaggggattttttcattcccagtcttgcacaggaccccacggggctctcactcacttgccttttcccattttggagaggttcttctggcctctgcactcagcccagacaggctggtgcccagcttcactcctctctgctctctatgtctccctgctgccttgatggatcccaatgtggttttttaggtgatcagcttgtagggtcagtgttcactagtcagtgaaaatgacacacgtgaactgcttctagtctgccatrctgacccaaactccccaacttccacatttttatagactgaaaggcttctcatcatttcatctttctgattatttacattttctagccagttgcataggtgaatataatattcctgctgaaaatagcttgagagttaagatcagtggccgggcacggtggctcacacctgtaatctcagcactttggaaggccgaggtgggtggatcacgagggtcaggagctcgagaccagcctggccaacatggtgaaaccctgtctctactaaatacaaaaattagttgggcgtggtggcggatgcctgtaatcccagctactcaggaagctgaagcaggagaatcgtttgaacctgagaggcrggggttgcagtgagccaagactgcaccattgcactccagcctggccaacagagccagactctgaaaaaaaaaaaaaaaatcagtgtgggtccaaatctcaagtctgcccctttccatttaagtaaccctaggcaagtgtttaacccacttcaccatcagtttccatatctttaaaataagaatcacacttacttcatagcatgaaagtgagaatgacactctatgtcaaatgcctaatacaagttggccctcaatatttacactattttttttactgtgaacataacatgtactgggagaatatatttgagcagcattttggaaggaatactaaaatgagtaaaattaattcttataaatgcttcagaagtataaagtcagctacaagaaaactagaccatttttggccattcactcaaaaaatattaattggtgtctactatgtgccaggcattgttctaggagctggtggtgtagtggtagccaaaatgaacaagtctgctggttacatatatcttacctctaatgagaggaaaaagacaagaaacacataagaacctgagcaaataaaataatcttataggaataagagagctacgaagaaaatgaaacagggtcagtgggatgcagagtggtggaatatgccagggaggttcagcacaaggggaatgctgatttagagaagctgaaagggaaatcttctctggtataacatgtgagctgagacatgaaagaggagaatagcctacaataaacacaaatacataaggtaagagagttctatgcaaaagaaacaggccctattatgaaacaagcctggtgtaatcgagagagagaagaaaggtcagtgtgcgtggagcacagtgaatgtgagggagcccaggatgagaggaattcagaaaaacagacaggaaccagattatgtggggtctggtgggccatggagaggaatttggattctattctgatttcagggagcagccattggatatctttggcaagggaataataaggtctgatttaggttttcttaaaattatactggctgtcgtatggagaatggactgtagaaaaataatggaaggtgagagtccaggcaggtggctactgaattagacccaacaagtgatagcggtggtaataaagatggtgagaagttaacgggcttgagacatattgaaaatgtagctaaaggaacttgctcatagatggtatgtgggaagcactaggaaagaatagaatcaaggatacctcctaggattttggcctgacagcagtgtgttcctccagttggggagccctagagaagagactgtactgcagtagttgtgagacatgcactgtggacaaacactaagtttgcatcccctcttcatcacctgatcctctgtatcaattttctttttggtaaaattagaatcatatagcagcacttattactcagatgtgccttacggattaaattaataaacacgtgtaaagtacttaaaacagtacctggtgttagttattattaacgggatggggagggtgggagcaagaattctcttctacagttgctacatctatggtgccttttagatgtccaagtagagatgtgcaggcaatagggtattcgagtctagagttcagagagatgttgggaggaaagatataaatcaggaactcaatagcataytgatagtatttaaattcctgccactggataaaatcatctgggaaaagacagtagagaagagagtaaaagaggatcatccctggggtatgtcaccatgaaggtcatggccacatatacttagatttcacagaaatgatttgagagtctaaatgaattctttatttcactctttatttttagggaacatcctattcctaaattaattcacgaaagtctcatttgaagttctggatcacaaactgccctccattttacatttcacccatatgttctcccatcagattataggtccctcatggtgatgttatgtgccatatttttttaatgtccttcactcttcctagcacagagtaatacacataggctccctcaataaatgtctgctggaataattatttaaagaaattatgatgaataatctgtgttttccatggcaccatatgaaggactagctactgaggacatgaattattttgctctaaggaagaagataaactgaactcattttattagggagaaaatgtgaaccctgtggaaaaccaaagatgaatctaggcttataaataaacttatcttcctaaaacctgtctttttctactgcacaaggaaggggtgtaaagtgaaaagataatgaggctttagacttaggcaaacttgcgctcaaatctcccatctatataagttgtgaagccagaacaatttacttatgcatgtgaatccatctcatctttaaaataggaatgataataatacctacctcatggagtttgaaaaggtctaaatgagttttgtgatgtgaacagggtcaggtgatgcatgcacatgcaatgtgtggcattatagaagaagaaccctaaagttcgagaacccatatcttttatggcataaattggatactcayatattagtttccttatctctcctaaaaaatacactatatttttatgcaaggtttttgcacttatgaattcattatgctcaggacatagctcacaattatgtgcatataaaactcagtttattttttaaatgatgcatacaatgcaagtgattgtgtgtgtgtgcgagagagagatctgttgatacaaaagtacattgcagtataaaaaatgtacttagttttacatacataaatttacttctttcttaatgaaaatatgtgtgacaagatccttcatatgtaacaggagggatttcttacactgtagtaatttgctgcttttaaacagacttagcagcatccagaggcaaaggctgttatggkctcattatttcctgccccccagaggatgaactgtgctaattaagtacatttaaagggaaaaaatgcctctttgctgtgtccccattatgctactgtctctttacttcctgatgcttgttacaatttattagctgtgaattatacctgccagtaaattaacccttctttctccactcaatttgtcagataaaaaagttgcataaagttaaaagccagccagttggmttcctgagaatatagatatggaacaatttcctgcagcattgagcctcagaagaatttaacagctttggtgaatctagtaccaatgctcattttcaagccaggagcaaacacataaatcatgttcagcacaatgtacctgcctttagaaagctgtttacagccatgtatatttattagttttccatgatttcaagcagtatgttttctttaccctctccttttccttgcaagcacacacacaaattcctatcacaaagtctctctggtacgtcacaaaacacagcctttgggggtgattatttttcccgagtatttttacatcctcgtgccaatgcttcagatagtaccctaaattaactgtatcttttgctgtccrtggatacttacaagtttccttttgccacttgtcaagagcagtgaagagtcttgagatttcacttgcaaactaacaagtcaccctgacatagtttcatggttgctggcagaaggtgcaacactcttagatcaaagagaaaaggactttattackcacagcattagcgttagccagagtagcagcatgtactccaagttctaattcctacagggtgatgtgaagagtgccagatgatacctgcacatacagtgggttgcattataggagatgaactctaagcttagggaaaccaaatattttataatggacagtaagcctgagtgacctttgccacagaagtaaatattgtctttttatgctgcaaaataaacaaaattgttctttactacaaagaaagacactatctctatcttccaaggctgtttttacagatgtcctcaaaacaacagtacagagcaaaggcactaagtgtctctgcccacaagatatgcataaatgtaagagtactgtattagtctgtcctcgcattgctatgaagaactacctcagactgggtagtttataaagaaaagaggcttaattgactcaccgttccatgggctgtacaggaagcatggctggggaggcctcagggagcttctaattatggcagaaggcaaaggggaagtaggcacatcttacatggccagagaaggagtaagagagaggtaagggagaggtgctacagttttaaacaactagatctcatgagaactcacccacaatcaccagaacagcaagcaggaaatcaaccccacatgattcagtcacctcccaccaggaccttcctccaacactgggaattataatttgacatgagatttgggcggggacacaaatccaaaccatatcaagtaccatgaattattttaaaacaccactgatgctttttcttcatgaatgtgtattacaatttaatagtgttttcaatacatgagtttttacagttaatatggacttagtaacttgaatacataatcccaaaatcaagtcttcttgcaaagaataccmtaaaatcctttcttaaactaaatggaaattcaatttttagtaaatgtacttaatcgatgtgtaactcaatttcctcaccagtataatgaaataaatataatacttaattcgatttattattgagtagattaaatgagatagtccatgtagaatgcttaacacagagcctggtattcattaagtgttcatttctccataaatgttaattttaattagaattaattgtcagtaccctttgatgagaggtacttaaaatacccccttcactaaaccaccaccattgagcccacttccaaatgtaccttgggagtgctggtttgccttttgttggtatagaggcattcatcaggaaagggtagagatacaagaaagtaatattcttgaagacttattatgtgtttttagttgactatgtgacctagtgctttcatgtattatttcattccttcttaacagcattctcataaagaatgcattattttttagatgagtggaccgagattcagacattactgaaggtcacaccatttgtaatggaaaagcaggagtcaaaccctgtctcactctagtctgactctgtgcctttacaatttttaaccattcagtcttattttcctgaacaatctttctatcttttgggactaactatgcctttgtgacagaaaatcctctctactctgtagactccattgccaatgagaacaataggttcacagtggaaagagagattatgcctccacctgtattcttctaaaaatgatatccatctcttcatttttgaccttttttgaggaaatgacaagatgtaattcagaggatacaaagtagtagatatgtagcatgaacaagtctaaagatctgatgtaccacatgagaactacagctaataaaattgtactgtatttcggattcctgctaaatgagtaggttttagctactcttgctataaaaacaaaaaaaaaataggtaactatgtgagatgatggatatgttatttgcttcactatagtaatcattttactatctatatgtatcccataacatcattttgtttatcttaattatacatgataaaattgatttttaaaaaaatagtatccacgatgtgttaggcccaagcaacttatggcccaaatgcccctttttgtaccaaagcctatttctggatccataggctcagtcaacatgtttttctcactctttttgaaagtacctgattcctagtttagtgtttctgaaatctctctcaggaactttaatgacagtgtgacatctttgagaaatgcaagcatgacctctgttctgtcatatgttggttttacaagggacattacattaaacagaaaatatgaagtgataataagcctgcaataataacaaaatcctcattcaggaaagtgaaagaacttgtgttttacttttagagatagactcttactattacactaacacaaacaaataaaggttaaaaacatgcctttttaacttagttccataggaattttgtttcttaccaactctgcacgaaagccaattaaacattatttaaaaacaactggaatgggccaagcgcggtggctcacgcctgtaatcccagcactttgggaggccgaggtgggtggatcatgaggtcacgagatcgagaccatcctggctaacatggtgaaaccccgtctctactaaaaatacaaaaacaaaattagcygggcatggtggcaggcacctgtagtcccaggtactccggaggctgaggcagggaattgcttgaacccaggaggcagaggttgcagtgagctgagatcacgctattgcactccagcctgggcgacagagcgagactccgtaaaaacaacaacaacaacaacaacaactggaatgaaaaccaatatagggaaataatcttaacattagaatcaagtatgcggaattaagttttgtatctcctaaaatctttattgacagtagcagaccatatcaaaagtcttctgaaatgcttctagcgctctcaaaaatgctccacatcaagaaacttttaaaataaaataaaataaatgcctagtggaagagttcagacaacagtcccaaaactgcctgaagacattcagaattcctctataatctttatacagatattaagagaaaaaaagtactaatagaaattgttctggtttgtaattgcaagtataatcacacagttcctgaaaataatagattgatgttataatattgggcaagccaatcaatgaacacaatatgcagaatgataagtggtgaaaaaaatgctgcaaccttttgttgataacactgctgaatccaaactccaacccttgttcaagttgaacactctcgtttcattgttgggtaacaacaatgaatattgttgggtaacaattttatatatgcttctctttgggttaggtagtggcttgttgttgttatttgttttttgcttgctttgccctctttaaaatttttagaggaaaaaaacataacagatacataacatggtctcatgagaaaaccagaacacaaagccatgaaatgaagaatttcattctgtcaacctgtttagctttccctgggagttcaatcatcgtatgggcttttatgtgttccgctgagcatttactgagaacatcagccattatgggctgctgcctagctacatggtcatgtcgttacttcgcatttatctggaatcctctattctctcaacagacatttttattctgttccatatgactaccattgtgagaaagctttgttattttacttgaatgaggcagtgagtaggtctttattttttcaggaacatactcctcccctgtagctgtacctgaaaattaggtgactttctcatagctttttcaaacccataaatcttctgtccctttcacgcaatgtacttacttatatttcaattttagcatcttgcaatcaagtctgattcctagaccttgtttaaactttgggctgtttttaatttatgaatcgttttggaaatttttctttgcattgagttataaaatgtagactaaaactctagcaatgtagtaaaatcttttcaaagtttgtctttcatttattgatctgatccagatcctcttgtgtgcatcaccctagaaaccttcaatttaatccattttttttcagtacccctaacatcttaaaacttagtcattcagacaccacccacccgccctctgacaccttcttcctgattgaaagaggcatttatgtatatgagtcacctcctgccagcttcacaggaattacataaaagcaatctgccaaccatcttggcctaaggacaaaaaatcacatttagtgtcaaagtaaaagtcattcttgcttgttggaaaatcacaatagagcactttaggaccttaactcgcaggacatcaggccttaatctacagtctatactacaaatgagggaactcataaatgctatgctttcatcggtttgggtaagcttcttggcctaataatcctaaaaccattttaaatgctttttgtagttgaaaatgaaaggctaattcatattcaggaaagattatacatatattaaggggagaatgtggactaagaaataaacataatattagcaaaacacattatctttccatgctaatacaaaaatattcatgcagaaagttatttaaaaagcaccgcttatggcaggaaaggtggttttatggtctaagaaaaatgaattgaaagatttgcctagataaattgttataactagaaatattggtcaggatatttttagtttttttttgtttctagacaagacagcttagaccatatggaaatatgggtttaaatcttccatttaacctcttatttactgtgtgggtttaaggaaatctcttaacatgtctgagctttggtttccttaaatgtaaagtggtgaaatcgtgcatgccttctctctcttgagttgttttaaagatcacatagatgatatgtaaaaggacaatgtaacttttatgtttgtgtaattgcttataattctcaaaaagcttttacatatcawctcatttgagttggctactgtttttgcaagatcactacgaaggcagggaaagtcttaactctttctagctgataaaaagaatcctggaagatcccctgtattccatatcctttcccttcccatcagcacttccacctatacattcacagattcagggaacctgaaaggaagtcccattgtgtttctcagacacacatttctctcagctgtgaatatctctaatcagttccagattatcctaggaatttgagcctggcacaaatcatcactgtctactagaattgaaattttggctgccaacctagagcttctcccatgtccatacttgacatgtatgattgggcagggggagagaggatgagaatgtgtgtctctaaaatgcatcataagtcaaaccttgcatacaaggttttctctctctgttacaaaggacagcacacagaaaattaaagtacacacttaaggccagtacagacttatgacacttctcccaaggagagacagttccaagctcagaagtctagattttagtgcatgggaggttgaccttaccagttcttgaatgggataggtttctccatgtagaagctgtggaatgtagttagattcaattggagactatctctcataacaaggaaactcaccatatgagggatgttagaggagagttataacgttgtatcatttttttctttctttggtttcaatttccacctttattcagatgaagctgaaaataagtggaacagytggcaataaaaccttagccactaacttgaattttttgtgaaatgccagtcaagtaacaggaatgacagacatgtaagtaagccccagtagtatccatttttaaaaatatgtactgtgaataaaaataatagcaattagagaactttaaatcatattttaaaggataccgtcttaaaataatcactattcagaatttgatgaaagtaaaattttagggttatcttcagttactcatgttcaaataattttctgtgactaaaactttggtcaaaatagaaaatgtgttttttcctaggatgatctaaaggtatttattgtggatggaaagaattacagaatacaaataatatgaaactcaaaattacatcaaccaaatgcactttgttttctcagctgactcaaaataatgagtagccaaggtaatatcggctgcacattataccttctcacagtaccaggatacctgaagaaacaacacttcactcctagtctagtcagcacctttgcaatttttcttggaatgacgttagctkttacataacccatagtagcaagcttgtgaaacaaagaaaccgcaatttagttcggggtaactctaaaatgtttgtgttcaaattaccaataagactcgttttcatgaagggtctttctaaaatacactttctaagccagtgtgcgtattttcatccatattttcaaacagaaaaattaagaacaagacggatagtaactttcttgacagttatgccttggttgagaagtttaggtattaactcacagcttccatgtctagaccgttgctggctctctgatagttaattgcctctattatgatattatcattagagtccccttaagatagacaaaagaaaattgtaggtttctaggtctactcaattaaagcaattgagtttcatagtttcaggaaatgaccaatttaactcctatctggaatttgtgatattggaaacatttgtggaaaaggaacacattctaaagtattttgaaagtttcttaaccagtttttctctaaatcattgttctatagtaaacacagacatggataaaatgaattcctaaagatataaatttggaattttaaattaagatataatttatttggtaacaaaataagtggatttttaaatcctctcttccttagtaatagaacatctattatgttctccatggtatgcagacagtaatgtagaacttaaggggtttatatagttacctagacaattttatcatttactacatttttttgaagttatctttgtaaagaaaaaaaactttttccattaaggaatacatgttatcctggacttctggtgtcactaaaaggtcattgatttacatctgaactgggtcactgaaagcaaacgactatgtggtggcctaaataggtaaaatcgtggcatctttcccagtttaagagtcatctgaccaattataactcaaaatttaaatcaaacctacaagttattattagaagaaatactgagattggtctgaggctacaacataaacaaatgtgatctcagatattggttaattatttcaaagactaaaacattgaagtttatgttttatgcttcacctgtgtatatttgaatgccccacaccaattatacataagatctggagtgtattcccaacatcttcccaaatgaaagacctatgaaaaagtattttataaaaggtgacatatttagagtgagaagggctttatgtaaggaggaacacattattcatcctgagcagatgaaaagtaagacataaactttgagaacaaggtgaaagcagaggtgataactataaaagaatatcttgtcaaagaagaagcccatgtcaagcttactccatcatggagataaatgtcagccctgcttttgctcaaagagcacacctaagaggaaaagscacaaagggttagagtgccaatagaaaaagaccacctgccacttaccacaaatgaataaaacaaatatatatccatagtccatggggcaaccatagcaaaggaccatctgatcctcacgacattgtcttaaagcattccttacatccccattaggaataagaagccgttaaaaccacctatacctacacctatataactagcacattcctgctgacagagcttggaaggcattgagcagttctgcatttgatcctacttttttcacaaagaggtgaatatcaaatattttaaacagcaarytaaagtttcagagcaaatataatttaaaatttggttctgctttgggaaatctgtttaggaggcatttgtaaacagttgaaaggctcattctaaactggaatggattgccccatcctatcaatgcccctgagatgaatatgaagtcagcaatgggagttttttaattctatgataattggctgggagttctttgacctttaattaaacaaaataygaattaatgaactttctttctatttacagcagaggcttgaaatggtacaagttgggataacaatcaaaacaagatgctattttttcactaacaaataaatacaaaacatgatgctgaaatctgcatactgatattgatctaattatttattttgaacctgtaatttttcatctttcttcactcgaaggaagaaaaaacatcaggaaaaaaaggagctatttcttcttggatatatatgtcacacataagcaattttcaaatgtctcatgagctggtctcagtattaaaagaggcttctttagtctagcagaatttcagacaaaaattctagagcctttataacatagaagagttttatgaaagggtctgattggatgagatgtaaagagataaaatatgtacatagttacaattatattttacaaattaaacaaaaaactttttttcttgttttgcttttttggttttatgccttaactggtgaacatttaaaaatatgctgttagatgagatcgtgccactgccctccagcctaggtgacagagagagactccatctcaaaaaaaaaacaaaaatgctgttagaatatggacacaaagaagagagcagtagatayagataccagatatagatacttgagggtgaagagtgggagtagcgtgaggatgaaaaactacctattgggtaccatgctcattacctggatgatgaaataatttgtaccccatagccccacagcacacaatttacccatgtacaaacctacacatgtatcccctggacctaaaataaaagttggaaaaaaaaatttagggatcattagcagatcattgcaaaatctgctaggattttgcagataaaccataagatccctcgaaaatatttttctttgtagaaaccatgtgagtctatacagcagggtctcaggagtatgagggataggcagtaatatgttcatcctcctgtttagtgagagaagcttccctgcaacagtttgagaaattgagcatggcagtttcgaaggtatcttccagctctaaatccttctttgtgataatcatgagtaatgtgatgcatccttactctgaccccaagcagaggattctctactcaggttctggtggccaaacctctcctgctttcactcactgagggaatggaagagtatttctatgaaggaactcctgggacctctaccctttcctgttacagtagcaatatgtttgtgccccactatcaccaccacatctactgaactagagcccatatagacctaatattagtgcccaaagtattgttgtgtattttttatatttgtattataattgacttcattttataatctctactatattttttctttttcttaatcacttatatgcaatgtctatcatatttattgttatacatacttatgatgactttaaatcctttttatagaattgggatacagcattaaaattttattgtaatgattatgtttccagctatgaggcgttaaatattatgtagtccaaaacttacaactctgtgaggtaggtattttcttatttatttatttatttgtttatttatttatttatttattatattttaagttctagggtacatgtgtacaatgtgcaggtttgtcacatatgtatacatgtgccatgttggtgtgctgcacccattaactcgtcatttacattaggtatatctcctaatgctatccctaaggtaggtattttcattgttttttttttttagaacaaggaaactaagattcgggaaaggcacttgccaaggggaaaagttactcagtgtccttagagctaggattcaagcccaggaaacttccctctaaaaaccatactactaattacctttctcaagaaccttccaattagaatattgtcagaaagtcacaataagttattttggtacttgattaggcatgaaatctttgtcagatagcaggccgtttctgattctgattcctcaagtcagctggccttttctctttccttcttgagtcattatctttttgctttttctactgtcccttcactgaccctccaaacttccagtccaccttctctggaaatatctttccacaattttagttcattttttggccccagaaatgtacctcagcttcaggtctaaactactctaaacttcaggtcagaagcattaattaatttgtttattcattcaataaatatttatgagtgcctactacatagcactgggcaaactgtagtgaagggaacacacatgctccctgttctcatgtttcttatgttcaataggaatagataacactaaacaagtaagtatatagcataacgtatcagacactggcaggtgttgtggagaaaataatgcagggcaaaggaaatagagaagtctgagcctcagaaaatagagaagtgttgttacatttataaggatgtccaggaaaagcctgtctgataaggtaatatttgagcagagacataaaagaaatgtgaatttaaaagtgatgctctgaggaagagacttaggggcagagaaaaagaacagcatgagtaaaggcccagaaacaggaataatcttgtgtttccctaacaatgagaagggctgtgcgctggaactgagtgagaatgaatggattcctaaaattgcttgactcatctataattcattcaagaatggcatttgacttctaagatagccatttttcagaaaatttattttagattatattaattttttatacatatgtttatcgcttcacagaataaaaaaggcttttcccagatattatctccttttctcctcaaaacatgctgtcactggatcatgggtctaatttgatttgattatcccagcaactgacacaagacatgatgcatagtaagcactcaataaatgtatatggaattaattagttgatgtattaattctgyggcacaatttctaatttttcacctttaccatgttcattattattgaacatcagtgatgggactataattcagtgaagcttcagaagctataaagatttatctagccatttgcctgtaccctaacttatatatgtatctaatttttgtgctgatttacactttttctgcctaactcttccattaagttctttaacatctttcttcgcaatcagtttatgtatattcctaacttatcgtatctaatctgctatattcttggaaaccagatcacaggcctgttagacctataygtatgtaaaataaagtgacttttaagtgagagcatgaaaccctttcttaaagaataaatttgccttagttcatttgtactgctacaacaaaatgccacagactgggtaatttataaataatagaaatttagttctgggagctggaaattccaaggtcaaggcaccagcaggttcagtgtctagtaagggttaagtgtctctgcttccaaaatggaaccttgttgctgcatcctccagaggggacaaacactgtattttcacatggcagaagggatgggaagaagcaagcccacttcctcaagcctttttataaggtcattgatcccaatcaygagagctccactgtcatgatttaatcacctcctgaaggcctcacttcttaatactaccacactggcaattaagtttcaacatatgtattgtggggaacacattcagaccatagcaaaattcactaactttactacttgcttcctaacagctgttctgatctcataggcattttgcttattttygcatctgcaatgtaattctagtggattaaagttgttaggcacagtatacaattgtgcctttcccccaacttgcatccaaagaaaattataacgcatttcatcccatcaaacttataatctatggtataatctaaagccacattaagaggttattcatcacaccaaactgatctcatttaccagaagtagccacagcttacaggtttgtctgagcccttctttttcctcactgaagcaagggttcccaaccaatattgattatctacccacttggtgcaacatgattgtaaatgtgccccttgttttggggtacacttaatgtgtcctttccatagaagtcattatctctatttaccctttagttaccctatacaaattttcagtcaaatattattctttcctcttctgactaagaattttttggcattaccagtaattaatttattctttaattctttcagcaagactctattgggagcctactacatgccaagcactgctctgggcactgcagatttagcattgtagaggcagaggttacctttattctgttagctaaatgaatagctctaagggtaagagctaaatagatggctataaataaaggtacaccaatagtaatagcgataaattctatgaaaaaataaagcagagaatccaggtatagcgtgataggctgagcatttatttaaaagagggtggtcacaaaaaatatataagcatgtgaagtgatggacatgttaattagcttaatttcaccatttcacaagtacatttattaaaacatcaccttgtacactataaatacatgcaatttttatttgtcaattataccktaacagagctgggtgaaattttaaaaaaaagaaaaaagagtggtcaaggaaagcctcaccaaagaggttatgtgtaagtggagacctgaaagagtaaggaagtaaaccacatgagtatttggggagagcatatccttaagaggaaacagaaagactaaaaccttgaggtgtgaacaaacttgatatgttctaggagtagcataaaggcaagtatgtctagagcatagtgagtaggaaaggaaatgatacaatataaggcctaaggcaaggaccaagtaatgtaaggatttttgaacatcagttgtcactacttcccaacagttcattgtgtgtttgacttggtgctacttctggacagttttcttaaagtcagtgtaaagagcataggacatgtattgcaaataattttggtagggtaacttgcatgataccatattaataaaattcaggagaaaatatggagacaacagtactcacagttgtacattctgtttttttttttgtggttgttgatgcaggtgaaattcacttatgtaaaattaactattttaaagtaaacaattcagtagcattcagcatattcacagtattgtgccactacaacctctgtctaatccaaaacattttcatcaccccaaaaggaacccatcctcattaatcagttgcacccaattttccctacactggcaaccaccaatctactctctctatctatggctgtacatactctagatatttcttgtaaatagaagcatacaatatgtggccatatatgtctggcttctttcacttagcataatgtttttgaagttcatctatgttataacatgtatcagtacataatttgttttcatagttgaataatatttcattgtatgtacataggcaaatttgtttctccattcatccacagatggacatttcaattgtttctactttttagctatcgtgaatagtacaaccatgaacatgtatgtagaagtatttgtctgaacactgtgttttgttcttgtggtacatacctagaagaagaattgctagatcatatggtaattctatgtttaactttttgagtagtcaccaaaatgttttccaaaggggctgaaccacattacagtcccacagcactctgattcttaaactacctctatatacagatgctccttgaaatacactgggattatattctcatgtattgaatgcatgtcacttttacaccatcataaagctgaaaaatctttacttgaaccatcattaaatcagggcttgtctgttctctgcaagctcttgcttcctcataccttatcttccctagattggagctgtttatactgagttatcatactttgccaaaactgataacctgattagttggttctcccaaaccagctgaaatggactttaattagaaaaactaagaaaaataaaattaataaaaatataaagctaaactttagaagctaaaattctgttgcataatttctaacccaaactaccctagtcatgatatatataaaagatagacggatagacagataatcttctattgattctgtttcactagagaaccccaatacatactccattatggctagagtagatagatagatagatagatagatagatagatagatagatagatagatagdcagttaggcagatgtattataaggaattggcttatgaggttatggaggctgagaagtctcaagatatgcaggcagcaagctggagatccagcagagctaagtgtgtagttcctgtccaggtttgaaaatctgagaaccaggagaactggtagtgtgcattccagtctaaaatctgacaggttcgatactcaagagtcaatgtttcagtttaaatctaaagataggaaaagatcaatgttccagctcaaggcagtcaggcagaaggagctccctcttacttgcaaaatagtcagtctttttgttctacttaagacttcatgtgattggatgagggccaccatctttagagaaggcaatctgctttactcagtctactaattgaatgttagtctcatccaaaacatcctcacagacacacccataataatgtttgaccaattatctgggcaccccatagctcattcaagttctcatgtaatgttaaccctcacagagtacttttgagccagcacaatttttaggacctcaactgaattcagatggcccttatataacccatgttgtctagagtatttcttattggagaatccacagtatctgttaattatgaggcttatgaaatcattgattagctgaattatttccttactgtgtaccagtaactgtaccaagaagtgaacactaaagatttcatactcaaaaggaaaaacaactcataaataaataaattagaaactaccttgaactatttgaaatcaaggaatagaacagtgattcttaacagtgtggtataatgtcccctatatcaaaatcacccagggtatgttgcctttgctcagaatgattgttctgaatctctgggttaggacccggaagtctacattttgttaagtttcccagataatctttatgtacatagaagtttgagaagcactgataggaaatgcttttattttagcaattttcaaaataatttgaaatcaaatgttttctaattactttttccaatttgaattatgttgaaattcttcaccaagagtcaaaacagtttatgaaaataaaatagtaaataagtgttctacaatggccattttcaaatctttatgagtttattgccttactagatcaatcaaaattcattcatgttcccattcaataaatacttactttcccttctgttcttgacatcacgctgggttttgggaatgcagcagtgaataggatagacattgctcatggagtttacagtccagctttaatctcacattttgtttttaacacataacacaaacctttttttggaagggggtgggttgctgaacatttaattactgtggttttttttaagtatttagcattttcatgtcttgagcagaacagatgcgctacttaaggagtttcatacctctgcaactaaaaggaaatctatttgttctgcaataacagtaagtggattgagacacctcagtcccctcatgtgaaatcttacagctctgcttccttttctgctttcctgttaaaagcaagtattttaaattaaggtattaaaattatgtttatagtaatatataaacatcccttttctgcacaattgaatgaatgagatttaactaatagtttcctagagatactatatagcaaaaaataatgaactatttttaacacttattttcttttaaaaagtacattagtattttgactaakcatgtcaaccataagctaaatagcatatgcataacaatttcaagtgaatacttcgtgatggtagcacttacttaatagttttctcttttccccactaacctgtcattatttgccaatttcagctcaagaactcctctgggaaaatcattcttcaccgctgtaatttagaggttatatataatgtatgctcaagaccagttaaagtatgtaacagaagtaactcaagattgctctataactcttttctctgctttcacacaaacctttgtccttactctgttattacaatagaamcaataaaatacataagcattcaggtgaagaatgaaaattcactaatgtcatttagaaaaaataccaagaagggtttatatgaaggatataaagccctgtgaagttactataatacagctacttggattatcttcctgtttagtgctgattaactccaaaagtgttacggctcaatttaaaaatatagtttaaaattttaggcatatgcctgatgttttcatgtgagtaacagaaagtaatggarcatggaattttctgacaggacaataaggaccttttaaagttggcagaattacaaaggatttcattcacaaagctaaaactcaacttctgtgtattaggaaaggatttaagaccatatatccatttctcatttgatcttcatacaaaacctgggagttacatattgttattcttgttttccaagggggaactgtgatttggaaaggttcagtaacttgtccaagcctcgtattattactgcatagtaatcaagtagcagagccagagtcctaagtcactcggatttcaatctgctgctgttctgccatggtcatgtatgttggtgaggccaagcacaagaactgsgcattcagcagatggtggccttggcctaaggcaatttaacaagagcgaagataatctctaagactcctcactgtacttagcaaattcctaggtgaaagctcatagaaaacacagtccagcctttggtctttaagactattttaatctggcaggacaaatacagtttctacatttttatatgtagacttcacatttagaatatgggcaactgagagctgagtgattgttttgccattaggagtgttaattaagttagataatgcagtgctatgtctatagatttcttgtcaagggagtttaaatactgttgcaaaaactgactgggtattatgcttcccactagcttacctatctttcctgcattctttcttatttccctgctgaatgtcaattgtrtaggtaggtcaaatagtaaagttgatcctggccttattatttattttcctctaagggtatctttcctctaattgttcctgaggccctactctaatattaacctaattaactgttttcagcatatttcaatgtttttcttgtctaagcacaagtcttgtatagtctttccagttctaaacctggtcagagagagactaaggtggtcattggagcacttcatggtgctccagtgtcctgcagtccaactctgcagattgtacagtgagtaagtgttctttaatctggatgccagtgggtaaacattactagtttggctggtgtggtggctcatcttatgtgtgaacgtaactaagctaagggatgcccatatagctgctacaacatgatttgaggtgtgtccgtgggagtgtttctggaagagataagcttttgaattggtgagctaagtaaagcagatggccctccccaatgtagggggcatcatccaatttactgagggattgaatagaactaagaggtggaggaagggcaaattcactctctctgcttgagctgaggcatccatctttatctgcctcagacataggcgctcctggcttcaggctttcaaactgccacttataccatcacccaccaccaccaccaatttctcaggccttcagatgcaaactgaattatatcaccagctttcttagttctccagcttgcctccacaaccacatgagccaaatcctgtaataaatggcctcctatatctatatccatatctatttcctatcgtcctgtctctggaaaatcctaaataatatagctgactattcactgaccaatctagtcttcccattcccctcatacctttaggctttgaaaactaaaagtgacagttaaatattgaaagtggaaaaaagagcatccttgtcttcgtttctggaagattatgtcaccacagttctgtatgccagtgataagagggttcatgttgtattcttgttgtttccatggacaacagaagcagtgagctttgaaatccaaaatccttgttaagtcacctctttagctcttaaatagctttgtgaccaagggaaagccacttaaactatgtaaatcatgtctaccacttctgaaatgggaataataatctctagtatactaagtatatctgatgcctggaggaggtatgagtgcgtgtacacgcgtgtgtgtagatagacacataggcataggagcttatcatttgctgcttaattgatttcatttactctagcaaatatagacatttatatttctaaatagtatatgattgactataaaatattaactctaaaagtactgtgctcaaacaaaaatatttttatctgctaaaataggccaaaatataatctaagaagcataaataagaaacaaaaaaattatcaagacrttccaccaagaatgccacacgtgtcatcaayactaacataaatcttcatgtaaaacttctttgcaattacttttaatttcaatttctgcctcttcatctatttgatttattctgctaacaaaagttagagaaaattcaaaggctatcattttgctcagttctcagaactcagattctttaaattagttcttttttgtcttcaactagatattttaatgcctgcaaactttcttagctttacagaatgaagacttgaaaaaaaaaaaaaaactaagttagtggggtagcatacagattaaaatttggaaagataattttgaaatttttgtgttaaattgtatttgaaatgcaattatcatataattaagttgcacattatgttcccttctaacactctgattagcattttcaactgttttgtttgctaaagcataaacaattattttctgctgcagaaatggttgcttcattgctgtagccatgagtggcttaatgatggaggtgtgttctaaaaaatgtgttgttagccaattttgttgttgtgtaaacatcacagagtatacttacacaaacctagatggtataccctactacacacctaggaccaccaaaatatacatgctacattgttgactgaaacatcattatgagattcataactacataagtatgtgttgatacacagagcagtatttatattagtcaaaaaagtaaacaacttaaatgtacaacaataggataaaatgggtaaataaattatagtatactcatttgatgcaatattctgcattcattacaaaatttggttttggaagattaatgtgataggagaaagcccatgatatactgtcaaatgaaaattcaaaactctgtatttttaatcctgattggtatagctttaatttttattttatggcactaatttacctatataactatatgcctgcaaatattattatatatgtttatttattgagaaaaaatggaaagaaaacacatcataatactttattagtgattttaattatttttaattagaaaaaatgttattttaaaaataataattgatacatggaattgtaaattaccttcctatatatagtacagtattttggaaaaactaaaaacaaaagtcccatttttcaataatcaagccacttttgaaggtagacatctatgttcttagggttcctggattggcatttgaggagaccactaaattgtgcctcttcagacaatcgtgattccttacctcctccatgaccacagtactctatcagatgggttttgcttgcccagaatacatgtggttttctgtctgtggtcgtggagcactgacttaatttattataattagaattttagatatgatcacaccattttagacatgttgcatatacagaataaagtataattttatatcatttttatattttgttcatagtaatgagtagactacttcagtttaaaatagaataatgctgaataaaatcattctagtaatgaagggtttagtgaaaaggatatgacctaagaatattgctgggtacttaagctttttacaagggttaggccagtaacaaatatatttttaaaaggtgggaataatggatgaatgtataataatgttctcataaacatctgcaaaatctggtttacaaaaacaacataaaagatgacaaatatcactgtttatcttaagtatataaaatatcatctagaaataattttcccctctttaccatayataggcataattagtatctgccatctgtttcaatgtatcttttatgtgtttagtgtttatttctagaatatcaaataaataggtaaaatggaaattcaaatctgcaaattcagggctaatttagtaacttaaatcattgtattctagttgactaagaggttagttcgcaggaactttatttagcttctaaggcctaagaagaagacaggtttcttatatatagtttttcttatcaagttttgtaaatgtacattaaaaatgcaatcaaggatcacaaagcaaagttcgaattccaattaagtttgaacaaaaagaaaggcaaaaagaaggttcattttaccaaattgtaagacttaaagcactgaacacaaaaaaaatatgttcaaatagatttcgaatctatattttaaccactgaaagaagaaaaataagagactgaaatgaagtgagtaaaatggaaaaagaagaaagatatgatctaagtggaaggaaagataggaagggtgggctagaatgttcaactggggaacaacagaattgagagaggaagaaggggagaagaaagaaagggaagatattataattgtcagcattatatatatatatttatacacaaaatgtgtgtgtattataattgtcagcagtacaaatatacagacacttgtatatgtatactatatatcttacacctaggtatatccttccycacaccagggtccagcatctgacctagaagtcccatttgtaacttcatcatgtccagctggctggattcctcctcccccatccaaaccgtgccccaccttgtaaggacctaacctgtccctgatgacattgctgtcagttcattcttttgctcccatagttaggtgtagagatccaccaacaggcctgtcttctatttctgagtgtcatcaggacgcacatattacatggttcagctgtgcacaccaaaaagcttgcttatgttaagagagtagtgataccaaaagaattagatagctaaatttcaaaaacttaccattggctagatgagtctaaatttgaacccagaagttctctacctctgcttttaaaatcaggaagaatctcttgcattcagataaagcatacaatcatggggtagtcaatgaataaaaaactctatctgcttatgatccaaaaaagttgggaccataaacatgatgaggcagaccttccagatgtcagctttataattaasaaaataagatttagttgtgggcccaactgtattaaggaaagggagaaagaagataaggtgtgatagagtagaaggaatgcctaatttggatctatatccgtaagctaggataccactaatttcatctatgaaagatcatttacaaatctaacagcattactttctgcctagttgaagtgaacactcaactaccgtgtgtgtgtatgtgtatgtgagagagagacagagacagagaaggagacagagagagggartataagaatcagacttaaagattgagaaagaaaaaagaagaaagaaaagtacattaaatactcagcatggtaaatattttataggatataacaattaaaactctgattcaaaatagctttacttatcagaagtaggatattttattagtctgttttttaatgaaagggcaaattagagatctactttactatgatatctcattttgaacaacaatcattatcttttgggaatctcagattttgattttgaaaaccaaagacttgtctgagaaataatctgtttctttcaacatacgttcttgcatagcttcactaaaaatgagtgcccttcttttggcaattggtgatctatatgcctgaagggtaaattggatatattttatgtactagatcgtagttcttttgatacctacagaataaactcttttcatttaacttcctttttccaactgacactttttgctgatttattgcaagctaaaggataaataaatgtatgtgtttcatgtaaactcaaaagtatctctctagttttaaagtgawaaagaaactattttccaccatttaattctcacatgtataaggaactggttttatcctctgaatgcaaaaaggatatatcttttggaaactttttaatgccattctttacctgatacattttttaaattatgtatttcaggccctgcttgatactcagaatcttttgcgtgcwcaaatcacaaattttacattcaacctgggattttcagggaaattttaccatacaggtaagaaaaagggattaactgttctcattaaggcttctctgatcactctatttaaaattgcacacttttcctgcccacactgtcctacattccctatgttcctccccagcattttatcattcaattctatttaacatgctattttttaatttttgtaaaatattaatggtttgaaagtttatggaactatctgatggcctttcatttttattgaattataatttacatatatagaagtacataaatagtaaatgtgatattcagtgaattttcaacgtgtacacagctgtgtaaagaacaggcagatcaagaaagagaacacttccaaaatctccacttcttgtgcccctcacaataactaacttctctcaaagaaaagtagtatyctgacttctaatatcatgaattagttttgcttggctttgagtggtatgtaaaaggaatcatatagtaaagattcatctgtatccagctcattttgtacaatgttatttttgtttcagagatattactgtctataggttataattctttccttttctttgctgtacagtattccattgtctgaacatacaaaatttacttgtctattccattcagctgtagatggttgggtgtttccagactttgagtttttctgaatagaaatgttcataacttcctgttacgaacatttttatacctgtccttcagaggacttgagtattcttttctgttaatcatcaactaggaatggaattgctagttatgtggcacacttataattaattttagtagaaaatgtcagtttttcaaaatggttgtacctgtttatattcccaacagtatgagtgttcctgttgctctgtatgcttgccagtatttgatattgtttgtctttttaattttagcttttctggtgaacatgtagagatatcatattagggttttaatgtacatttctctgaagagcagtaaatgatctttgttcgtatgttggctggctatttggatatcctctcttgaggagtatctgggttttctgcttttacttaatgatttgtagaaattctttccttgaagtttacagttccatgtgttccaagtactttctcctgctgtctggctgtctcttaattttccttatggcgtttttaatgaacaaaaatacttaattttaggccgttcaatttatcatttttttctttaatggtcattcttttctatcttatttaagaaatctttgcatactacaagaacatgaattttttttctttttgagacaggatcttgctctgttgcccaggatagagtgcagtggtgcaaacacaactcactgcagcctcaacctcctaggcttaagaaatcctcccacctcagcnnnnnnnnnnnnnnnnnnnnnnnnnnnnnnnnnnnnnnnnnnnnnnnnnnnnnnnnnnnnnnnnnnnnnnnnnnnnnnnnnnnnnnnnnnnnnnnnnnnnnnnnnnnnnnnnnnnnnnnnnnnnnnnnnnnnnnngtctttttttcataaaaatatctaattggttagccagacatggtgacatgtgcctgtagtcccagctactcaggagacttagatgggaggataacttgagctcaggaggtctaggctgcagtaaactatgttcatgccactgcgctccagtctaagcaacagagcaagaatctgtctcttaaaaaaaaatctaattggctgggtgtggtggctcatgcctgtaatcccagcactttgggaggccgaggcgggtggatcgcgaggtcaggagatcgagatcatcctggctaacacagtgaaaacctgtctctactaaaaatacaaaacattagccaggcatcgtggcaggcccctgtagtcccagctactagggaggctgaggcaggagaatggcgtgaacccagcaggcggagcttgcagtgagccgagattgcgccactgcactccagcctgggctacagagcgagactccatctcaaaatcatcatcatcatcatcatcatcatcatcatcatcatcatctaattagcacccagtattgaaaagaccatcctttcccactgcttcatagtgtcattattatcataaattatatggccatgtaactgtggactctcattctgaatttccctattaaatgtgaaaagaaatcactctaaatattgagaataattaaaaagttttttcacaatcataattaaaatgagtaaagatattttgacttgcctcaggatagatgaacacaatttcatgattgaaagcattactctgtatttttagaagttaaaaaaactgattacatgtattggtatactcatataatggaatactctgcagtcattaaaaagagataattttaaatataaaccatatagaaaaagctctcaagatacactgaaaaatcagtgtacagtacagtgattagaacatgctcccatttgtataaaaataaagaagataaaagctatacaaaagtcaaggtatagtacagtgattagaatatgttcccatttgtataaaaataaaagaggaggtgaaatctgtacaactctatgtatagaactcttgtagcttagaaaactcagttaccaagtagttaagtaacttgtgccatgcaagatgtcttaaatagatagaaaaggctgaccattaaagaaaaaaatgataaactgaatgacgctaaaattaagtattttttatataaagggctattaatacaagtataggatatctgtgggagaattcataataaactgatagtaatgggtaactatgaatgtattagttttcatgctgctaataaacacatacctgagactgggtaatttataaagaaaagaggtttaaaggactcacagttccacatggctggggaggcctcacaatcatggcggaagatgaaggaagagcaaaggggtgtcttacatggcagcaggcaagagggcttsgtaacttaatgcagggtaactyccatttataaaaccataaaatctcgtgagacttctcattcactatcatgagaacagtatgggggaacctcccccatgattcaattatctccaaccagccccagccttgacacatggggattattacaactcarggtgagatttgggtggggacacagagccaaaccatctcagtgaagaagagaatttgagaatcaaacaagagagatgaaaagaagagttactttttactaaattttttctgagcctttgcattttataacatatatgtgtgttagatctaaatgaataaacacataagtaattttttaaagtgatatcatatttaagcaagtttatcagttttctacaattgcaaatgcttttcaaatttttcatttgataatatgagcaagagttactttgtatgtatttgatgagtaccttcaagggtttaataaacatatcatgctgagaattctatctatatactactaacatcaatataatctccatatgcacataaacaacataaatagtaattttatttttagatagaagcatactgtatttctagagtaagtcaatttccatttgtttccatggaagttagagagccatgagacttgactatagtattttcctattgtaaaattgtgtaatgaatacaatatgtataatcatacaactacatataactttcacctaccaatttgaaaattgtgtaggatttaagaataactttaacataagaagcgtggaagcttttattcctctgaatttcttagatcaatatataaaatacacattttctgtgattattttaaatattaacaactgggaacctcatgattatgtttgactttgttttatgattcattgagttggttcttattgtaacctcaaaaataaaaacataattagatatctattttaaatcttttgcttacaggaaagttcttctaccttggcaatagatatgtgaagtgagaactttctctttatgtgcagaggtttagttcatnnnnnnnnnnnnnnnnnnnnctttatgtgcagagtttagttcatctttctagtgaagttagactcatagcataactaactttcacaatggagagctccaagagcttaaggaaacagaagactgcccacaacctcttcctaaacttctgagttaggatatcctaacttcaggatgattatcttagattctttgacatccattgaataaaggaaaattatcatatggatgaaaaaccaccatggcaaaattagggtgaaatatgtggtgtgtttagggggagagggagagagtaggaagagacatcacagcaaaaccaggacagcccagatatgctcaagaaatacaagaaaacactcctggcaactccattatttttttgcccatcgttgaatactggggaatgatgctagccaattcatgtcattccttctcatctctgcaaggtttgtcctctttctttacttgggcacttcccacagctcataataagagtatcctctccctaagtgagagaaagtacaacacagatggaaacagaggccaaggtttgaaagggtcttgttagctgtgtataatatgagagtttccacaaaacttagccagggttgtctaagaccagttaaatcattttttagagggaaaaggtacaaaatttaatatttgatctttcaaaaattagatgggataaaaagtaattgaattatattgtcttcctttctaaatgaagaaattgctattcctttttctataaaaaaattctatccattttactcagtcttgaagggaaaaagaaaagtggcattgtcataacagtaatactttatgtcagaagagagctttatcttgtttgatttattttaatttttgaagggtatgtgcatttatgtgagaaataaaggggtaaaacataaaaatcatagttcccttttagtgctttgttaaacacttttcatgtactttttcactgaatcctagaagttaaagaacgtgttaacttgttttctagataagaacatagaaacttaaaggggcccaaggtcacatagcttgtgaagtgtcaaaaaatagtcttaactcatccttgactagggaagctgaatggcaaaagattctccttatttatagatttgttagctttttatgtttccccaaatcactgagatccagtagtacctgtacattctaattatattatagaataaattaacaatgagaagagcaatgttatattgaatgaataaatgctgatcttatttctagactcaacgtttggccagtgaatgatagttaagggccctgaatttggagttgctcaatctgagttagaactcagaatttcaattcaggctctgtctcaaacctctcagtgagatggaacaagttacttcacctctccaaatgtcaattcccttatctgtaaaatgaagttagcagcagcactcacctcatgaggttgttttgagaatwaagtgaaatgatgtttgtaaagtactcaacacagtgcttgacataacaacacaacataaactctcaatcaatgatgattttaaatataatatcagaatagcaaatactacagataaaatagtgtagagaagttatttaaataaatatattaaaaaataaattatagtttgcaataacttcataagatttcagcatagttttgtgataagttaagaaatggcacttaacactgtagaaaagagtttggaaatttctcaaagaacttaaaacagaactaatattcaacccagcaatgccattattggatattatcatatatccaaagaaagaaaatcattataccaaaaagacacatgtactcacatgttcactacagcactattcacactagcaaagacatggaataaacctaggtgtccatcaatggtggattggatgaaaaaaatctgatacatatactccatggaatactacacagccattaaaaaaggaatgaaatcatgtcctttgcagcaacatggatgcagctggaggccattatcctaagtaaatcaatgcaagagcagaaaaccaaataccacatgttctcatttataagtgagaactaaacatcgagtactcatagtcatagagatggcaacagtagacactggggactaatggcagagagggcaggagaagagtaaaggttgaaaaactacctgttgtgtactatgctcactatctgagtgataggatctttcatatcccaaacctcagcatcatgcaatatgcccaggtaacaaacctgcatgtccccccgaatctaaaataaaagttgaaaataaaataaaatacatataatctgcatcttcccagaaaaaggaaatggcacttaaaattgaggaatttgacttcttgttcttctctcttcctccagttctgacaaaggtgggcaaagtagggaagcaaagagtgggcaagaggccacgacagtccaaccaaatgtaattaacccatagttaattacacttcaactaatttttaatcatgatttttttttttttttgagatggagtctcgctctgtcgcccaggctggagtgtagcgacgccatcttagctcactgcaagctctgcctcccgggttaacgccattctcctgcctcagcctcctgagtagctgggactacaggtgcccgccaccatgcctggcaaaattttttttgtatttttagtagagatgggatttcaccatcccatctgaactgagataaatatgtcagaaggcagatatcatttgtctaactcttgcatgattcaaatatatgaatattttagtcacagatttcaccatgatattcaggaaaggacaacaaatgcctgagctatctttttagccaggatggtcttgatctcctgacctcttgatctgcccgcctcagcctcccaaagtgctgggattacaggcatgagccaccatgyccggcccataatttttaaagtaataagcaacagacatttgttttcaatgtaattctaatgtaaaacattctcaaagtaggattaaaagaaatcagataagacaaatctataaagagaagacataaaattgtgcctaatatgaactgagataaatatgtcagaaggcagatatcatttgtctaactcttgcatgattcaaatatatgaatattttagtcacagatttcaccatgatattcaggaaaggacaacaaatgcctgagctatcttttcaaagaaccctgagatctgctgctctgttctgataaataatatttgagcagaggccaactaaaaaaacatgaataaagggaagatgacaggaaagctgcaaggaaagataagaattataggcaacagggaatagagcttaaaagcagtgggagaggagacttctcataaactagggaatatcagctcactgacattgcagggtatgtggaaatcaggaatgaattgatttctgggaaactccaagagactctgcctgctctcaatgtgagaaaataaaatggcaacaaataactgacactaatacagtgtcctggagactacaaaatgttaagcaacaggggagtatcttggttagaagcagagatgtttaaatgcagggaaactaaatgacatcattcttatgtcaagcaaaacatgtgtttaagatcaccagtcacacctacaaaatgcttctttacaaaggtcaccttatttttcacctcgaatttagaaggacccaagaacctgctatggttgggatcatcagagtttctaaacccctgaatccatcttcctatttttcttgcctttctcactatgaagcttccctgagccataagataaccactcagaagcgccaagaatgctggtgactcattcattaatcaggccaatgagttaatataatgatttggtcagttcttgaacataatgtcacctctgccacatagcacctgtgaaaactaccttctcctttcatgtagtattataatgaggaaaaaaaaactcaaggagccatgcaaggaaacgcaagaagaacagaagtaggaaatacaggaggaaaagaaaggggtattataagttacccaatattgccagaattatgtatacactacctccccccaaaaataaaataggtactgctgtccatctctttacctacatgaatacagacattaaagaggtcatgtgacttggccacacaactcaaatatgttggaacctaaaaataaactaaaaccttctgactccaaaggctacacttgttctactatacaatggtaacataagtgtatatgaagaagaaaaaaataaagaaaataaaacattagatttaaatatgtaatctttgtacgtagtggagaggaagttccttcatatcagtagagtacttaagcatgygaaagtgaaactgaagactgcccttgttgaatgattatgctattccactcactctayagcacttaatctttgtttcttctgtatacatttgaatgaccatgaaatctcatagtatgcctttatctctagtaaaggttttcaatgcccaccaaatcacaggacctgattcttttcctgccaataggctctgcctcccttctttgggaaactgaatgaacaatgttaacaggaactgggtttagttgactggtccagggtagcagtccattctccatctttagcctgtagggctctaataaaacaaatcacatcagagctgccattgaaaatatgggaggagatttttctccacacaaaaaggacatcataggaagaacccactactcagggagcttattggattcaatgttgtggctaaaattcaagtgtggctgcataattttgaaatgactagtattatgatattccaggacagtagtgagcaccttatactgctcttattttatgctatagtaaagaagatatgcctagggaagtacaaaaaggactcttagccccttcaaataaggtaaaagaacagtgaaatttcccacagtcaactgaactgcaggccaaggaaaatgggaggaaataaaatgagttcaagtatgaaaccaccaagaaacaacaacagggctgacccttaaggaaaaaagagtttcgtgatgcaaaatcttcttccaacaacttgagagaaaggacaagcatatggaacacaagtgtaccaccaaggagcagcttggattgttttgatagtggtgaccatgatttcaccacttcacaacttctgtccatcaccttcatccttcagttttccctaattttctcaacaacgatttccacatttccttcttttctctttcttatgtgtcagttttcaccaaatactgagtaacttcttcccagacctaaggaggaacccgaataaaagaattattttgttgtatacacagcccatgtcacaatgacctactactactgaggctgtgacacatattccttgctcatatttcctaaattacatttcctacttatcccccattctctccagactataaactgcacaaaaatgctgaaagttaagagttctaatatccttgggaatggttatatatttccatcttgcagtgatttcatatccatgtctcatgtttaataacatttaagagttttacatggtctctgattatttcctgattaacagattttccttgatacatttgggtttaaagccttatacgtaaaacagaataaatgatggcttctaaatacatatacgagaaaagattaaatagataagtagattgattgatcatagatcagtgtaactggaattaattggataatatttcccccccctaaaggaactgaagaggaagatgaaggagatgactgtctgttggggtctgtggatgagttctggtggtttcctcacatgtggagccatatgcagccccacctcttccacaatgagtcatctttggtggagcagatgattctcaacaaaaaatttgccttagtaagtaactcacttygttgcattgaagtagtgtacactgattggagaaatgaaaagattcttacattgtggcatagttgcgcttttcagtggcttttccatatgatcatttggaatattttggtattgccgcctttcagtatgtggctcttgagtttgtattgagtgctcaccactatgcttaatgttttgaaggatctaatttgagagggacctcacaaaatacaagatttattatgacattatggtcagagcacctaagacatggctcctgtccagaaggagtttcctgctgcactgagaaggcagaaatatgcatgttaaacaattccccaacaaaatgaaatactttttcaagacctaatgacaaaccttacagccacaaaacccacagttcaaagaaataagtatcactgggagtagcccaagatggattcttctggaaataagattttagatacgtcctgaaataagaataaatcttcgggatcaggattaattgaaatgaaatgaggctgagggaaaakagcaggtaggagaccataatgactgtatgaggtaataaagactcaatctaaacagttaaaagcattgcaaacatatatgctgtatggatggaacatttgtttggctgaagcaaggtacaccatgtaatactgaagggtttatattcaggacagggaaatttatagtaaaagtttaaataagcayattatgaagaaaaatgtgcttgtgatcagagagagtaccgaggtacacttacatggaatggttttctacaccaactgttagaactaagaagtttcagttggttctcacagtaccttactcaaatatatacaagacaaggttagaatgtatacactatattttttttcttgaggatatacaagaccaaatactttatggtggcatcaggggcccatatttgtcttttagcttcaatctactcccccaaataaacaaacagcttcaggtgcacctttgccacatattgatattttgtcaagaaagcaagaatagtgctcctccatgctgatactgtgaaaatgttttgatggtatatgcaaactgctgtgagaaggagagtcatcttttttcctaaaaaaataaacaaataataagcagcatgtaaaattggtaaaacggccccagaatttgtaatagaaagtgctaaaactcatatctcaaaacagcagacattaattctgtcattttcagaaatctagactgttgatattgacaatgttaatcactaataaattatgtggggaaaaaattactttgtggtttacttctaaatctgttgagaaaaagagaaagggatttgtgagagacgaaaatacgtaaatacactaaagtaaagcaccagtaaaagataagatactgagaagtgaggagtgaaattgttgttgttgttgttgctgttttgacagctttccaaaaataatgtaccaaagcagctttgataaaagacatgtcattcactgttacatctgctgaaaactagaatagtatctagaaattacttgaaygaatcaatgaatgccaatattatgtttatgtttaaaacatttgcagatatttggaagtacatatcctaagaatatacttaggctgggtgcagtggctcatgcctgtaatcccagcactttgggaggccgaggtgggcggatcacgaggtcaggagatcgagaccatcctggctaacatggtgaaaccctgtctctactaaaaaatacaaacaattagccaggtgtggtggcgggcgcctgtagtcccagctactcaggaagctgaggcaggagaatggtatgaacccaggaggtggagcttgcagtgagctgagattgcaccactgcactccagcctgggcgacacagccagactccctctcaaaaaaagaaaaaaaaaaaagaatatacttaatacatatgctagaacaggcatgcacaggagttacatgcattttttagaattcccaactaaaaagtatcatgtgtaaaagaataattcaaaaacaatatctggtcattcttaaccacctaagtgttaagcaaagcagatttcttagaagcgtcattcctaactacatgttggcaattcaaattattgtttttgaagcagaagagagtagttgtaatagatcttcagaaataagaccaaatatattatttagtgtttaatcaaatccaggacaagtagaatttattttgttgcaagaggatagatatgaaaaaagactgaatccagaaccagtccctccccagccataacaatatgaaagagcacatataaataaggcatttgggaacagcaattagcatataacactcaatagatggcagctgctgttwttatcattatatctagtatcacaaaattgccatctttaatttttgcccaggctcctgaggtgtttggactgacaggtaagagggacaaaaatccttaagtttaaaagtttactttgtattgggatggcatttgtttaatgtgaattttacccaatttctaaatatgtgttaactcttttactttccattaagcattagggttacaaaactgcattgttgctgactttaaagatataataagaaaagatcaagggtttccaattttaacatatttttattatttcttttaattctcaaattaacccggaattgtaggtctatttattttcccattatagatgaagcaactgagaatcagagaaatgcagtgacttattcatgattataaaactcactagcagtataattaagaccagaaatcttaatgctgcataaattgcagtgttaggtcttctaatgtggcataaagtgtgccccctgccgaggcttcctccctagcctcccaacccaattcacaggtgtgaatcaagatttcttttctgctggtaatccaagggaatatctggttatgctggtaatataaaggaaatggagaacttgaggtggaactcacagggcaacttttccctcggattccctgaagttccctaatataggcagagtctctaaaatgttggagggggtcgaaggggtaggggagacaaaaaactaaatctgaggaaatttccacttgaccaaatatcacttctcatgtgtagttacagaatccactttaattcaatgaaaagtactctggagaaaattctacttcaactcactagatggaacaaagcaaatgtttaacctgtgctaatatggcatttctaaattggattatatcctgctcttctccaccagcttggaggctcttgattttaaaatgagtgttggtatttcccaatgaagaaagtgaaaaaacatgcaaagaagcagtgggctgtcttgggagcaaataggtgttcaaacaagaatggaggtcatggatgcaatattcaaatgggtaattgtgttagaggacatttaaagtacccttccagctaagagaatttccgagactgtgatctaaaacttttgggtttcggcctttgctatcatcatttacagccacatacctgctattttcattgagttttaacaaatacatcttatctattatccttttgcacaatgtggacacatctgactcacaaacaaatttgatgtctattttaatttgtctttgaaagctctaacagtttattatgaaaggtcaagtaaatcctttaagcaaacttgcatttgatgattacacccatcaggaaatgcagctttagaggttgaatggaaaaaatttttagttaccaaatataggataattcaggggttaaactgcaatttcaacaggggatttttttttggaaaggtacaaattctgagacaargattaaatgtatcattaataatgacctaccacaaaatttaaaatatcaactgtacagtgtgtaaaatagaataacatatcattagaaaggtaaaatagtattctatttaaacctcaaaaaagtcttcaatagtatatactctcaattgaagaactgtatctaaattttggaaaatggtggtggttaaatttttaatgataaaatagttaatagatatttctatcatagaactctgccaatatcagatgatacttaatgcttttatagacaatactattaaaagtagtagtagtagaacaatgttcctgataacataaaatcttactgaagattgaacttctaattgtatcatcatcattcttttaaatggtgtcctttttgcctctcttttccaagtgcagcagaacctgttaatttacattagctggaatgtctattgtcaattataaaactttttagattagtgagcatgttaacttttccaatatggaaataaagattatagtatcaaaatgtaatttaaaatatattgaaagacttgctggcttaaggaatatatgacaatcttttaattagtttgcttgccagctagagaatgaatgaatactaccacttttatttcagtgatgcactttataaaaaggcatatgagattttccttttattgacattgaacacaaagtataattctaggtgtcctaatagagaattccagtcgggttgcaaagagtccactcagctggtaggccactttagagtaattcaagcagcacagtttagaaagacattggccattgttcagagcaaaatgaccaatatgatgaagtctataatttacttcataaaatgaatagctgaaggaaattcaagaaggcaagaggtaaaagagaagactaagggatatattatcagggctactattcaactaagagtactggtatggccatgccagttattacaatattgaaatgtgacaatactttacccctatcctgctaccacatcagattcttccccaaggtgtcccaaatctcccccattactcaggaactaaaggggcctggcccagaaagagtctccagcaccgatctccagctgtccagctggcagcagttctgattggtcagtggcatggcatgctggttggtagatatttttcgttatcattccagaagataatcagtcagtcttaagatttagaagagactagaatcagtatatttataaggaaaagtatggaagtcatatagatttaagaagtagagttcttccaatctagataagttatgtatagagaatggtgcttgacatctagtaggtagtaaatgtttgctaaataaaaataaaagtaaacgtttcttctagctcttaagattctatcattactgtattaaaatgtaggttttattattatacaggtrtgatgagtccagtagatcaggagatgactgccattgaaargatcagtttgttattcccagttaccaagagagggagtgtgccacaaggatgcagggccacaggggaagcaccagggtygctcaggaggcagagggagcaggggggaaaggtgggcaagagcctttactgtggtttctgcgggaaaggtaaggcaagacagggtaagcaggctcaggattggcgactttgaataatttcagtatgctctgaggtgtaagagctgtctttagtcatctaatacttggatctggggtgattagatcaaagagatagttgctcaacatatgagagtctgataaaggaagcagaggagggtaggagctctgaattgcttgatttacatttgagagtgctctcagggtggtgtttgctatctcttggaattgactagcctgagaacagcaatctctccagagtcagcaaggcccagatatcaaagcatcagaaatacagaaaataaagaggcatgatgctttctcccggttatgtatcttgaagcaattccacaggttttcaaagcccctcaccatcccagctgtcatattcatataatttctaatttgtcgttcttatatcccccaatctgaacattattgtccactgatgtggtgttatcaaagcagaaaatggtaaaatattttttctttcatgtgcactttacttctattaatgtagccaaagatcacattacatttttacaccatcatatcacacctgtgtctgcccgaccctctgtccatgagccatttattaaaccttcaagtatttatttttatccagttgatttttcaaactaaatgctagccttggaattacaattgtccctttaatattccatatttgttatatgttcagtgttttagtatatcaacctcctgctaaagactgactctgttatttaaaatgctttatatctttcctagctttgtgtaatccctatattttacaagtatgacttttgcatcttcaagttattagtattgttgaacatattaatatggttagagatttgtggtagagcaatacatatcctttagctgtgttcccttggtatatttctagcaattgtttcacatctattttttcaccagaatagtttaaaatctgtttttctaaattgaaacatcatatctaattatttttagaattatatattttaagtatcttgaactccaagataacactgtcatctactcctaagttctagcacctccacataggtggcagaatcacagaacattagagaaggagtgtttaggatgaagacaagcaggggaaaattggatgtaagtagacatactggattactaataaattaaccaaagaataggaaataaaayccagctttaactaaaccagtggaagcgggatcataaagaagtgagatgtgaaaagtatttctgacatagattcaataagkttttaatcagatggatgatgaggaagcataagagaataacaggtcaaaaataacattagggtttaagcctcccacttttctatctgtgtgtatctctttaaactttttgcaaaggtgaactgctgctttttctttagaagttctgtatttcacctacatgaggataccccctcttacccatatctacagtactgcaaaatgtattctcatttggatatatcatttgaacttttgaaagtggttttgattggaattcttttctttgtaaattcctgtccagattaccttcttttccatcctatgggaagactccatactctctaacaagatagacattgtagaaagaattcctcaattcctttccctttttcctctaacagaaatactagatttcatcttcaacacatttatctggtaacttaaacgatttcataaaaagaaagataaatttagcacatgtactgcatgaaaatagtgccttactgtccaaatttatgtggacacaaaatgaactaacagcctttatgaattctcctagaaactcatactagtgggctggagtcagatgtgggtatgagggtgggggaggtctatttccagatccattcctgctgctcccgaattttcactgctctttccttttacgcctttcatttacttaagatggagggggcacttgcattctgagaggtggttataaacatggcagagatggaagtgatggcagaagaagtaagagtcaatttcacatgagtgctaaccttggctccgctttggcatttttgtgtctcccactccatgttcccatgcatttaacaatttctttcagttttttttttcttttgtaccagctcctgctccttttcaaaattttccatctctacttcacttccaaattttcagcccacacctagattattgcagcagcctccaaaccagcctccaaactagtctccccaatttcccgtttttttcctttaatttttgctcagatcaggaaacgtgaaacttgaaattctgtgactctgtttccgctgcatgaaacagaaccttacggttcagtgagaaagattcttgactctcttaaggaaatgtaggaagataaattgttgagctccaaaatatttactagacattgcgcttagggctttccatacatcctcggttaattctcccaaccacctgtgaggttgcttattctcgtattgaaaatgaagaaagcaaggcttagagagcttatataaattttccagtgaaagctggagaaagggtttcatcccaggtctgtctaattccaaagcccatgtaacaaccatggtttgtaaaattaacaagtagccatgccattgatactgttattgctgttacacagatctcataatcaaaatgttattacttctttaaggaattatatttttacacaaattcagaatacaatctgactttttacaatgtttttctcctaaagagctgtctataggatttatgtagtttcttgtgtttgcgatctcagtgctgcaagcattactgtcctggtggcttttataaataccagagagtatacggtggttataacaaaaatcaatatcaactttttatgctttcagaaatattaaacttcacttaaaattagtactatgtagacttcaagattcctaatcaaccttgcatattttcagggagattaaatgtgtgtgcaagtactctgagaatttgaggctgtcctggattatttatagctttcttacctctcaaagaccccaaaggtccacataaacttcaaactctgagaaagctgaattaaaccaaactttcaattcctccattatgaatccagataattttmttttcagttattttgctacagcataaaaagtaaggcttcatacattcattttttttacatttctataaaccttttcttgtgtttacttgaatacaccccagcaattcaaaaataccaacctgggctgtgcaaagtacaagtgtttacatgattcttttgagtattctcacaaaagcgcatcctttagtgctatgtttacttatgagacactcaacaaagatatgacaacacttcaaaaattctggagggaactctaagacaggaaaacaacatgctcagttaaatgaaaatgtacttgaaataaatgttataattgttagggaagactgggagaaaatcactctcccccaaatatttcttttcttaaaggttacaagtgaaaatgaaaattaaagccaagtatgctaccttttatagccctttttcagtattggtactacatttttagcttaacttttgttactggaatttcttactacgtttggcttacaaaatgtcattccatttcttgaaataatttagctgctaacttgggataatacttaaagaggaatatgtggtgttaagaaggggtttttgcttatgttatttctacagctctatcaaatttatggtacaccagaggtattccttccctcccactttatatgtaatatctaatatgtataatagaagaaatgtatattgtttagtaagactttgtttttagacatgattgataatgacaatgtatcttctttgaggaatgtctgctctgaaataagcactctgaattgtttgagaatggaagtaatggtgagaggagtcttagtttaccttggtttttttgttttgcttgtttttgtttcccccaaataaagaatactgttaactaaataaaagaaaatgaaatggcatttgaccaataactttgtttatatccttcatgctggacaactctgtgagatcattagttttattacccttacttggcaaatgagggaattgaggcacggtgaatttgcataacctgctagggtcctgggaccaatgaagagaagcactgagattgagccggggactcaaatctgtgttctcctaaatctgtattctcttcatgatagtatcctactctctatccctaggattcctggtacaaggaaaatttcattgtcatgggtttggctattttgagatattgaaagaataagactcttttcttactgtatactaaattaaacaccatacactcatctcttttccggagatgagtaactccagagtgataaggtgacacttctgttttataagttgctataatgccattcagttttacaagatctcattattaacacctttaacacttttatccaaagacttttgttacttttattttatagccatattttttgctatcttgtgagacaaagaatatctccttcctcaggtttctggatccataggaatatcactacccagagagactcacctaaacctcaagttccagatttttttatgagggtttcattatatgggcatgtttgattgtattattggccacatgattgaactcaatttccaactcctctcgcctaccctaagatcaggctgatatcaccttgctcaaagctctcattctctaattacatggtgggacttcctggcatgactaaccttcatcctgagtcatcttgttagcataaactcaaatataatttcagggtctcaccataaataacaaagacatttctatcactcaggaaattccacagagttaggagttatctcccaggaatcagggataaggaagaccagacaaattctttattaatacaacagctgccaacaggggatgattcttgaacccttaaaacaaatctactaaaaacaacattgtcatcacagaaatttttttcacataccacccagcaaaccaaaatttatattataaatcaaggagcaccatgtaagaaaactagagaaatagttagtggtcaaatctataaatattaaccaaatttatgtaactgtgtctatcatattttaggagattattccatccttaagtatgtagaaagaaaattgtatatgggagtttaagtttgttcatggattaaaaatagtacattcgtatttagcatctgaatataaaatcatttctaaaaccacaaagattatgtcaaagaaacacagaattataaacctggactttagtgactacttgtacaacccctttattttayaattttttagaaaatgaaaaatcagattcctgtgcttaaggtaattaattctttcaagatttttcatttcaaaccataccagaaatattatcatttatcacaggaacatagtctaayatttaataatctttgcatgtagtaccaaatctaaattccctaatctaatgatcctgacttgccttattttgttgtaggctaagaagacagtcagcttcctttgaatagcaactttacatatattgggccactctgccaacatccataccatttcttactttcttccagtgattgcggctactacaggactccttccrcaggtgccagaggttccacaggttcttataagctgaattgtggtgtagcccatcagtgtcaccttaggaaaacaaatcrtcattagaagcttgaaaatgcttcacaaattcaaataattatataattttgactataatcatcctgttgtgctatcaaatagtacatattattcatgctttctaattatattttgtgctcattaatcatgcccacctcccctgcaacatctactatcctacccagtttctggtagccatccttcgactctctatctccacgtgttcaattgtttcgagttttatataccacaaataagtgagaacatgtgatgtttgtctttctgtgtcttggttatttcacttaacataatgacctccacttccatctatattgttacaggtaactgaatcccattcttttttatggctgaatagtacaccactgtgtactattatactgtgtgtatgtatgtgtatatatatatatatatacacctcataatatacctcactttctttatctattcatctgttaatatacactggttgcttccaaatcctggctattgtaaacagtgctgcaacgaacatgagagtgcagatatctctttgatacactgatttcctttcttttgggtatatactcagcagtgggattgctggatcatatggtagttctaattttagtttttcgagaaacctccaaactgttctccatagtggttgtactaatttacatccccaccaacagcgtataacggttttcttttctctacatctctccagcatttgttgttgcctgtctttttggagaaaagccattttaactggggtgagatgacatctcattatagttttgatttgcatttctctgatgatcagtgatgttgagcaccttttcatatgcctgtttgccatttgtatgtattcttttgagaaatgtctattcaagccctttgtccattagttattcagattacgagattttttactatagagttgtttgagtttcttatatattctggttattaatctcttgtcagatggggagtttgcaaatattttctcccattctgtgggttgtctcttcactttgttgaatgttttgtttgctgtgtagaagcattttaactcgatgtgatcccatctgtccattttttgttggttkcctgtgcttgtggggtattacccaagacatttttgccaagaccaatgtcttggagagtttcccccatgttttcttatagtagtttcatagtttgaggtcttatgtttaagtctttaatatattggtttgatttttgtatatggtgatagacaggggttcagcttaatttttctgcatatggaaatctagtttttcaagcaccatttgttgaagagattgtcctttctccaatgtatgttcttggcacctttgtcaaaaatgagttcactgtaggtgtattaatttgttgctgggttctttgttctattccattggtctatgtatctgcctatatgccagtagcatgctgttttggttaccataactccttagtataacgtgaaatcaggtaatgtgattcttccaattttgttctttttgttcaggatagctttggctattctggatcttctgtggttccatataaatttttggattatattgtatattttgtgaaaaatatcattggcattttgataaagatttcattgaatctgtagattgctttgtttagtatggacattttaacaatattgattcttctcatccatgaacatagaatatctttttatttttttggtgtactctttaatgtctttcatcagtgttttatagttttcattgtagagatctttcactttttggttaattcctaggtagttaattttatttgtggctactataaatgagattacattttgacttgttttttacattgttcaccattggcatatagaaatgctactggcttttgtatgttgatcttgtatcttgaattttactgaatttgtttatcagttctaatagttttttggtggagtctttaggtttttccaaatataagattatatcatttggaaacaaggataatttaactgtttcttttccagcttgaatgcccttcatttctttctcttttctgattgctctagctacgacttccagtgctatgttgaataacagtggtgacagtgggcatccttgttgtcttccagatcttagaggaaagcctttcagtttttcccaattcagtatgacaccagctttgggtctgtcatagatggattttattatggtgaggtatgtrccttctataccaagtttgttgagggttttttatcatgaagggatgttcaattttatcaaatgctttttcagcatgaattgaaatgattgtatgatttttgtccttcattctgttgatatgatgtatcatattgattgatttgtgtatattgaaccatcctcacatcccaaggacaagtctcacttggtcatgataaacgatctttttaatgtattgttggatttgcattgttagaattttattgagaatttttgcatcaggattcatcacagatgttggcctgtagttttctttttttgatgtgtctttatctggtttcggtatcaggataatactggcctcatagaatgagcttagaagtattccctcctcctctatattttggaatagtttcagtaggattgctgttagttcttctttaaatgtttggtagaaatcagcagtgtagccatcaagtcctaggtgtttctttactgggagacgttttattatgtcttcaatcttattacttattattggtcttttcaagttttggatttcttcatggttcaattttggtaggttgtatgtgccaaggaatttattcatttcctgtaaattttccaacttgttggcatatagttgctgatagtagccactactgatcctttgaatttcggcagtatcagttgtagtgtttcctttttcatatctgattttatttatttgggtcctcatccttttttttctttgttaatctggctaatggtttgctgattttgtttatcttagaaaaatcctttttgtttcattgacttttttgtattgttttcttcatttcaatttcgtttacttctgctttgatctttattatttcttttctcctattatttttgggttcagtttgcacttgcttttctagttctttaagatacattgttagattatttatttgaaggttttttcttttttgatgtaggcacttacagctataaactttcctcttactgctgtttttgctgtatcccataggttttggtatgttatgtttccattatcatttcttttccagaaagtttttcaatttccatcttaattttttcattgacccactgatcattcaagagcatattgtttaatttccattgagtttgtatagtttccaaaattcctcttgttgatttctagttttattccattgttgtcagagaagacgtttgatattgtttagatttgtgtaaatgttttaacacttgttttatgacctaacatatggtctatccttgaaaatgatccatgtgctgagaaaaagaatgtgtattctgtagcctttggttgaaatgttccataaatatatattagattcatttgttgtatagtgctgattaagtccaatattttttgttgagttcctgtctgggacatctgtccaatgttgaaagtggagtgttgaaatctccagctattattgtactggggtctatctctctctttagctctaataatatttttttatatagctgtgtgctccagagttgggtgcatatatattttaaattgttatatactattacggggttgactcctttatcattatatagtgaccttctttgtctcttctcacagtgtttgttttcaaatctattttgtttgatataaggataactactcctgttcattttttgtttcaattggcrtggaatatcttttcacatccctttattttcagtctatgtgtatctttataagtgaagtgtgtttcttgtgggcaacagatcatagagtcttgtattttcatccatttggccactctgtgtcttttgatcagagagtttagttcacttatatttaatgtgattatttacgtgtagaaacttactcctgccacttygttatttgttttctggttgttttggggtcgtctctcttttcttttcttccttcctgtcttcctttcagtgaagataattttctcttgtgctttaacttcttgcttgtttctgttgtgttttttgatttgaggctatcatgagactagtaaatactgtcttgtaactcattattttaaactgaagacaacttaacactgattgcataaacacagaaagaaaactctacactttaatttcatcaactcactttttaattttttgttgttccttatgtcttgttgtactgtttatatcttgaaaagtttttgtagttattacttttgattggttcatcatttagtctttctacttaagataagagaagtttacacaccaccattacaatgttatcatagtctgtgtttctctgtgtgcctactattaccagtgtaccagtatttttaccttcagacaatttcttcttgctcattaatatcattttctttcagattgaaaaactccctttagcatttcttataagacaggtctggtgttgatgaaattcctcagcttttgtttgtctgggaaagtctttatttctccttcatgcttgaagaatatttccaccagatatactattctagcataaaagttcttttccttcagcactttaaacatgtcttgccaccctctcctggcctgtcaggcttccactgaaaagtctgctttcagatgtattggaggtccattgaatgttatttgttacttttctcttgctgcatttaggattctgtctttgtctttgactcttgggagtttgattattagatgccttgagttagtcttctttgagttaatctgcttggtgctccataaccttcttgtactcgaatgttgatctctttctccaggtttgggaggttttctgttattcctttgaataaactttttacccttatctgtttctctacttcttctttaaaaccaatatctctgagatttgccctttggaggctattttctagatcttataggtgtgctatgttgttttggtttggtttggtttggtttggttttcttttgtctcttatgattgtgtattttcaaataggctgtcttcaagttcactgattctttcttctgcttgatcaattctgctattaagtgactctgatgcattcttcagtatgtcaattgcawttttcaactctagaatttctgcttgattctttctcattatttcaatctctttgtaaaattaatctgatagaattctgaattccttatctctgttaatcttgaatttctttgagtttcctcaaaatggccattttgaattctctgtctgaaaggtcacacatccttatttctccagtattggtctctgatgccttatttagttcatttggtgaggtcattttcctggatcatcttgatgcttgtagatgttcatctgtgtctgggcatagaatagttaggtatttactatagactttgcagtctgggcttgtttgtgcttgtccttgggaaggcttttcagatatttgaagctgcttggttcccaagcccaatatcactgtggtccttgcagactcgtagaggtaccatcttggtggtcttggagaagatctagaagaaggctctggattaataggcagagattcttgttcatttcccttagtttctcccaaacaaacagagtctctttctctgtgctgagctgcctggaactgggattatgatgatgcaaacacccctatggccactataactgggactgcactgggtcaggcctaaagactcagtcagcacagcactgagtcttgtccaaggcccactataactactacctggctaccacctatgttcactcaaggccctaggccactacaatcagcaggtggcaaagccagccaagtttgtgtccttcccttcagagcggcaagttcctccaggccccaggcaggtccagagatgctgtctgggagccaaggattagagtgaaaaacattagaaatttgcctaacattctgttctactatggctaagctagtactaaaaccatactataaagtacttcctgctcttccttcccctttccacagggagaagagcctctccctctgagcaccaccaccagcagcccttggcagggttctgtcaggccaccggcaattttcacttaagcccaagggttcttctgtcagcttgtggtgaatgctgcctggcctgggattcaccctctgcacagtgggttcccctctgacccacagaaggtccggaaatgctgttcaagagcctaggcctggactcagagaccccaagagcctgcttgttgctctaccccactgtggccaagctggtacataaggtgcaaaacaaagtcccctttacttttccctatgcttttctcaagcaggagtctttcaccatagtcaccactgctgggaatgtgctgggtcacacatgtagtaagtgcgtcccaagtgcccaaggctcacagcatactccctggctatcactgatggttattcagggtccgagggctctttaatcagcaggtgataaatccttccaagactggatctttctcttcaagacaatgggttcccttttgtcctagagtatgtcaagaaatattctctccaggagctagggcctggaatgggggcctcatgactgcctggtgccctctcctactgtagctgagctggtatccaagatgcaagacaaygtcctctttactctttgctctcctcgccttaaacagaaggaaggacgcactttcattgctgtgagttgcacttcctgggattgggggaggagtggcgcaagcaatcstttagctgctctggctagtgtctccctaggtcacatgccaccctagtccactggctctaatcccartccagcactaggagttgcctaggaattgaagtccttgtgtgctagactgtctttcaagtttaccaaggaccttagagcatgttggcccatggtggcaagacttgacaagaaactcaagctctaactgatgacatgcataacttccccttggctaagtctggtccaaatgatccctccatgtgtgagcaaagcctgagcagagcatggatttgctctctgctatgacagggtagtactgagttcaatgtaaagtccccctgtcactgtgctctccctcccccacataaatagaccctccgcacttcatggccactgccgggagataggggaaaggtggcattggcgattcaagactgtctctccaaccctcctcaatgccattttcattaacttttatgaagataaaacgaggtactgcgattgcttacctgattttttgttcttctgatggtgcttttctgtatgcagatagttgttaaaatttggccttcctgcagggggtacaaatggtatasggttctattctgccattttgctctgccctcataatttttaactgcagtctaaaaattgctttcaagtattatttacatagatattaaaatttccctgatagttaccatatgtttattcttcagacgaacaggcagtgtaatgaagataattgagaaagtgaaaattggaatgagaaggaggtagtcagaatcagatcatactttttcactagtatttgttgagtacttgccattggcaagacactgagtatatcgcagtggataaaatggaacctaaatttcatgaagcttactgtttaatgaaaaagagagatattacataaatgtcttttctatgcaaaaaaatacatgcttacaaactgtgctgtgtactatgaaaaaccaaggaaagctactaagagaagttttaatgtcgacttcatttagattggcacttgtcagtaaagtcttctccaaagatatgacagaataaattaccttcagatttatccaggtgaagatttggagtagaaacatttcaggggaagaaaccacatataggaagatgctgaggtagaaaagtgcttggtgagtttcagggaaagtttcatgtgactaaaattcagtgaaggatggagggtggcrcaagataaggctagacaaagaagcaaggatcatatgcagcgcttgcgatcatgctaagaattttgtaatttaagtggaaagggaaatcagggaaagattttgagtagacagtcacataatcatatttgtatcttttaaatattactttgcagggaatgtattggaaggaagcaagagagggaatgmgattctatgccaaaaggcaatgggataagatggtagattcgactagggtgatgataatgatagaattgaagaaaagtagcwaaatttaagatatataccagagatagtactgataggacatgacagtggactaaatttagaaaagaggaaagaggaggtgtcaaaactatctatctttcaacacagcaacttgttggttgatggtgtcatttaatgacatggagaaaccctgcagaragagaatatctggtagggctgagatgtggaaatcatgagttcaactattaagactattaattccacttgtgatccaaatacttcatttaygttttatagttacatagccagattcctcagtgtttttgaaccatgtcctccactagaaaaatcttaacatagatttcagagttcctagatctaagatgctactttcaatcaaggatcaatgaaaagactaattagaattaacttttaaggtagactttttgccacagattaaaaaataatatgtgcttaatctcaaatcgaacaatccagaggagagtaatcagccaaaaatttagcatgatggctaaagcttttaaaacctgatagtctgccttccggatcacactacctgcaatcttaacccaaacttttctatacaataacgtttcaggtgttctctctggtgatgaatgcaaatttgggagcaaatttatgttgccttcttctaaaatgaatttaaaagcagccccctactaactgaatgactcacaagctggaactactcggcagtggctgagcatatttggaggaatcagaagagaagcaggcttaggaaggggtagtggggtagaagtcagagttcaccacaggagtctcatgagaaagaatcccaaaatctacagtgaaagtagaaaatacagtctgtctcttttagtggaaaataagtggcccagtagtttcataatttccacattatacttgagtggtaggatcatagcatctaaaaacaatagaggcagggtagtaatgacaacaataattttaaaaatccattaaatgcatatcatgtttccagaactatactatcttccaaaattacctctgaacccctttgaggtaatgcccttatgactagcattttagagaacaggaaacaaggcttagagctcataggtcatttgccaaaagccatgcagttggtgaatgagagcatgaacagccagatacgtctgattccagaagcgatgttttctgctactatgccacactgcaccagcacacaaataaaagatgaaactaaaaaacccatttagtcaggtgtgctggtgtgcatttgtagtcctaactactgcaggaggattgcttgagcccaggaggtcgaggatgcagtaagctatgatcaccaccactgtacaccagcctgggaaacagtgagatcccgtctcaataaattaactaattaattaaaaattgcagtagtttttagtgttaaagctaggaaaaaaaagtaaaaactgtatatacattggttgccaaatatttttaaatccaaaataagggaaatgtctctgctatgctgggccatcctttcatgccatgtgggttctgaagacacagctgactactcgccgttattgaaaactaccttgagcttttgaacagcataatttcttacaaatttgcagatgcttgaattttataacatagctcttgtcattgtgtatttcttcccacactcttcaaaaagttgttaacctcctcagcaccacataacatttccatgtaacaaacctgcacatgcacccctgtatctaaaagttgaaatttaaaataaaagaatactatttaacaaccaccagaaataataaagttacttcagcacattttttaaagttgttaacctataattcattttttaatgtttgtgatatgaattcatttttcttcatctggtctttatcaccatacccctagccttcaatcactttagttgagcacaaattatgtgttgataagggatgtctagtgggaaaaaattagtttagtttgagtttttaaaaaccagtacgaaaaaagcaatgagatatttcaattcaatttttagtggagttctaaatatgatggttatgtagttatggtaatttctgcaaatgatgcaaataaaatgaagaatatgaaactttacctctcacccttcagaaacacaggaatggtccactcaacctccaataccacccatcctctttctcacagtagcaagatagtggctcccgtttttggcatcctcaactacagctgacggaactgagttttgaacaataaacagagtttacgagataagaaaagggcattccaattgaggaagacagtgtgtacagtatacagcaatgacatgaaggaaatcatcagaaattggggcgatgagtgctgatagaagatgaggctatataggtaggttgggaccaaattttgagggccttttatgctgtatcaaggaatttgaacaagtatttaggtaatggcaaaccactggcaagctgttttctttctgcattcaggcacttcatatactttcttcccctcctgttcttatttaggtttaaaaacaaagctaaccatacctctaactttttccatatcagttggctgcatatttctgcaatttaaaccatttagcagcctgatactatgattctgtgtatgtgaaactgttatttggcatgaagacagtcattaatttaaaagaacctatttgagtggaatttttgaagattttttccaagcaattgaaaaatataaacagaaaaataaaaaataactttggagaaaaaaatacctgtcaactactgaagccatgggtgttctatttctaaaagacacgtttcattttgtattactgtgtaattttcctctatgcctttttttttttaactggagtcattttatgtacaagagcttgacttcaaatcaactaagttcccagaatatttggctgtttcagtaccttcaactttcactataagggcttctacttcaaaaaaaattactctgttgaattttaccacattatccaatcaaaagtgtgtgcttctcctaaggcagggaacgttgttactgctggcccacatgctgaaaggacaacagaaatgtggaaaacttggtagaaactgtagagcagacaaaataaaatcttaacagcagcctaatgaacttggaaggtgttctgttcctctaataaacattggttttattttgcgggaagtgcttagttttgtttgtaataagtgtctaacatttaacttgttgacgtatgggcaataggaaaacaggtggctacgacaaggatgtgcaaaatagaggctctttcaaattattcattaaaatcactagatctgtctcaccacccctcaaacacagatgcatcaacataaggactggtgaaatggctaacaggcttcatgacgtctagaggtgttaatacttatatcactttaatttyaccacrcaattaagtaatgatgcatttaaatatatatatttacagtacatttgaaaatcttactgtaaaaataggatcaagataaatctttacacgctccaattaacatttgcttggtcttaggagcacggcattccaacggacatgggctacgctgtggcccctcaccattcgggcgtctaccctgtacatgttcagctttaygaggcctggaagaaggtctggaatattaaaatcaccagcactgaagaatatccacatctgaagccagctagataccggaggggttttatccacaaaaacatcatggtgagcttcctccagtatgcatagggtacaactaattctgcaagatttcattcctcacttgaagaaagaaaaacacaaatgttagcagcataaatgtaggaaaagctccatgctgcaggaagcatatttgtcatatctaagcagaaaatgttttaattaaaatcacttcttttcaattcttcaaatataactgaaaaaggttttgttactgacattaccactggtaagcaggcactgatgttaaaatactaaaaaaaaattacatttaacttgcagataatttttagtagacatcacttcttcaaaatgttattcagtatgaaaaactaacaccaactctgtctatattaaccatgctgctctttgacaagccagtcaaactgtgttcttctatttaccatgccaggctaaaaaagaactcaaccatttgcagccagaagccacatgtgaagccctgcataatcattaacatataataatatagagtaaaaatgacaggtgatgctaattaaatcatttgcatacaccatctaattctatcctgggcttctctgttttgttttttacaatttcagcaaatgtatattgtcaaaatatgctactacctcccaaagtaagcaattaaatcctaatttattcccaaatcagaaaatcctaagaaagtcctggtaaagctaggaatgggcctcctaatttagaatcacacactgggaagaaacaccacagaagaacactatgtgatgagccaccgtaacactctgttgaactgatatgtctgaagagatgtctaccctttagaattaggttataactgacttcttttcagagagtttttcaatgtctgcaaaaattacagagtggatagacatatagcttagatcatctcccatcttgacttttccctcaataaaaactgttgtaaatgctagacggggacataatggccacattttatcccaatctgcccttcctctgtactgaaaatgaacctactgtggctcaagctgccagaattctgaccagagggagtttagaagacctgggatatattttttcatttctcctgaaaacacatttttatctgtattataaatgcatgaatcatgcaggtaatcaaggctctaacagatttcctgttttgatggaactgtccctgtggatctgcttttgcagcaatctgtggaaacctatatttggcttgtgggctcttggatgagagtttccaagtgggaaatgttcagcagacagttgattacacaataagcgagagaaaataagactaggagccatccaaatagagaagcaagtagagaccacaggagccaatatgccctcctagggagagaatgcatctagaaatagggaactgaggagtgaactttagatcacactcttattttgctgtatgagagcaacttttttctgatgatccattcccaaatctaactcaaaaggtctcattatcttcccttcgaaccggctattgattgtgccattatccttaattcagttctgtaattcaaacatcattctatccccctaccaccacttccaatcagtgtctatatttcatcaataattcctttatatcttttttatttcctttcccactgccaccatcttaatttacttccttgactttcatgtgtgaacctggtgctgcttcctactttatctatttacaggttccatccaccacctcactgcagtctatcccatagacagtgccaaccttttaatctttctaaaatgctgcctttatcctggccttcctaaccttgattagttccagttgcttccatatcccctaatgtgcccttcaggtacctgaaaaccatctggactgtctayctttctatttcctatttccctatggctgaagcacactcactccaaccaaaccccataatagtattgctgttaccatgcctgtgtcattctttccaccttgagagactttctggccactatctacctatttctattccctttattcttcaatatcaaatcccatatcttaaataattgaaaacaaagcaccttagtatatagcaactcaatacctaactcatacctacagggatcttattctcctctgaattcctacaacacatcattttgtattttcatcaggaacataaacaccaattacactttaagctgtttgagccctaaccaaagtctctggacccctagttttattgcattttcaactgagtcattttccttcagccaagacctgatggaaaccagcactctctactctaatctctggttgttgaatatgactctctggaaagaaccagtatattagtccattctcacrttgctatgagtaaatacccaagactgggtaatttataaaggaaagaggtttaatggactcatagttcagcatggctggggagacctcaagaaacttacaatcatggcagaaggcaaaggggaagcaaagcaccttcttcacaaagcaacaggaaggagaagtgcagagcaaaccgggaagagccccttataaaatcatcaggtcttgtgagaactcactcgctatcacaagaacagcatgtgggaaactgtccccatgattcagttacctccacctggtctctcccttgayatatgagtattatggggattacaatttaaaatgagatttgagtgaggacacaaaccctaaccatatcagccagagacctctaaaaaattagactacacatcctatctacttactgtttttaatggaaatgcccattggtagagactcattaatcctgctgtaaaccctctaagtggtctttattggtatctccccagaagtatttgttggcagttgctcctgaatgagccttaggtacaggatattgacttcagtccacattggccaagattcttgttgatcatggctttcataataaactcctagctattttcagcagcaatagggttctcaggggttcatcggcatctcaaagtttgactttgatactgttacattcccagaaccaattctagggggcagtccacagcagaatgcctaaaaatgtttctcatcctttccgtagcataagaaagctgtttcaaggaacatgctcatcattcggtgccactgcatttatggagcaaggcagtggaatatgacccttatcacactcctgatcatctccttagcctcctgtagtggtccactgactcccsctagggctctctatggggttcataccctcagcaggagtagtgctcctgcagttgcagggtaaagcctgccacttcctcttcactgcattgaaattcaaataatttgagaaatagacaaaattcaaatatctttttgcttctctcttcgttttgcacagaatcagctaggcaatcaagtcccaaagatggctctgtatatatcctataattttccaagcaaaatattcaaactgaaccctagaagtgattcagtcatagtcatacacttttaaaatgttaaatgccatttaacacgtgagcattttattatgtagcttttgggtctttcccattaccccaatatagcttaaatccttcaagagtagaaaacatatatctttctgttctctcacatgggctggcatggaactaggatatggatctagtattctagcataaaactaactccatgcaacctattaacatacagtccatagctagttccactagcacttaactaaatctattctgtgggctagcatagagtttagaataaatatttgttaaataaatgaataaatactatataaagtatttattccaaatgctttccaaattcaaaatttcatttttaatttccaaatattacatttataatagttgttaggaaatatatttaattccattagaatgcatttgcatttagttgttttttgttattatttttgtgtatagataggatcatgaggatgcataatgcttttaaacatagacatcatcagagctaatattttatacttaaacagaagttttttaactattttattaagataaaatagcttctaaggatataacttctaccaacttaccaaaataaataggatatatagagtttttatttatgcagatatactgattgagctgtctgtccaaggactagattatacaataggttgtattatataaccagtattatataatactatccaagggctagacgaaaatttattttaatacacattcaaactaaaataaaaaataaaaataaaataaaataaaataaaaacactagtatatttctacagggttgcaaaacatgggaagtcctggacaggtaatattttgaaagcatttactgaaccaaatgtgctttaagactcaagacataaaacatgaagattgatttacttaggacaataagcagaagacctgtccctatatgattttgtaacatttgtagctctctgaagtatactcattaatgttctgctacttcaaatgtatagtgacaaacacaggtcaccatgaagtcattgtaaaatattctgcttaaggctttattatcttgcacaactttaattcacaccttcttttataattgcaaaaggctataaaaatttgaaaaaccttatcacgagtgtatataattgaagcagataatayatatatacaaaggatgaagagaagacctcttactaaatgaccttttatcattttgttgttacactttctaaaagtaacaaaccaagtgaataatctctttcttacagtaggaactggcaggcttcacacttagaatctgaggtaattactatagcctgcagtagtcctttcagacgagaacagatactgtgatttgtgtctcaaatattcattctaatttaaaatgtcattccctaagaagcacaytgagttgataactgacttcattttctaatgcatggcagaatttggcagaaaatattttcttaaaattattgcctattaagattacagtatagcacagacaatccaatactttttttaaagtctcatttttacttctttttttttaatctcttaagatgctagaacctactaggcttcataaaagaagtactcactttgatatttaaaacagacaagtagctaaaataacacaacacctattttagttttaaaatatttcttcaactttcttcactattccttccatattaacatcaccttcccttgcctagagtatgatagattgtccaggccctagttagacctgaataattcactagcttgtgcatcatcttgtgtgagcaaaaagctaagtttcaacaaattgattgaaaaaaaaaaagcttttccttacttttttcatttttccttcaggttctcccaagacaaacctgtgggcttttcactcacaccattttctacaaagaatatccagggggtcctaaagagctggataagagtatccaaggaggagaacttttcttcactgtcgtcctcaaccctgtaagtactttattctccaaataaatagtgaaaaatgatagggctggcaaaaattaccctggcaaagaggctagggattgggcagtcatcagccaagccaatatgaagttctagctctgaaacagtagtaaaaactaaatggaaccacatctagaaatgggaacaaaccaattctacaagtagcagtaacatgaggaactcatggcagaaccagggaagtgctccagcggatcctcctttgcattgcaaagtgatcagaagctttcatggggaataaaatttttcacctgtaaaactctcctatttccacggggaaccatttttttttccatttagacaacagttacctctattattatttttattttactatttaaagttaacgtagaagcaaaatagtagaggaattaggtaagcaaatctagttatattttctacttcatgttagattcgtcttgctaggtcataggctgaagcagagcaggcctatttaatgggctacttttttttttttgagatggagtctcactctgtcacccaggctcgagtgcagtggcgccatctcggctcactgcaagctccgcctcccgggttcacgccattctcctgcctcagcctcccgagtagctgggaccacaggcacctgccaccacacggggctaattttttgtatttttagtggagacgaggcttcactgtgttagccaggatggtctcaatctcctgaccttgtgatctgcctgcctcagcctcccaaagtgctgggattacaggcgtgagccaccacgcctggccgggctactcttttacttcttcatacttgtgtgtcagctccacaatgaaccatttgcatatatttctgcttgaggcaagtattagaaagttgtgtagagaaagaacaaatggaagtaagctgcataaggaaaagaagggattttatttcccttttgaaaatcactatcataaaaagtaaagctaagtttatttatcagaagatgtatgggtttgcccttggcattggcaatattcaagatggaaaaaaaattattatttccaaatgtaaaaaaaaaaattatcagtgaaaaaagttggatagggataaattgaataaaatttgcaaaacccctctcttgaccttagttttatagtccctgcaaataaaattgcagatagtgttcaccatctacttgtattcaaggagatttattgtgctcaattctgcttgtattcatcactatacctatgttttaactcctagaaaatgagatagaagaaagagtaactcatctttggacaaaacctgctcgtgtattcaaaaatggggatagtttggaggaatgtgatatttggacttttgaaagtttatcaaccttcagatcccaaaaatacaaataagtctggtytgaacatcagaaatataataactcttctaacttacctattttcacaaatggaagtattttgagtctccttatacagctttcttctcttttttctcaattcagccagtacagtaatatacagtcaaaaagagttaaaccaatgcctggttatgaactgaagaagcagttaaaacactcttaaaatgctaacattttcaccaataattttaagcactttaatctatcatctgtaaaattctgatgtttcacatttactttcatcatagagcaacagaagtattaacaaataatcatgaacttcttaaaagttcacagtaggattttatctccgaatttctaaaccaaatgagtttcatttagtgtggaagaaattcaaagttaaatcattcatgtacaatggatttatactaagaatttcatccattttgtgataagaaatattacattttttattaatttaaaaaccaaactattgtctttgtttttaaaaaccttacagtaaagtttatgttaatcttggacactaattggactaactgagcaaattccttaacaaacctcgctatttttcaggcctttatgaatgatatttggcaattttatgtcttgaggaggagattcataagaataaaggtggcaggttgggggagccgcacaaaacttgttctttcctgattcagaaaactttcagtagacaattactttcagaaaaaaatccctagactcaaaataaatgacaaatcttgtcagatgccacaagacagacaaggaacccaaagctaacgttatctggcacaccaactctaatactggaagcaattctactcacctggaaacaaaaggttaagaagcccacatctggattcagcccacatctagccggaggccggactactataattagttagtgatgtctgtcttggagaacagagtaaggagtagtggcatgtttcccatgaattctccatcctgaaattaagtgcttggacaaagtttgtattgaaactaaggaagatccagatgcagtaaggcatgccagtaatttagcagatgacattttttattaggccaggatggaaatgagaaaaccttgatggaatcaaagtatacattagctgcaggaaagtcatgaattttaattatagtggatttgaaagatagccattgtaagtttaagtaataccccaggcctcaattagaagtgccattttctgagaatgccaagtgaggttatcgtttactacaaaaagatagatgtgtattggaaacatggcacttaaatacattcacatacatttgagctgaaaacraaaatataaacaggactttaattaatgagggttttaagtttttcccatatgtcaacataatatcaaggtgctatactaacttaccagtactggggtgagaaagggttacaataaggtgcccctcagagttaaactggaaagatcacagcaaaggtaaaaaaaccgttaaacagaataactctctggcctgaaatgttctaatgttaccaaaatatttgtcatgtaaaagaaagaagtatcaatcaagtgaatttaacaaaatagagaattacaaagacaaatgttagcactgtctggggaagagaaaactttggtcatctctaaatgagcttttccaatgtcacaggcctggacaactctcacgtaagctggatgcrggggttttgattaatagactttgaagtttagatccatttgggggaggtggacctagcaggctatctgagcctggaaccattgagatttccatttttctaatactacttttcctgattctaaacccaactgatgacttcctcattatggtttactttcccacgtagatcctactataggaaaagaatatgttaatcataggaacttgtactctctgggacaataatttgcaatataattttataagttttattttaattgatcaatacttcccatgtaaccggactacctggaaagagccctctaattgtatagacagtaattgaagagtatttcagttcctctctaatttataattacccattttaaactaatagatggtatcctgcttttattcattggtttcatgagcttttgctaatctgattctgccccagaaaaatactgactctctctgcaagtgtactgaatcaggttttggagcctgtcggtcagaaacagacctcagagtgttcgttgattaaggatggtaatgagagttacctcatgatataccatgggagagagccactggaagtaccccagagtcactgctagcaacacacaggcatgagatttctacacaaacatgtaatatacctagatacaaacattcttgatcaatttacaattatacagagtactcatatatattttcaaaaattgtgakattctatttactttagatacttatataaaataaaatgcagaagggtactaagaactgaaacttatgaagataacaaaaaggattaattggcaatgactgcatctgccctcaataaataaaactctatatatgacgtatatacttagacaaaaggaactagtacgactatagtgttcattttaacaagtttccagttccacctatcttaggaagatgcagtaatagttaattaatatgctgattggaaaagttccggcttagacaggtttgtacttcttgtgggagccatattatcatctcatatgcactaaacaaaaatgtcacttttttgcttcagggttcttatctctaatcacaagatgttatgagtctttgcttatgcacttgttgaataaatagactccaggtattgagtcattaacaactatagatatagaacactttgcctcccttcaacatgcttgataataaagtcagtgcttacctattaatccaaaaaagcagctgtggattgccacaagattcatgccaatgggccaggcgcagtggctcacgcctgtaatgtcagcactttgggaggccaaggtgggcagatcatgaggtcaggagatcaagaccatcctggctaacacggtgaaaccctgtctctactaaaaatacaaaaaattagccaggcgtggtggcaggcgcctgtagtcccagctactcaggaggctgaggtaggagaatcactggaatccaggaggcagaggttgcagtgagccaagatcacgccactgcactccagcctgggcgacagagcgagactctgtctcaaaaaaaatgcgcgccaatactacacttgcttggaattcaggtgaagcaaatccctgaccatgtaacaatattgtgcctccttcatcaaaccattaaccatcccacagaaccattagctaacccctttatgcacgcattttattaaatgctttttgtctctctgtttctcaatttgatatagcatacttccaccataccctacataccctcctactcaaatccctaaaagttaaatctaaattgtgtttctcttattataaacatggatgtgaatagagtgaatatcttaaactaggattaacacatagattgattacaactaaaataaataaaacagaattcactcaagaagaaagcctttataaaaagaaattaacccacattgaaattgaaaaaaaatactgtaattttatatstgtatgtgcttttctctaaaattcatctgaaaggaaataatacattgacctaatgggaagttttatgtttctttttttgttcgctagttctggaacacattctaataataggagacccttcgctgaaaaataaataaatgataataactttagacctagaaaagtaattcctggtctaacgtttaagtctttaatccatcttgaattgatttttgtataaggtgtaaggaagggatccagtttcagctttctacatatggctagccagttttcccagcaccatttattaaatagggaatcctttycccattgcttgtttttctcaggtttgtcaaagatcagatagttgtagatatgcagcattatttctgagggctctgttctgttccattgatctatatctgtgttttggtaccagtaccatgctgttttggttactgtagccttgtagtatwgtttgaagtcaggcagcgtggttcctccagctttgttcttttggcttaggattgacttggcgatgcgggctcttttttggttccatatgaactttaaagtagttttttccaattctgtgaagaaagtcattggtagcttgatggggatgacattgaatctctaaattaccttgggcagtatggccattttcacgatattgattcttcctacccaagagcatggaatgttcttccatttgtttgtatcctcttttatttccttgagcagtggtttgtagttctccttgaagaggtccttcacatcccttgtaagttggattcctaggtagtttattctctttgaagcaattgtgaatgggagttcactcatgatttggctctctgtttgtctgttgttggtgtataagaatgcttgtgatttttgtacattgattttgtatcctgagactttgctgaagttgcttatcaacttaaggagattttgggctgagacaatggggttttctagatatacaatcatgtcgtctgcaaacagggacaatttgacttcctcttttcctaattgaataccctttatttccttctcctgcctaattgccctggccagaacttccaacactatgttgaataggagtggtgaaagagggcatccctgtcttgtgccaatttttaaagggaatgcttccagtttttgcccattcagtatgatattggctgtgggtttgtcatagatagctcttattattttgagatatgtcccatcaatacctaatttattgagagtttttagcatgaagggttgttgaattttgtcaaaggccttttctgcatctattgagataatcatgtggtttttgtctttggttctgtttatatgctggattacatttattgatttgcgtatattgaaccagccttgcatcccagggatgaagcccacttgatcatggtggataagctttttgatgtgctgctggattttgtttgccagtattttattgaggatttttgcatcaatgttcatcaaggatattggtctaaaattctcttttttggatgtgtctctgcccggctttggtatcagcatgatgctggcctcataccataaaaaccctagaagaaaacctaggcattaccattcaggacataagcacgggcaaggacttcatgtctaaaacaccaaaagcaatggcaacaaaagacaaaattgacaaatgggatctaattaaactcaagagcttctgcacagcaaaagaaactaccatcagagtgaacaagcaacctacaaaatgggagaaaattttcacaacctactcatctgacaaagggctaatatccagaatctacaatgaactcaaacaaatttacaagaaaaaaacaaacaaccccatcaaaaagtgggcgaaggacatgaacagacacttctcaaaagaagacatttatgcagccaaaaaacacatgaaaaaatgctcaccatcactggccatcagagaaatgcaaatcaaaaccacaatgagataccatctcacaccagttagaatagcaatcattcaaaagtcaggaaacaacaggtgctggagaggatgtggagaaataggaacacttttacactgttggtgggactgtaaactagttcaaccattgtggaagtcagtgtggcaattcctcaaggatctagaagtagaaataccatttgacccagccatcccattactgggtatatacccaaaggactataaatcatactgctataaagacacatgcacacgtatgtttattgcagcattattcacaatagcaaagacttggaaccaacccaaatgtccaacaatgatagactggattaagaaaatgtggcacatatacaccatggaatactatgcagccataaaaaatgatsagttcatgtcctttgtagggacatgcatgaaattggaaatcatcattctcagtaaactatcgcaagaacaaaaaaccaaacaccgcatattctcactcataggtgggaactgaacaatgagaacacatggacacaggaaggggaacattacactctggggactgttgtggggtggagtgagaggggagggatagcattgggagatatacctaatgctagatgacgagttagtgggtgcagcgcaccagcatggtacatgtatacatatgtaactaacctgcatattgtgcacatgtaccctaaaactkaaagtataataataataaaaaaaagaaatattaaaaaacaacaacaacaacaaaaataaaataaaataaaagtaattcctgaacatgcctaatagtgagtactgcctgagatgcttgaattttagaaatcaaacttaatgcatcagaatctctaggattgacctaggggctctacatactcaccatgcgctttaggtaaatgttaggatcaggcaaatagagaaatattgccgaggaagaaaatggagaagtaattttggtaatcaaagattaccaaaaactgttatagaaattgtaaacctagaatcaaggtttcagaatggaaaatgrctccaaatctgcaatagaactttaaaaaacagtaagaattaatgttttcctaagtgaccagagaactctaccttaaactggattttaaaatagtgtttactgctgttcatcccaaaaacttagtgtaggggtcaccttcctcaggaaactttttctactctgatttagaggcccctcctgyrtttctatagcatcctctgcagactctttcaaagtatttattatcctgcatcataattgtgggttgtattagcctgtacgcttgtggttgtagagaatgtgtctgtcatttccaaaactatcccagtgtctaaacataatatgttttacctagttttttattttgcatatatttgttaaggaaaagaaattaacttttctaatgaactgatttaaaaagaaaaatgaatctattcataaaaggaaatccragtcctcgtaagaaaattctcaaatcaaaagcataaggaaaacctgtttcctgaattcactggggctgaattatgtatcgttgtgttctgttctttacacatgcatttgtcttcctgtatagagactcatttgtgttgagttgatatagtttaaagactagaggctcattcaagttacctcaggtaatgggactccagaaagtaatattacttcaagtaatgtgggactccagaaagctacacattcaggaatcataggacctagagggtgttctgagaccaaggtagctgtaaggtccataaaaatcagaatttctttaaaacttatgaattgtttactattgaaatttttcatttaatttttctggaccacagttgacaattggtaaccaaaaccctggaaaaggggcctactgtaaatatttttctgatgaggtcgctttacttacaatagaaataaaactttaaacaaggtaaagaaaaaaatgagaaatgctaatattaatcttgccttagtgctttattttgaacccaacagatgcttttcacatgtctaactttctcttttctgtactcctgactaaattaatattccttcaaaaaaagtgctgcttgtttacggtttctgcagtagttaattaatcttacaaatggcccaatatgaatgcatcagatattctccatatcaagattcagctccagttctaactgctgactgcctcgtccgctggattctcaggtcgaatttccaagcaagggaatccacttgcttcagctcacctttctgagtcagcccatatcagtcctggccttctgtgaaatgtccattcttggttcatatccccacatgccccccacttctaaactatgactgagcaacggctacctgagaaccatccttccagcaaaggcttgcaaaggcaggtgcgatggcagctatctatcttgatctgaatcctgtgagaacagtcattatggtttctagccaatcccacagatttgggagtaaactgaacctctttggagaggctcaaaagattcattttgaagcttgcaaagtctaagtagaataagtagctctcttagatgggaccagctaattttatcattttattatatgtattgctccatacccacttggaatgcaagttccaataggcatttatatcttgtgttttgtttactctaaacctcaacactaggaagagttctggcattataaggtacttaaaaaatattttataaatgaatgaatgaacttaaatgtccaaaagggagcagcggagtggccagtagcaaaataaattatgttcacccttatgtaataaaatacattatgtaataaaatacgctatataataaggtacattcaggcatttaaaacatgttgtgtaataagtttggctgggtgtggtggctcatgcctttaataccagcactttgggatgccaaagcgggtggatcacctgagttcaggagttccctgaccagcctggccaacactgtgaaacccagtctatactaaaaatacaaaaattagccgggcgtggtggtgcatgcctgtaatcccagctacttgggaggctgaggcaggagaattgcttgaacccgggaggcggaggttgcagtgagcygaaatcgcaccactgcactccagcctgggcgacagagagagactccatctaaaataataataataataataattttaatgacgtgaaatattcatgatcttctcaatgggaaaagtaaattacaagaaaatgagatatgagtatggaaataaactagaaagaactcagcagattgttagcagtagttatcctagatcacacaattgaagatgatttccattatcttcctctaatttttataaaatatctatagtgaacacctattagtgttataaccagaaacttcatacacatgtacacacacagagacacaacacacacagagttacacaataaatgctacactaaaaataataataatcacttaatagtgatgtacataaaatggaattattttgtgttgttggtatatcaggaatagaatttctatttactcagttccaattgttctgtatctgtaagtcacatatgttgcctaacacctgccccacagtgtgattatttgtgtgtgcatcttttctactgtataatggggcattcttattacagaggtaatctgtgtgtgtttcatctttgtgctttccattgtgtctagatcaatgtttgaatctaataagaggttgctaaatgtattttaatgattgactaaacgcatgaagagttatatttcaggggcatgacttgctttaaggtatatccaaatgtgaatagcaagcctagttttaataaaactacatttggcagagtctctgcttgcaagtaaatgaaatttagacttcagaaaatgtttgaatggccctaaatctttagcaggttttcataagtgatgatgaaatttacctgacacagaacaaaggactattaaactggaaaagaccaggaaggttatctatcaatcttttaatttttgatggagaactagaattccaaaaagattatttagttcactgcaggtcacttctatagtattccgaccagaactctgttcttcctgactctcagttcaccacttcacccgctacaacacactgtttctgcacgcctggctaaattggtcttgacgtgatgtacattccttcttaatatgagtcagtgacctggtactgggaaaatctgtgagtggtttaacatgtcaggctattgtctaagaaaaagcaaaccatctccatgtagggttaaaaagcaaaaaaatagtgcttttgagaaaagctgtaataagcacttgcagttaaggaaaaatgtctaatgtacttttaaagaactacgaataaagaactatgttctctttatcttaatacattgtattgatattacttataaaatggtaagacttttaaatttataaagccaaaacattttatttcatctttttgctatcctccatattagccctatttttctattattaatgttcttcatcactaactgtggtgttagatacagcaggtccttaaataatgttgtttcatttaatatcatttagttataatgttgataaggaaaacatcagttcccatccagggccaatctgtgtgtagtttgcacattcaccccatgtctatgtgggttttctcctgatactctggtttcttcctacatcccaaaaatgtgcacatcaggttaattgtcctgtataaattgtgatggaataccatattgtccagggttggttcttgccttgtgccctgaactgccaggataggccctggcccccaagcaatcctaaactggaataactgggtaaatgattatcttacttgtttttattactctttcctaaatatatgtagagctaacatttatttcaatgtttaatattaaagttctttggttcctatttagaagctgggtgatgttttgggggccagaaatatgtcataggaaattaactcttgtttagattatttaaccaatggtaaaattggttttgttatatgtcatttggtttacagtttcagtttccaagaacctaccaataacattaagtgagaacttactgtaattacttgtcactctgagattaagaaaaccacaagaaagcatgattaagttgtgctttttatttgacctccatagttaagaaaaataggagtttttggaatggatattatcttaaaatgtaagaaaatagatattaagttggagaaatgaatattatgttattctttgttcaatcctttgatagtttcccatagcaatcaatgacacccagtagcaaagattttaattcctacatactaaatacaaagtgctcagattttaattcctaaatactatttctagcattcaggatagacagaaaatttcttcacttgaaaaaaatcaaatctggctcctgtccacttttctcatcctttttttcaataatttcttatatgcacctttcactccacccatacagaataattcatagtaccttgaacaaaactttgtactatctcactctatgtcttaaagtgctatcacctcaagctggaatgccctcctgcaaatttgaactcatacatcatttttttaaagaagacatccccaaccctccagcttgatttctaaggtttctcctctgtgttctcatggtactcaggcataacccaattataatttgcctacagtcctataatcaattatctttaccttccagtaatttttgacttccttgatggaagacatcatgccttattctattttacattcacagtacactgcaaaagttttggcacatagtaggttctaaataaaagacaatgtgtttcccatgacttcccatgactacatacatactatctttggaatttgaaagaaatttggttgccttggaagtacctcaccacagaattcacttgaktacagagggtttgagtaactggtttttattgtctcccaacatggcattttattgaagtcattgagtttatgagaatatgctcagtttcactcataataagaaaaatgcaaagtaagattatattgagacactatttcttacctaccagattaacaaaaattcaaatgattgctaagatattctgttagcaagtctgtgggaaaacaggtactctcatacatcctagtgcgtgagcaaatggtacaaccctaatggaagaaatttaacaacatctaacaaatctacatagcacttgctctttgctgcagaaattctacctttaggactctaccttaaagaaggaattaccacaaagtcaattttttaatgaacaatctgagtgcaaaccattttttcagttattcattaccggattatttgtacatcaaatagtgggaacaacctaaacatccatccataagagactagttaaaaaaatctgtggtatagccatacaagagactactatacaaataaaattaagaagattttgatgtgctgtgatttccacaatatattaagggaggaaaaagtgggcaatctgaatacatattgatatttacctacttgtacgaaaagaaatacaggaaaaacacaccaaaaataataaaagtgttttgttaattattaatagaaattttaaaaatttaaattattaataaaaagaaaactacatttaaaatggggggatggtgggatgagagcagaaaagtaagggggtgagtgggagaaacacttcactacgtacattttttacacagttttgtttttgttttttttttttttgagacagagtctcactctgttaccaaggctggagtgcagtggcgtgatctcagctcactgcctccgcctcccaggtagcagcgattctcctgcctcagcctcccgagtagttaggactacaggtaggtgccaccatgcccggctaattttttgtatttttagtagagacagggtctcactgtgttagccaggatggtctcgatctcctgacctcatgatccacccacctcaacctcctaaagtgctgggattgcaggcatgagccacctagcccagcctatagctttgattttgaaccatgaaatgttttacatatagtcaaaataataaatgaaaaggatgagggagagataagcaaacctgaaaattgaagacaaatgaacaaataaacctaacatggatgtgtatgtaatatattacacaaaataattaattaaaataattttgagtacagtattctaactgcatacgtttagtgaaatataggacaaaagtctgcatggaaaatataaactttattaataaatttttgttgaattatgaaacatttctcatgtattgtcagatagaaaaaaataaatgaatatattgatgctgttgggaactgagttttcgccataaaacgaataaaaatatggaaagaaggataataagagagaattagagtatttaaatttgaaatgaggagattaataagaacttaaggtttcctacctctatctagaatcaatgacacttagtagcaaagagctcagctagtgctcaaattttaatttctaaatactatttctccccaaaagtaagtgggctttttggagaaaaggctaaattcaagtcagatacatggaaagtacaaattgagtctggaacaccttgtaccagaaaaaagggaaacagtcactcaaagactaacaagcttgtattaaacaggacagaaatcagctaaaagtgctcttgatatgagataattttagcatcaaaaaaatggaggttatagacatactcraagtatgaaaaaagaaggagagttcttctgtagaraagacaccagtgccagctgatgaattcaggtagaatgatggaattcaaagatcatcattttgcagacaccaatgaaaacaattgattgaaaaaagaaacatcaatagttgctgaaacttttgggtgaaagattacacagccttaaggtttaattccatagattacttattaattacaaagagaaaaatcattcttcacaatagagaaatctgacagtttcttactgtacccaagtgatcagamttaacatcaccaaaggtggagtaacttaacaagataagctgatattatgcacctcctgtgattcaatacaaaataaagtagggtgacatcagcaaaatgatgaaatagaaagtcccatatcctccttccttccatagagtcatcaactgaacaacaatacatgaattaattccctttgtgaaaaatccagaaacaaattaagacactgctggaccccaggcaagcgcaaaaccagctgcatagaggccagtaaaaaaattcacaacactcacttgccatagtccctttcactgactcagcagagagcaactggaagaaaactcccagcttctagcttctcccacagtcccataggaggaaaagatttggcttgtacatttttgtacattgaacatttaggcttttggcaggggacagaggggcagaagggtgggtggatggttgcccgagaaactagtttttatcttatctgtctccaagtgctgacaggacccaatatattctagaagccaggggctgctgacaacaaaagacagcttggcagcttatagcagctccagagaacaccagaaggagtaatagattacaaggtcttggaagaaaatcaaccagtaaatccctctaattgagaatttacacacacaagtctattgcagatgtatccacagactagaggtgagaggacctcagaatctcttacttggctgattggtgaaggtttgttcctatacaaaccctgttttttacagagtgagagaggaagctattttttgaaatgcacagaccacaacaaaaggtaacaaggcgcattaagaaaaaggaaaatatagaccaatccaaggaacaaaataagtctccagaaaccaacttaatgaaatggagagattaaattacctgacgagaattcaaaataatcatcataaagatgttcaataaactcaggagaaaaatggatgaacaaagtgagaatttcaacaaagaaatagaaaatattaaaaatggaatcaaatagaaatctcagacctgaagaataaaataactgaagtgaaaaaatcactacctagttttaatagcaaacatgattaagctgaagaaagaatcagggaacttgaagacaggtcatttgaaattgcccagggagcaaaataaaataaaacaaaataaacagtgaagaaagtctaagggacttaggaaacaacatcaagtttgcaaatatttgtattatgggagtctcaaaaagagaagaaagagagaacaatgcagaaagcttattcgaagaaataatggccaaaacttcccaaatacggaaaaggaagtagagatccaagttcaagaaggccaacaaactccaactaggaagaactcaaagataaccacaccagaaaaggttataataaaaatgccaaaattcaaaggatgttaaaagcagaaaaagaaaactgattcatcacataaaagggagcctccataacactatgaggagatatctagcagaaacctttcaggacaaaatggagaagggagatatattcaaaatgctgaaagaaaaaataattgccaactgagaatactatagcctgcaaaattgtccttcaataatgaaggaggagcttctgcacaacaacaaaactgtcaacagagtaaatagacagcctacaaaatgggagaaaatatttgcaaactatacatctgacaaaggtccaatagccagyatctataaggaacttaaacaaatttacaagaaaaaaaaaaaacaactttatttaaaaagtgagcaagggacatgaacagacacttttcaaaagaagacatacatgtggccaataagcatattaaaaaagctcagtatcactgatcattagaaaaatgtaaatcgcttcatttcattcatttcatcttccatcactaatatcctttcctccagttgatcgcatcggctcctgaggcttctgcattcttcacgtagttctcgagccttggctttcagctccatgagctcctttaagcacttctctgtattggttactctagttatacattcgtctaaatttttttcaaagtttttaacttctttgcctttggtttgaatttcctcctgtagctcrgagtagtttgatcgtctgaagccttcttctctcaactcgtcaaagtcattctccgtccagctttgttccattgctggtgaggaactgcgttcctttggaggaggagaggtgctctgctttttagagtttccagtttttctgctctgtttttcccccatcttcgtggttttatctacttttggtctttgatgatggtgatgtacagatgggtttttggtgtggatgtcctttctgtttgttagttttccttctaacagacaggaccctcagctagaggtctgttggagtttgctagaggtccactccagaccctgtttgcctgcgtatccacagcggcagctgcagaacagcagattttcgtgaactgcgaatgctgctgtctgatcgttcctctggaagctttgtctcagaggagtacccggccgtgtgaggtgtcagtctgcccctactgggggatgcctcccagttaggctgctcgggggtcagggtcagggacccacttgaggaggcagtctrcccattctcagatatccagctgtgtgctgggagaaccactgctctcttcaaagctgtcagacagggacatttaagtctgcagaggttactgctgtctttttgtttgtctgtgccctgcccccagaggtggagtctacagaggcaagcaggyctccttgagctgtggtgggctccacccagttcgagtttcccagatgctttgtttacctaagcaagcctgggcgatggygggcgcctatcccccagcctygctgccgccttgcagtttgatctcagactgctttgctagcaatcagcgagactccatgggtgtaggaccctccgagccatgtgagggatataatctcctggtgtgccgttttttaagcccgtcggaaaagygcagtattagggtgggagtgacctgattttccaggtgccatctgtcaaccctttctttgactaggaaagggaactccctgatcccttgagcttcccgagtgaggcartgcttcaccctgcttctgctcacacacggtgcactgcacccactgtcctgcgcccactgtctggcactccctagtgagatgaacccggtacctcagatgaaatgcagaaatcacccgtcttctgcgtcgctcacgctgggagctgtagaccggagctgttcctattcagccatcttgggtaaaatacctaggaacccagcttacaagggacgcgaaggacctcttcaaggagaactacaaaccactgctcagtgaaataaaagaggatacaaagaaatggaagaacattccatgctcatgggtaggaagaatcaatatcatgaaaatggccatactgcccaaggtaatttacagattcaatgccatccccatcaagctaccaatgactttcttcacagaattggaaaaaactactttaaagttcatatggaaccaaaaaagagccctcattgccaagtcaatcctaagccaaagaacaaagctggaggcatcacgctacctgacttcaaactatactacaaggctacagtaaccaaaacagcatggtactggtaccaaaacacagatatagatcaatggaacagaacagagccctcagaaataatgctgcrtatctacaactatctgatctttgaaaaacctgagaaaaacaagcaatggggaaaggattccttatttaataaatgstgctgggaaaactggctagccatatgtagaaagctgaaactggatcccttccttacaccttatacaaaaatcaattcaagatggattaaagacttaaacattagacctaaaaccataaaaaccctagaagaaaacctaggcattaccattcaggacataggcatgggaaaggacttcatgtctaaaacaccaaaagcaatggcaacaaaagccaaaattgacaaatgggatctaattaaactaaagagcttccgcacagcaaaagaaactaccatcagcgtgaacaggcaacctacaaaatgggagaaaattttcacaacctactcatctgacaaagggctaatatccagaatctacaatgaactcaaacaaatttacaagaaaaaaacaaacaaccccatcaaaaagtgrgcaaaggacatgaacagacacttctcaaaagaagacatttatgcagccaaaaaacacatgaaaaaatgctcaccatcactggccatcagagaaatgcaaatcaaaaccacaatgagataccatctcacaccagttagaatggcagtcattcaaaagtcaggaaacaacaggtgctggagaggatgtggagaaattggaacacttctacactgttggtgggactgtaaactagttcaaccattgtggaagtcaatgtggcrattcctcagggatctagaactagaaataccatttgacccagccatcccattactgggtatatacccaaaggactataaatcatgctgctataaagacacatgcacacrtatgtttactgtggctctgttcacaatagcaaagacttggaaccaacccaaatgtccaataatgatagactggattaagaaaatgtggcacatatacaccatggaatactatgcagccataaaaaatgatgagttcatgtcctttgtagggacatggatgaaattggaaatcatcattctcagtaaactatcrcaagaacaaaaaaccaaacaccgcatattctcactcataggtgggaactgaacaatgagaacacatggacacaggaaggggaacattacactctggggactgttgtggggtcgggggagaggggagggatagcatgaggagatatacctaatgctaaatgatgagttaatgggtgcagcacaccagcatggcacatgtatacatatgtaactaacctgcacattgtgaacatataccctaaaacttaaagtataataataataaaataaaataaaataagaaaaatgtaaatcaaaaccacagtgagatacataccagtcagaatggctattactaaaaagtcaaaaaataacagatgctggtgaggttgcagagaaaagggaatgcttgtacactgttggtggtaatgtaaattagttcaaccattgtggaaagcagtttggcaattcctcaaacagctaaagacagaactaccatttgatccagcaatcccattactagatacatacccaaaggaatataaattgttctatcataaacacacatgcatatgtttgttgcagcactattyacaatagcagacatggaaccagcctaaatgcccatcagtggtaggctggataaagaaaatgtggtacatatacaccatggaatacaatgcagccatagaaagaacaaaatcacatcctttgcaagaacatggatggagctagaggccattatccttagcaagctaccacaggaacagaaaaccaaataccacatgttctcacttataagtgggaactaaatgatgagaacacatggacacaaagaggggaacaacagacacttgggctgaccacagggttgaggctgggaggagggagaagaacagaaaaaataactcttgggtaccagtcttgggtacgtgggtgatgaaataatctgtacatctaaccgctgtgacatgagagtacctatataagaaagctgcacgtgtaaccctgaatctaaaattaaaagttagaagaaataaagacctatataagcaaatactgagggagtttattaccactatatcgcctttacaagaaatgctaaaaggagtccttcaagttgaaatgaaaacaccctaggcagcagcagaaattattatgagaccataaagctcactggtaaaggtaaatatacagaaaaatagataatactgtaatattttagtggctgtgtataaatcacctttaattctgatactcaagttaaaaggcaaaagtataaaaaacactataactatatgacaataataaaaagggcaagggaggtgaaagaatagagttttatatccaattgaagttaaagttgttatcagcttaaaatatcaactttatatttgttacaactataagatgttttatgtaagccccacagtaccacaaagaaaatactttttaaaaactaccaaataaatgagaaagaaatcaaagcctatcactatacaaaaatcaacaaaacacaaaggaagacagcaagagaagaaaagatggacagaaaagcctcaagacaaaacaattaacaaaatggtaatagtaagtgcttccctatcagtagttacattacatgtaaataaattaaactcctcaatcaaaatggatatagtagctgaatggataacaaaaacaagatccagctattgttgtctacagaacactagctttagatttaaagacactcacaggctgaaagtgaaagcatggaaaatttattccatccaaatgttaaccgagagagcaaaagtagccatattcatatcagaaaaaatggactttaagtccaaaactgtcacacaaaaaaagaaggacataatctagtgattaaaaagtcaattaaccaggaagatataacaattataaatataaacgcatgcaaattcaaagcacccaaatatgtgtaataatcattgagataactgaagggagaaatagacartaacacaataatagtagaagatagcatcctactttcaacaatagaacacttagaccaaaawtcaataagaaaacaatacttgaacaacactatagacccaattgacctggccaactgatacagaacattttactcaacagcagcagaatgcacatgcttctcaaactcacacaaaatacattccaggatagattacatgttggatcacaaaataagtctcttttcagaacattgatatcataccaagtatcaattcctaccacagggaatgaaactaaaaatcaatagcagaaggaaaaatgggaaattaacaaatatgtggaaattaaataaaacactcttcaataacaatttgggtacaagaaaaaaatcaaaagagaaatttaaaaataccttgatataagtaaaaacaaaacacctaccaaaacttatggaatgcaacaaaagcagtattatgagggaagtttatagtgataaatgtctacatttttaaaaacagaaagaattaaaataaatagtttaattctacctcrgggaaactcaagaaactagaaaaaaaagagcaaactaaactcaaaattagtagaaaggaaacaataaagattagagcaaaaataaatgaaatagaaaatataaaaataagagaaaaaatcaatgaaattggttttttgaaatgattaacatcattggcaaacctttagttactaacaaraaaggaagaagactcaaataaataaaattggaaatgaaagagaagacattacaactgatcactggaataaagatgatcataatagtctataatgtacaattatacactgataaattggaataacctagaaaaaatggatatatttctaaacacatacaacccccaagacttcatcttgaagaaatagaaaatctgagcaggcttgtaactagtaaggagactgagtcactaaccaaaagccttccaacaaagaaacttccaggaacagatgtctttactggtgacttatatcaaacatttaaagaactaatgccaatccttatcaaactctccaaaaaaacggaatagaagggaactcttccaaactcagtctatgaggtcagcaatagcctgataccaaagccagacaaatatactatgagaagagaaactataggacaatattcttgatgaacatagatacaaaaatcctcaaaaaaatagtgcaaactaaattcaacagcacattaaaaggttatacaccatgactaagtggcattgattcttgggatgcaaggatgtttccacatacaaaaatcagttaatgtaatataccaaaataacataattaaggataaaaatgttatgatcatcccaatagatacagaaaaattgtttgacaaaatgcaatatgatttcatgataaaaacttgcaacaaagtaggaataaaaggaaattacctcaacgtaataaaagccatatatgaaaaaccccacaagtaacctcattcttcatggtaaaaacctgaaaacttgcstgaggaacaaggcaaggactcccactgtgatcatttctattcaacattgtactggaagtactagccatagcagttaggcaagaaaaaaaaaaagacatccaaattgtaaataaaagagtaaaattatctctgtttggaaatgacatgatcttatatttagaaaaccctaaagatttcacacagaaacatacacacgcaggcacacatgcatgcacacacacaaaaacaactgttagaattaacagttccaggatacaaaatcaacatacaaaaatgagttatgtttcactaaccacaaactatccaaaaagaaaattaagaaaacaatcccatttataatagcataaaaaagaataaaatacatagaaataaactgtcccaagtcagtaagcaacttgtacactgaaaactgcaaaatattcccaaaagaaattaaagaagatacaaataaatggaaagatactccatggtcatagattggaaggttaatattattaaaatgtccatactactcaaagtaatctacagattaaatgcaaacctcatcaaaatcccagtggcattttttaccgaaatagaaaaaacaatcctaaaattcacatggaaccacaaagggccccaaaaakccaaaacaattttgagacaggagaacaaagctggaagcatcctacttcctgatttgaaaatatattacaaagatatagtaattaaagcagtatggtgatgttacaaagatagacacatagaccaatggaacagaatacagagcccagaaataaatctatgcatatgttgtcaactgacctttgacaagggcatcaagaatacccaatgaggaaaagatggtctcttccacaaatggggttgagaaaactgaatattcacatataaaaaattaaaatggacccttatcatacaccatacacaaaaatctatttaaaatggattaaagacttaaaagtaagacctgacactgtaaaatattccaataaaaacataaaggaaaaacttcattacattagtcttggcaatgattcttgaatatgacaccaaaagcacatgccacaaaagcaaaaatagacaagtggtggaattacatcaaattaaaaagcttctgcacattaaaaaaaataaaataaccaactgagggaaaatgcaacctatggaatgggagaaaataccctcatattgtatgtctaataaggagttaatattcaaaatataaaaggaactgctacaactcaatagcaaaaaacaaaaacaaataatccaattagaaaataaacaaagaacttgaatagtcctttctccaaagacgacatgaccaacaggcatatgaaaagaaattataggtcaatgctcctgatgaatatagatgtttaaaaaagtcactaatcatcaatttttatataaattcatatatataaatataagtaagtgctagtgagaatgtagagaaatttacatacatacaaaagtcactaatctcatatatatacacacaagtgctagtgagaatgtggagaaattagaactcttgtacacagttggtaagaatgtaaaatggtacggctgctatggaaaactatggaggttcctcaaaaaattaaaaatagaactaccatatgattcaacaatttgacttccgggtatacatccaaaaaaactgaaattgggatcttgaagagatacatgcactctcatattcactgcagtattattcacacagccaagatgaggaaacaacctaaatgtccatcaatcggcaaacgggtaaaaaacgtagtatattcatacaataaaacgttattcagccttgaaaagaacagggaaatcctgctatgtgtgacaacatggatcaacattgaggacattatgctaagtgaaataagtcagtcacagaagaacaaatactgcttgattccacttaacatgagatatctgaaacagtcgaactcataaaagcagatagtagatttatgattgccaggagcttggggagggttcaatggatataaattttcaattatgcaagatgaataccctctagagatccagtgtacaacacacacacctataattaacaatactgtactgtatatttaaatttttaagagggtaaatttcatgttatattgttgtatttttttaccacaatttttaaaaagaaaaaaagaaagaacttttaaaatatctttttgtattcttaatctaatgaagaaataatcagacaaatgcaaacactgatatattctataaaacaaatagtctggacttttctaaaaaggacaatatagtgttttttaaaaataggaagaaagaggattattctagcttaaaagaaactaaaaggcataataatgtaatgtaatttataagcctaagctttcattggatctggaatttttaaaaatatacatctataaaagtcacttttaagttattttttagccccaaaataaagaggcttaaaaaaacattaatcattttacaatctctcatgatttctgtaggtcagaaatcagaaaaacctgaagtgggccgggcacagtggctcacgcctgtaatcctagcactttgtgaggctgaggcaggcggatcacctgaggtcaggagtttgaaactagcctggccmacatggcaaaaccccgtctttactaaaaataaaagaattagcctggcatgrtggctggtgcctgtaatcccagctactcaggaggctgaggcacaagaatcgcttgaacccaggaggcggaggttgcagtcagccaagatcaggccactgcactccagcctgggtgacagagcaagactccatctcaaaaaaaaaaaaaaaagagagctgaactgggtgatcctggctccaggtttctcatgaggttgcagtcagatggtaactagagctggaaaaccaggtggcagtgactagagcatctgtgagctggtgggcatctcttcatgyagtcccagggcttttccatgtgatctttaccggggggcttatctgggtctcttcccagaacaatcagacagctttaaggctccatcaagtgttgcagcaagtaaggcagaagcagaattgccttggattcagaagtcacagcatcacttttgctgtcacaaaagcctgcccacattcaaacacagaataaataaattatctctctttataggagactgacaacattctggaagaaagagaaattgtggtagtcatttttggaaaatagaatttaccacagacaacaatgaggcaattggggaaatttaaatctggactgtataatagatgatactgaattaataaccagttttcttaggtgtgatgatgagattcagttatataaaaaatgtacttattcttacatgatacatgccaaaagatttaatggcagtgtcttgatatctgcaacttgttttcaaatgattcagcaaaataaaaaataaagagagagaccgggcaccatggctcacgcctgtaatcccagcactttgggaggcagacccagcactttgggagacagaggtcggcagatcacgaggtcaggagttcgagaccagcctggccaatatggtgaaaccccatctctactaaaaatacaaaaaattagccaggtttggtggtgcacacctgcagtcccagctacttgggaggctgaggcagaagaatcgcttgaatccgggtggtggagattgcagtgagccgagatcgcaccactgcactccagcctgggcgacagagtgagaccccatctcaaaaaaagaaacaaagaaaaaataagtgtggtgaactgtaagtaatcagagaataggtaaaggttacacagatgttcactctactaattatttgccttttctatagatttaggatatttttctcaattaaatgaagagaaagtaaaatataagtcagatagcattatttttctgctcacaaccctccaatcttctctcttcggagtagaaggcaggctgcttaccaaggcctgcaagatcctgtgtgattcccaaagcttacctctctgatttcatctccaggcaaaggaaacagcaagtacaaaacccccatgagtgtgcttggggtgttttagaaacagcaagttgtttacaatttcctacttttaattgatgtttcaaatatcttctacttaaacctttgtgtacacttcttagagaattcctattttgacctcaagtccctgcctactcatttctttctttgtagtagaaacttcagccctaaaagaactcagtcaaagccaaatcatttctcactacccccaaaaaggcctacaaatttgggccaggagaggcaatcctggcaaggaaatttttttaaaaaggtcccagttacactcaaattgggagtttcactaaattgatatcccccttaggatgcttaatgctcagcttcaatcttacctccagggcatatgatattgtatcatatctgagatttagattgctgaggcatttcctatcmtaactcagtaggttcttaagattttactttgcagagtttaatccactggggtttttttgtctggttgcttaggctaatgctgcttggtgttctgagcgacctcacttccctgtggccctagagtgtggggtgacctgttgcagatgttagtaatttcctatcttgggtggaggccctcacagaagctttatttgcatatgagtgtatttgcccctgatgttttggtcttrgatgtcagcggaattgtccgtccttctgaaggtcatacaataccgctttccagggaggtattataacacagataattgaataattgggccctctctgttttccaaaaggagtgggtttgccacatcttttcttgcaaactagcaaacctagggttaagtagggcttgttggtaaatgtagcgtgtcaggagctcacagccagatatgagccagtaagcaacgtaggtgtcctgggatgacaaaggaggaacatacacacctcagttgtcttgctgattctactctgtgcttccatgtccccttctgtaaaaatgtcaataacactacaataataatagaggtctctcttatgagaaattggttatttagtagacattataaatcaaggtttcaaaaagtattatcgggccatctcaatgttcattgcagttggcatcagtaaagtgaacatggtcaaggtgatattctctaaccatagtaaaataaagggctgaggcattcatttggtgtaaataggacaaacaccagggaggcttggccaggtgtcttttgtagtaaaattgggattctgagattgctgttttccaacttggcaacagccttaaacrtcttggtatcctttaatgttatgattccacttctagggatgtctcctaaggaaagagtgctaaatagagaaaaagtgtaaattgtaatggcgacagaaaatagaaacaacctgaatgtccaactgaagggaaaatgtgtaaataaatcatattcactttatagatgattgtacagacttaaaaatttatgcttatgaataatttggtgataacatgaggtatgagagatatgtataaaaagaatacaaaattatacataaatggcaaagttttaaaacaaaatgtcattaaaataacaaaaagatatggatctttgaatgttgaggattgggcatatttttctttctgctcttccatattttttaatttttctttaatgattttatgtcactttttctaacaagaaggataaagcactgattaaaagtgctaagatgagttcttagcaaagaatgattattcctatctaattatgtattaacatttatatgaatcatactaacattatatgactcattttaagataatatattaagaggttcattaaaatgatactttttgagtatataaggaatctttttcttcacatttcaaaacattaactctttctaaaagtccatagtgtgagaggtaaaacactaataatatgtaaactatcagcaattgtacttctcgccataacaactgtatggattgcagacaagaacaaggaaataaataagaaagtccccttgagaagggagagaagacaaaaggaatctactttgtgccaggcaatgtgctacatgctttcataaatgaccttatttaatcctcacaacaactctatgaggcatatatatgtgtgtgtgtgtgtgtgkatatatatatatgataaaataagatatatacacatcttattttaccctagcagcaattctgttagatgaggaaactgaaaattctaatagatgaagaaactgaggttcaaagaagttgcataattggaccaaaggaaaacaactaagaaacaagtccacattctttccactgtcattgtgctttgttgatagactacccctggcccatgctcatagccttagatagcctcatttttaaacagaatttggtcacacttcttagtctggtttcttatcctaagggatgtagtatacacaaacattagaacatgacagaaagaagagaaggaatgctagagcaatagcaatggggaatgaaagctgacaaaagagtaaaccaccaaaacaaaaaaacaaaaacaaaactcaaccctattaaaaagcagcccaggaactcaaaaagcatagctatatagcagtatggaactattttatgacagaatatacaactctatgtcatgctgaggtaatcatcatattcagtactttattttccatatactctgtatgtacacactctgtatacagtatgtatatgtattagggggaatgtaatatataaaaattttttgaacaatgggtattgccactctttcctttaagggttctggcttgatgaagttttgttcattggtttgtcttgctttgctattgtaatacatagaattccagtagaagatctacaaacacaagctgattcttaaactgagaaagcaatatccagagtcagaacttgctttttgcttatctacctaactaaaagctgaagaataaatgaagcagtgactggttattgatacactttgcaacatttcactagaacaacttaaaactggaattgaagcatcaactgaagatttctgtgcaactgtggtttaaattgaatgctgcgctttgtataaacataattttttgtggtttaactttaggctgttctctgcggtcttcccatataatgggaatgcgtcagaagcacagcttcgtttcctgtgtaggctggaaactgttaactgcaaagtttggagacagtctcagagagctcactgccatatgttaaactaaacttgatatgaaaaatcatatcagtttccagtttcccagaacattaaaaagaaaaataaaaaaggagctcaagctttataaatataaaaagcatctgtctgcacaggaaattctactctgttattttgcaaatgatccctacttatatttacaagagaaatcagatctgatgaactatatggaagtaacacattattttgttcaaaattttgaaatatatatttataattctgtacagctggctggactgtgaactaactatcattgtacagagatctcaacagtgctgcccagcatgatcttaaagcatgtatgtttccaagtgaaaggtgatggaatattttgacagcatgctgctaacttaaacatttttgtttaatgtaatttttgtgtctaagtgctcccaaccaccatttccaagacaagaagactcatgagcattcagaaaacatttggcactgtttcattttaattttttacttctccttgactctttgagcctagaaagaattttctctgtagttgctcacccaggtacaagtgtccttgagttaatcttcggtagctcattttagaatccgactgtgactaaagttggattctgtgactgccttcttgcctgcctctccactgtcacctataattttgtcatttcttttgctctgaaccagcttgctatgctaaaagccatcccttcctttcacattttataatcctcataagattaacagccaaaatccatgaccagaactctgaccacgtacagtctacagaggacttcatgctaccttgatawtaccccgtattttaccagcaaccatctctcagacttgactataaccctctggtgtacctcatcaattcaatgctccagtgtttatccttgatttcattgttttcttgcctcacagaggtacctagagattttttccaacagaatctttctgcctttttcacttaatagcctatctatgccagtattcccaagtaaactccctttaactgtaaagccattaattttttcttctgatttcttcttttctctttcccacctttgtcttgcccagtttttacttattttcattcctctagtaacttaggcctcctcttactctcagttccttttattaccattattttctctaaaatcagattaatatcatatattaataataattagtcatccatcactaagtagtgcccacatttactaacttctctgacttaaaagttgctgtcttatctatgttcttttctttcctagacaacactttggaatagtatcttttctccccctaccttatcacaagaagattaaaatgactcttctagtaacaattacacctaccctctcttatctcgcacactgggaggcacacgccatgggccctccttgatagaggtgaagctaaaccatatccttgtggcaacttataaaaacctcaattgtgtggtttgcctctgcctgttcctgagggcatgcagacataacgaacttctctctcagcctggacctgtgctggaaaagagtttgacgcccactaaaacaggcatttcactgtgaattagaaagcctctggagaagagactttatgtaaatgtgtgttctcagtgtggaattgttcttccatgtttacaattgtttgtgtgtctttttctctgtgccaaatttcaggtgactggagactgattagctggtctgtgctatcctyactccactttagccaacacattgcacattcttacctccaaagtggcaaaaaatgcaaatgtgtatcattatgctttattagctttagtaaaaagtttgccatattaaaggttaaaatttttggcaattttttgtactcctcgaatatctaattatttagattaaaataattatataattattctagttacctttcttgaatttaagtcttaaaaaaaaccctgcaagcaaacatttacctatgtaacaaacctgcacatcttgcacatgtaccccagaacttaaaatttaaaaaaaaacctgcaagcaaacctatcccctacatattttctcatacttcatccatacatttaacattataaattcttttaactgtttcttcttaaattactttgcactatgccttcataacattatatgcagatagaaagttgcatattattatgaccaaaggtcatttattatctaacctttcatcttggtgttgatgatggtcagctcattaaattgttcttctcaacctgggagaattaagccctaatgctcttatgaatccattgcacgtgatgagttcacttctctagctttgtacccttgttgtgagaattatgaaaataggcagttgaattattttctccataatratatagagaaataataatacagagaatgtggaatgttctcaaaaactggttaagaaaggctacattaagaaatatttattaaacttctaatatgagacacccactacactaattgatagaacaaaaaagctttgtaagccataaccctttctcttaaagaatttacattttactttatgagatatgaaataatctgatgaaagatctggaaaataatcaatggaatttgagattgaattatgcagcatcaacttgaaatttgaaagtaaaaaaaactatgtgaacttcatcaataatagaggtcttcaaggagaaggtagatttaagttgaaaccttaatttagatttaaatgaaaattgaaaatagacaatgaattatctatgaattgtgaggaagtgaggaggcattcaggacaaggaagaggaaagccataagacagtaataagcaaatcaggtgatagaaccaagagtcacaagcaaatcatttaaataatccaaatatcaaatttcttaactattaaaaaaatagggaaaatgtcagtctcacagggttgtggcaaagaacaagtttgtgaagataatgtatgtgaaggtactgggaaatatagagacagtaagggctcctggtaaataggataggattcttaggataaagacagcttaggaaggtttttgccatttgcctctttctcattaaaatggcatgcagattattcagcatcctctatgctgtacagcatgaattatttctagaagattaatcaccaaatcaaatgcaaaagcatccttctaccaagttttttcttgtctttgatgaaatcactgggttcactgcttttatcagttttcatttggataatatttaaaatgctcttttatcccaatttgaataccctcaatcaatgtcagcctcttttaatttggtttaagattacaggaaaacatcatgaccctatagatttttccaccacaactattaagaacaatggagccagacatattttaacaacaaaagaacatgaatggagtttgccttttgacttatcatttaagtcctgggtttcagatcatgataaatatttcagaatggggtaatcctggatcatgattataaagtatatcaaggctgcaacacaagtgctgctgggattttttaaagggaaacattcttatgagtcttgaagtctcaatgaagaatggaagatttgaatgagttttcctggatgatcatgattcggttaggtgaaggagtggagaaggcaacaatctgcaggaagaataatcctggaatgtttagaaaatccaggaggggctttactgaaatggaaatctaatactggagaacaatgagaaataaagttggatagttacagttaagttgaatgagtaactaattcagtcaccacacacaccctattttaatttcttaagcatattctgagggtctcaaggacccacaggaaaaaaaaaagcataagtccttttaaaaattgtattatatctacgacatccatataacaaggctgaaattagaatctggatgtgttattttaatatttttaattgtgataaaatacacataatgtaaaatttatcatcttaattatttttaagtacagaactcagtagtgtcaagcacattcacattgttgtgacacaggtctccaaaacattttcatattgcaaatctgcatctctatatccatcaaacagcaattccrtattcctcctgccccgaatccttagcaactactattctgttttatgtctctataaacttgactattccaggtacctcacttaagtggaaccaaacagtatttttcttattgttactggcttatttcacttagcataatatcctcaaggttcattgatrttatcgcatgtgtcagaattttcttcctttttaagactgagtaatattccattgtatgtatatatcacatttggtgtattcattcattcattgatgaacacttaaattgcttccaccttgtggccattgtgaataaaagctgcagtgaacatgggtgtacaaacatctcttcaagaccctgttttcagttgttttaggtatatacccagaagcagaattgctggatcatatggtaattctatcttcaattttttgaagaatcattatactgttttccatagcagctataccactatacattcccaccatcagtgcacagggattccaactttctcacaaccttgccaacacattatttcctgttgctttgatactagctatcctaataagtttgagattattttagtattgccaaatattgtgatttatcctacttgcaagctaaaagttggccagctacaattcatggatgctggaagaaggcatgaggttaaatataaaggacagcaatagcaatagccagaatatcagatatattacctaagaggaactccaactttagagaacccaaatctcacataataggcaataaacctgtctgacttttgccctagaaagtcataatttttattatggtggacaatagacaaacctgacctttgccctggggggagacactatttctgtcttccaaggctgtttactttacaaatatctttaaaaagatagtccagggaaaaaaaggcagtcagtatatttgcttgtaagatttacctaaatgagagacccattgaaagcgtgccataatgagtaacttcacatatttttaacattagtactgcataagaaaacatttattcctataaatcagatatgaatagtaatctataaattgaggtttgcaaaaattaggtttttttaattaaattagatcataatgcaagccctcattctgccataattactagaaatctaacttcagttatctgatcaatggtgagaatttggaagtggtaagggagggaaggtggaggtccactcccaattaaacttttttaaaaactagaaaagttttagtgtctggaaaatgaagtaatatcctgtagccttaaacctattattgtgtttaatatatatgtatccttggcttaaatgagcaagactaataaaatccagaaacagcctcattatttttcctgtgcccatccctataagccaatctgtagggctagttcctcccatctccccagaaaaaaaactcaagtaagcctcaacattttttggttattctcagatactaaaaagttctccagtcactttagttgtgaataagtctcaatttagtaagtaatgtatccaatattatataataatcaaagtactaaatgtaatttaaggttgaaacytttaacccctgccctcatcctacagctctactttactacaaggaaggctcttcaatgggaaaatgaggatgatagactttgtctctatttcctaccttacgcctccagttaacatggttcttaacacatctagggtgaaaatagagggggagtggaggaagaggagaggtaagagccaaagacaaagaaatagggtttgtttgtttttttaacctttattttagattcaggggatatatgyacaagtttgttarctgagtgtatttcctgatgctgaagtttggggttcaaatgatcccatcaaccaggtactgagaataggacccaacagctagtttttcaactcytgcctctctcccttcctcccctctctggcagtccccagtgtctactgctgccatctttatgaccatgagtatccaacgtttagcttccacttataagtgagaatatgtggtatttggttttytgttcctgcattaattcacgtaggataatagcctccagctgcatctatgttgctgcaaaggatatgatttcattgctttccatggctgtgtaatattctgtggtgtccctctttgagtggtacaaagaagtacacagatcaacttaggagacaattcagtagcctgttcaaaataacccactaaatgccaggaagtaacagyttggagacaaatttggttagataggygacttttcaatttagctttggtttaatcttgagtcttctcagagcctagataaaagcctaagaagaaagcaccacaggattgggtcatgtagtgcatctacagtgtacctagttgtacagacattttctagaggctggtgggtgacctaaggtcaagtagcccatttcttgaccagcttatacttttacagtcatcttatttttcagtgatgaacactctaatatctcctaagtgccctcacctaaccacacaggaaaaagaggaaagaaacgaaatacctgtgaattccaacagccagagtttgtgtcccctgcagtaataaccatttactgtaaccactgtcagttacctttaaaactacagctcttgccaatgactcatcaggcaaagtgccacctcatagcacaaactaatccttggtacccaaaatgccaaagaaatcagatatctcaatgtaaaggagagcaaagcttcagacttgaggggaacctactcacgattctcagggctccatgaggaagacagagtactccaaaaaagaaatcagtggcaccttccctgtgttgttcctcaaagggtatcagagtcaccagaagtctcctttaggtctcttcaggtagccacgagaactctattccctcttagtaatttcccatctcctgaccaccaaatgaaggaggtaggggctagaagagaaacgtatcaagaatgcaaggaaactggatggaagataaacgatggttaaaaggaagaaggaggagcaggaaatggaaagaacagatctgagaggagccagtttgagatcttgttttccaaaaaggccagggaagttccacattatcttcagcaaaaataatgccgacaagaaaggaagcaaacagaagggctgagcatttagttagcatgagtttgagaagcttcaattaactgagaagctcccatgggagaagcaagatccaatacagagaccagagaggccttaaataaattataccctgaatatcaacttccaattaagctcacttctgaccatagagctcttttaaatatcttttcaaaaattatcagatttcggctgggacaaacagcaaatattcttggctctattttctcccattaagccaacaatattgaactaatcttatttaccagagattcacctaagtcacatgaaagtgaaaaacatttgggtttgttactatattttcagcagttttaggtatatttagttaatatgagtgtccatttatctataaggcaatttgaaactcatttaagggattcaacaaataaaataaaccaaaattttaaaccaaaggtatacctaataggtgactcaggacaaaaattaataagccttttatgatttaaccaaggattcacaagtcatctctgcagaggtgcaaaaatgcagccctctcaaggtccagagccacttcccaaagacagccaaaagagaaaaagattcagacaatgctttgagagctggcaatagtaggtatgctagctacacatggggttcaagccacatttttgtctggccatattttgggggccagaccacttttcagttggttcatcatggaagcaggcccaataaaatgcatgccctgacaggcaggaagccaagccaagttctcgggacacgaattgaaacaaacaggaaaacaaaagctgttcatgggagggaaggattagtaacaaattggtaccccaagaccaaaaggcacaattcaaacatttttcgtatagtgactcaaaccaataatactatggaaagttcaattccagagactaagacagcaaagacttccattgccacaggtagtaatgacagtatttatgtaaatggtatctccagtctcccacaaaaaatctgggatgcctccagtcacaaatacagtaatctgtgacaacaggcaaatgatactgggatgggagtttccctttactaaccaagcaatgaggacaaggacttcttataagacaaactcccctgagaattgaaatgatcaaaggaaacctctgggttctaggccattcagctggctgcctgacacaagccaacactttgcactttcctaaaatggaacagagagaatgtcttcaatggtcacaaagccaagatctcaggatataaaacaaaagagaatctcaggatataagacaaaaggagaatctcatccagtttttgactcagttacctacagcaaagttagtttaactaaacagaagtctggtaagaactacaaatcyaccagcctgtcaggccagtttgagcaacaaccttagaaagcctatgcctgtgctccttgccctgtgattctgctgtttatgataaacaatacaaaagacagacaacagaaaacaaggcagcatctctgcaagggaagggatcagaaaataagactactcataccaaacaaacaaacaaacaatcaccagattcactatacccagcaactcgtacatacggatgattttctcctgctaacctgaattttggaaagaagagatgagaaaattttaccttccattctccaccagacgacactacaggcagagatccaggagggctgtccttggaaaacaatgtttaccatttctttgctggcttttcatctgttgttccagaatctcatctgcaggctctggagcaagtcaagtgtcccagctgccccacattgggcaccagaactataggaataattgactaaatcactgggcacatgattgagctcggtttccagcccttctcttctttctcatccttctgaggattcaaggatactggtgatatcatttgattcaaagctccaccagtctaatcaaatggtcggtctttctggcagggcctatccccatcccaaatcatttcattagtataagctatctagggccccaccatgaatcatctcactagtataagctatctggacccaccatgaataacaaagaactcctatcatttgggaaatttcagagaactagttttcctctcaagaactagagacaaacactaatcaaattctccattacacaacaatcttcaagtggatgaatgaccaaaggttttttaccacctcccttgcaagacaagtggttcaggatctcactctggaatttaggataattgctattgtcttctggcctcggatgaaaactcagtctaaaacatatttacatatgttgcatatttacatcctcttaatcgtaaattggctaagcctgcatgactgcagaagggccagcagatctgtggcttctatgtgcgtcaggctgggaaaagggcaccttgactaagtttggaaacccagaaatcttggctgtagcctgcacagatgtaccacggggcactcactcaaatgcaaagtcctaccacttactcacggtgctagaagggtggctcaggccacccctcactcacagaactcctgttccaattttagttttacagagtctcacttctctctcctcttcttacctagcaaaataatgtcaaaaaactagatgtaaggagaatgaagttgacaaaacagtttaaagaatcatttcattgcacatggcactgaagaacaaaatgaaatcatttctttaaaaagtattcatcctctgccatggttaatcttacgtgtcagtttggtaaggccatggtactcagatatttgttcaaatattattctaggtgtttctgtgcaggtatttctttagatgagataacatttaaatcagtagcctatgagtaaagcagattaccctccataatgtgggtgggcctcatccaaatayttaaaagccttaatagaaaaagactgacctccccagaagaggaaattctcccagcagattgtgcttggactcaaactgcaactcttctctgtgtctccagccctgcaaatctggggcttaccaagtctctatagtcacaagccarttcctcaaaataaatctctgtctgtctgtctctcattttctctctgtctccctttgtctctctctctctctctacayacacacacacacacacacacacacacacacacacacacatattctctgtctctgttggttctgtttctctagagaaccctaagacatttttaatattgtataacaatatgcaatattaagtatacataatttattagtagaaatgtgctttcattctatgcatcaaaggaatactctgtactatgtacttacttgctgtaagcatgtttgtggtctgcattttcacatgtgccctctgactatgaaagctgcataattacaaactatctccaggcctttccattttccatgaagtggctttttctttattacttaccttttatttctgcattcctactcaactggcaaataaattgaggcacaaatgaataagactttctactttaatttaaggataataaatatgagtcactaaatttttgtacaacatatcctattagtttcttatatttcgttaagagacaccaatgctaaagagacatgtaacagggaatagctgtttaataacatcaaagaatgttaaaatataattgaaatgatgggtacatatgctactgtacattttttaaatgtatattgaatttcaaagaaatatttgatatatgttaccattaattatttaatatggaagaaagcattttacttcatgctgtgtgtatatacaaactaaacacatttttaattgtctatgcatttaaattatttatgaacataagggaagcttaccaaatttagttcactttaacaggaaatcaaatgcactggtgtaataaaatttgtgatgataaatgcttgtaaattaaagccaataagtataagataaagtggtatctaataatatgtatattayacatttattataaattatatatattaattttataacatacatatgatatatgtagatatcattaaaagaaaaaccttagacaaattaaatttaacagtttaattgagcaaagaacaatttgcaaatcaggcagcctcttgagccagggtacattcagagagattccagtgcagccacatggttgaagatttatggacagaaaaaggaaagtgatgtacagaacatggaagtggggtacagaaacagccagattggttggttacagttcagcatttgcctaatttggacatggcttgaatagttggctacctttcattggccaaaactcagtgattgacacaagaatgggtttatttatttacatctccatttacattatagttcactatgtatagagaaccctttaggctgcacttaaagtatgtaaggaggcatatgctttatgctaaacttaacaatttcccctctaaaattaagaggatgaccaaaactttagtcattgatgtcactattaccatcataattttacttatttggtcttgaaacccagtgggaaaacagtgggttttataaagtagaaacaagcacttcaggttattttttgggtaacggtcagaggagagggtacctccttgttttggaatcttctgcttacaggagaaaaacaaaatctggtctgttttaggacctatctacttccttaaagtttcagtttgattgtgtcatatttagcatgagtgactccattttagtttggtctggtctgctggggcctactgtacmaactcagtctaaaacaatggctcccataattttctttaaaaaaattcctccattttgattaacttctctgtattagtcagagttctctagagggacagaactaataagatagatgcatataaaaagggaagtttattaagcagtattaatgcacacgatcacaaggtctcacaataggccgtctkcaagccaaggagcaaggaagccagtttgagtcccaaagctgaaggacttggagtctaatgttcgaggacaggaggcrtccagcacagaaaaaaatgtaggctgagaggctaarccagtctgatctctccacgttsttctgcctgcttttattctgatcacattggcagctgattagattgtgcccactcagattaaagtgggtctgcctttcccagcccactgacttaaatgttaatctcctttggcaacaccttcacagacacacccaggatcaatactttgcatccttcaatccagtcaagttgacactcagtattaaccatcacattctcacttaggtaacggtgtgacaaaacttagggccttagtgccacttcagttaccatcattttgggtttctagtttcagcacatcattcataagtcatcatgtcctcatggtcacacatttctttaagcttttgtcattacagttcaggagagaccatttgacattcttgagatggctgcatgcaaacattcaaaactttttaaagaaaacagcacatgagggagactactattatgaccatgaggaggataataccaagagtttggagtatgctttttagccagagtcyccatgaaccaatccaactacaattaaatagatcaaagaattagctagacaaagagtctactcatttcaaccaggtagcctgttcattaatcccctagaaatgaatctctataatacccaatgtattccttcacgtacaactagaagtaccagcaactatacagatacttctgtttagccagcaagtaatctagagcaattcaattatttagcataactttcacaagagaattttaagtctgttgtgtagccagagcttttgcagtagaatctgctacagagcctatcatgagggataaatttctaatcattgcctcatctactcccaaccacagaawgagcgatctaacaaatgatatccatccaaaagagagaagatctcctgtaaaggttttctttaatccatgatgtaccttaagaggagtggaccaatgttctgtttttgattgactatgaaggaacaaggctaacatttgttgttcgtattggtccttcatctttcatctctcaaggcataaggttgtccatgtggaagtttggctgcgaaatcttccacaaataaaagtataccccaagagggcacataagagaccccctttttagctctattgttgttagagacataagcaagaaaaaatgagagattaagagtttcataacagcagacaattcttgatccatgatcttgggaaaaagccatccacatcaatgatgccatcttcttggggagaaacctccctggttagctttaccttaagagttccaatgggcatacatttccaagactgtggaatgacccttctcagttgtgagattatgaagccaagactcaagttcccaaagttttgctgcagtgtggatggcaagagcaatctttctctgatgttgctcccagaagacccagtcttcatattctagattattaaggggttgattgtcctcagtcagtggaccataaaaagctttctttaactggtgaaaatacactttggcctaatgagctactgttacaacatcagccctcttgcctaggaaagcttttatacaaccagaaaacatacattgaaaatgaaaattgaatgaaatccctctataaatgtttaaatggcccatcaggtaacagaaatgtacctgaagtttagattatcttcctaggaatatgggtttaacaaaccaaacattgatcataaactattttagcaatttaggacagttacaccacctataaatatcattaatatatgatatatttattatatattattaatatataatatattaataatktatatattaatttggattcctttatcatttccatgatgaatcatggattgtacagcttttaataatgaaaactttaaagactcagaaaagacaaagcagccatctaagttctccctgagtccacatttaacattggacttatgtcctcttaaatccagttgtttctccgatttaggtgcagagcactgataactaataggctatcgcagataatttgacttgcaccatggrgtttattcaaattgcatatctaaacagtagtggctgatttagcatgaaaatctgagaaagtattttcttgatattcaattaatttttgtcttgcttgggttagcagttttaaaaaccagtcagtttctcattagatttctgggaattcttatccaggcttcataatatgatccaaaagttatcacaaacctatatccaagagtgcttaccagggtgctttgaatcctttcatgaacctccttaaaaacacagtaccctaagattctatgtgcttgtgaagttttcaaaaactgcatcagaattaagcaattaactgtagaaatgactttaaatggtcatagttaaagacaattgacaaggaaatttggttatttctttgacctataaaataacttcacataataaccataactgtgtagcatatactgagatatattagaattttagaaatctgatataattttagaacatatattaataatatattcattaaaatataacttttttttgagataagtctcactctgttacccagactagagtgcagtgccacaatcttggctcactgcaacctctgcatcccaggctcaagtgaccctcccaccccagcttcccaagtagctgggaccacaggtacacgccagcatgcctggctaagtttttgtatttttagtagagatggggtttgcccatgttgcccaggctggtcttgaactcctgagctcaggtgctctgcctgtctcagcctctcaaagtgctgggattacaggcatgagccacagcatccagccaataacttgaagaaagttaaacatttcttatttgtcactgcttcccatgtaattcaacatgtcaaataatcctatttatgtcttttttggatgtttcaggagccctctgtagcatcccaaaattgaaggtcaaaaaacacaatactgaagctgaaatttgatttggggaagcctgtcaaatatgtcaaaggtttaaaatacttaacacaaatatgattataagtaaccataaaataatagtcatttttttagccaatgtaataattaaaagattttttaaaaccaaaacctttactctttgatagaggagactcagttttccaaccaaacgacctaagaaagatagcatgagacagaatgtctctcctctcttctattttttatagtttactcaaaggcgaacaaagatattttactgtcatttattaatactccattgaaattttcctcaaaagagaaaaccaaattttatttttagattactgtattatcaatgctaaagctaattgtaataaaacttataactaaatctatgaaatttgtcatctttcgaccacacaagatttccataggtcttttatgttttacatttttccccaacttcctaggtttatgtaattttgcctattttttagtccttcaatttgaaatgtttaaataacttcaaactagataaaaaaaattttaaatacacattttatgtctttattastttcctcatcaaaagcatatcttgcttttgtttatacattctgtatacagaattgtttcatatctagtagtagtaatataattatatataaactctaatttaactattagaaccctaatttatagtgaaaactctgaaagtaattttgaactgttttatatcagtatttacaaataaaaaccattttataatttttttcaaaagatggttcaagttattgttttttaacagacctaaatatatttagcttttctgtacaatataaaaaaagtcaaggtatatagaattaaactcatgtttaataagtaatatttcagtttttaacttacaaatgattcagatattttatgtctatgtgttaattaatttagcatagtatgtaagatttgaaatgactgaaataaattttgaaactatgacacaggtaccttccctaatgtcttccccagtcatcttgggtcccaagtagccatgtggcatccaggaggactatgaagggtagggcctgtctgagtcctgaatttgcataccaggtatagaggtcaggacagaagacagagctgtgaagactatacctggagaatctaaccactcccgaagtaaccaggaggcaaagctggggcagggaagaaagggccatattgggtttgactttgctgcatagttgctggtctaggcactgaaaacatgtctccagacctcaccatggccacctatgcagacccccaaacccagaggctctgaaccaaaacataagctccacagtcaaatcaagcaagtatcaaattatattcaattgtattttgaagtcattcctattttaccaagaattttaaaacaagttttatttatcaaatattatcacatacgcataatacatatagacctacaaacacacagacagaagcagattttatacctttcttaaaggattctcatttgccagtttttaaagagtttttcttttccccattcagcctatcaatcttccaattacctattttgtcaccctaagccattgttaactaggcaacaaatttgcatttctaaagggaaaactcttaggtgaagcaagaaaatttctatttcaaaagcacagagctaacactttaggcctaaatacagtaccatttgctcaaaccaaggggaaagtggtgtaagtaaaagttaagttagataagacggccagaaaagcaccttaaacagatatatgacttgtgcaaattaaaacaatgggaagagtttctaatgtacataggcagacatcttacaaatggagatttcctttataggtgtgaatttcttttacaaaagggtttcaggaaagccagttaaattccagaaaggtgtattccagtttgataggtggtgatcttttaaacttagctattgtttcttagctaaaattactgagttcaggatggagtccattaaggaatagagcaaagaaagcattctctaggcctggactcagcatggatgggtctgaaaaagcaaggctacttttcccaagggcctacttaatttttgtgggtatatagtaggtgtatatggggtacatgagatgtattgaaacaggaatgcaatgtgtaataattacataatggaaaatgggaattgcatcccctcaagcatttgtgtaaaaaacaattcaattatgctcttttagtaatttaaaaacatacaattaaaatattattgactattgtcaccttgctgtactatcaaatactagtttgatagtaggattgctgaatcatacggtaagcctattttaagttttctgaggaatctccaaactgttctccacagtagttgtactaatttacattcccaccaataatgtatgagggttctcttttctccaattcctcaccagcatttattattgactgtcttttggatataagccattttaactagggtcagataatatctcactgtagttttgatttgcacttctctgatgatcaatgatgttgagcactttttcatatgcctatttgctgtttctataccttcctttgagaaatgtcttttcaaatcctttgcacattttttatcaaattattatattttttcctacagtgctgtttgagctacttatacattccgcttattaatcccttgtcagatggggagtttacaaatattttctcccattctgtgggtagtctcttcactttgttgattgtttccttcactgtgcagaagctttttagcttaatgtgatcccatttgtctatttttggttggttgcctgtgcttgtggggtattactcaagaaattttgcccagatcaatgtcttagagagttccccaatgttttctygtagtagtttcacagtttgaggtctcaggtttaagtctttaatccattttgatttgatttttttatgtggcgagagataggcatctagtttcattcttctgcatatggatatccagtttttccagcactatttattgaagagattgtcttttccccagtgtatgttcttgacacctttgtcaaaaatgagtttactgtaggtgtatgaatttgtttctgggttctctattctgtttcattgatgtatttgtctgttttaatgccaacaacatgctgttttggttactacagatctgtagtataatttgttttttgtgggtttttttttttgtttttattgtttccactttattgctctagcatggaacttcaggcaagcctggaccttcatcaacatgcaaagaagaggctgagggggtttggggacacaacctggctgagagggaaaactgacaggggaaataccagaacgggggacagggggtggtcaccatgacaccaggagacagcatcagccatgccatctggggtgaggaagggaacagagaagaaatggtgtttcttcccatgtccctaacacccacatggaggccacatttggaaatggactgggagagggaaaggatgaggaaaacagctgcccaggagtctccttctccaccctgggttcatatcagaccccatccctaccacttgcctcttctacccctggaaaatggacctaacaaacagaaggagcaaaataaattaacactctaatgagcatgtatggatggacatatgttcatgtgcaatgggggaagggaagagggggtgacaccacctaaaatgattccccacctcaatctcccagcctactcctttcccccttcccyctaaagccaccatccaaccagatagaaaaataaaggtctaattcactcaaaattcttcagtttttacaaaactaacagggcagagtagggagacggggggcaggcagccacaggagtagggctggtggagaggggctatgcttctgtctccacttgagactggctctctgtggtgttgctcttctgctcctccatctctgtgtcagtgagattgtctcctgaggaagcctctgccttggccttgttctcttcctcagccagcctctcaaacgtgttggcgtagagcgtcttctcccaggcaagctgcctgcagatctgctgctggcacacagccagctgggccttggcggcttcgttgttggggtagagctgcaagaccttctggaagtcagcctgtgccagttcaaagtcattcacagccaggtgggcctctccccaatggaagaggcccttctcgttgttgctgcccagttccagggccttgttacagctttcagtggcagcagagaaggcctgtagtttcagatgacacatgrccaggttgaggtaagaggccagttgaagggcctgtgccttctgtgtttcctcattggaaaaactagactcatattcyacccaggacacaatcctcttatattatagtaaagcttgcttgtatttgccttccttgaagtacacagtgtcccactctttcactgyggtgctctgctccagcttctcttctgaattcatctcccaagactccttggtcttttcaaaactcttgaggtgtaattcatatttcagctaggcatttggtgggatttggaacttttccttcctaacactgccaaaagcatagctgggtttgaggtacacaatggaatgttctcctttctacatgcactgaatggccctctccagaccataaggcagatccagattctcctgatgttcaaagagctagtccttgtagcacccttccagtgcaatctccatgatagcaccctcattgggcctgggatagccttcaccgcaagtctgtaattctgtagatgattccgccatcttcttcttccgtcagatcttctcccttaaactcaaacaactccacctcaaacacgagtgtggcattggggagatctttggaggactgcctgctgcaccgaaggcatattctggtttgcaggtgatatggcacacctcccctgccttcatggctgctatggcaatgtcccaagccttgttgacctccccttttcccaggtcaaaggagaatttgtccttgtgatccagactggggtcaaagtttgtgccatctaacagccagccagtgtagtggacaaagattcagtccccaatcatgggcatctctgtacctgtgccctctctcgatgaccttcagcatgccttcctcctgtttgggcgaatgtccactccctccatgggmagaggcgccaactgtgtcccattctcrgtctccttcatctcctcaactgtcatctccaygcagcgcaccctttctgggagctggcaccggcaccagcatactctgagccaaaggcaggggtgctaccttcagggtgtgcaggaggccaggtgctgtggtgctgactgcggaccacatggaggctggagcacctctgccagtctgtagtatgatttgaagtcaggtaatgtgattctctccagttttgttctttttgctcaggatagctttgactattctggatcttttgttgtaccatgtaaattttaggatagttttttattattaatatttctgtgaagaatgtcattggtattttgaaagggactgcaatgaatatgtagattgctttgggtgatattgacattttaacaaaattgattcttcccatccatgaacatggaatgtatttctcttttttggtgtcctcttcaatctcttttatcagtgttttatagttttcattgtagagatcatttctttggttaaatcctaggtgatatggtttggctgtgtccctacccaaatctcaccttgaattgtaatagtctccacttgtcaagggtggggccaggtggagataattgtataatgggggcagttcccccatactgttctcatggtagtgaataagtctcatgggatctaatagttttataaatgggagttcccctgtacaagctctcttgcctgccaccatgtaagacatgcctttgcttcttctttgccttctgccatgattgtgaggccttcccagccttgtggaactgtatgtccattaaacctttttcctttataatttacccagtctggggtatgactttattagctgcatgagaacagactaatatgctacatatctaattttatttgtggctattataattaggattactttcttgatttctttttcacactgttcactattagcatatacaaatgctactgatttttgtatgttggttttgtatcctgcaactttacaaaatttatcagttctaatagttttttggtggcgtctttgggttttcccaaatataagataccatctgcaaacaaggataacgtgacttcttcctttccagttggatgccctttatttcttcctcttgtctgattgctgtagctaggacttctagtactatgttgaataacagtggtgaaagtgggcatccttgtcatgatccagatgggagagggaaggttttcaggttttccccattcagtatggttttagctatgggtctgtcacatatggttttaattatgttaaggtatgctccttctatacgcagttttttgagggtttttcatgaagggatgttgaattgtatcaaatgcttttttaacatctactgacatgatcayacggatttgtccatcattctactgatatgatgtatcacattgattgatttgtgtatgttggaacatccttgcaagccagagataaatcccacttggtcatgatgaatgaccttttttaccatattagtgaatttggtttgctaataccttgttgaggccttttgcatcaagattcatcagagatactggcctgtagttttctttttttgatgtgtctatgtctggttttggtatcagagtaatactggcttcatagtatgtgctgggaagtattccctcctcctctattttttcagaattgtttcagtaggattgctattagttattttttaaatgtttagcataattcagtattgaagtcattgggtcctgggcttttatttacagggagatttttaattacaacttcaatcatgttacttgttattggtctgttcaagttttggatttcttcatggttcaatcttggtaggttgtatgcatctaggaatttgcccatttcttctagattttccaattttttggcatacagttgctcacagtagccagaaattatcatatgaatttctgcattatcagttataatatctcctttttcatctctgattttacatatttggatcttctttttttttcttaggcaagctaaaagtttctcaattttctttatctttaaaaaaacttttcgattcattgatcttttgtattgtcttcttcatttcaatttgatttatttctgctctgatctttattattccttttcttctactaattttggatttggtttgctcttgcttttctacttctttgaggtgcatcattaggttgtttatttgaagttttttttttttttaatgtaggcacttatagctataagcttccctattagtactgcttttgctgtattccatacaacaaaatggtatgttgtgtttccattatcattttttccaagaaatttttcaatttccatcttaatttcttcatttacccactggttgttcaggggcatattgtttactttccatgtgtttgtatagttttcaaaattcctcttgttattgatttctagttttattccattgtggtcagagaatgtgcttgatatgattaacatttttttgaatgttttaagacttgttttgtgacctaacatatgatctgtccttcagaataatctatatgctggggaaaagaatgtgtattctgcagtctttgaaggaaatgttctgtaactatctattagatgtttctttgttgattttctgtctagaagattgatgcagtgttgaaagtgggatgttgaaatctccagctattattatattggggtctacttctctctttagctctaataatattttctttatacatctaggtgctccagcattcagtgcatatatatttaaaatcgttatatcctcttgctgaattgaaccccttatcattatatagtgaccttctttgtctattcttacagtttttgtcttgaaatctattttgtctgatatgaatatagctgcttctgctcttttttggtttccatggacttggaatatcttttccatccctttattttccatgtgtgttttataggtgaagtctgtttcttgtgggcaacagatcattgggtctcagtttttggggggttttttggtgtgttttgttttgttttttgtttattttttggcttttggctttttttttttttttgagatggagtctcactctgtcaccaggctggagtacggtggcacgatctcggcttgctgcaacctccgcctcctggattcaagcaattctcctgcctcagcctcctgagtagctgagactacagacacacaccaccacgcccagctaatttttgtatttttagtagagacagggtttcaccatgttggccaggatggtcttgatctcttgaccaagtgatatgcccacctcagcctcccraagtgctgggattacaggcgtgagccaccacacctggcctcattgtttttttattccttcagctactctgtgtcctttgaagaactgtgtccatttacattcaatttatagataagtaaggacttacccctgccattttgtgatttgttttctggctgttttgtggtcttctcttccttctttctttccttcatgtctttctttttgcgaaggtaattttcattggtgatatgatttagttagttgctttttattttttgtgtctccattgtatgttttttgatttgagggtatcatgaagcttgcaaatactacgttataaccmattattttaagctgataataacactgtttgcataaacaaactaacaaaaagaaaatttacaaagacttcctgcattaactttgtgcccctgctttaagtttttgttactatttatatcttattgtaatatgtcttgaaaagttgttgtagttactatgtttgattggtaagtcatttaatctttctccttaaataacagtagtttacacaccacatttacagtgctataatattctgtttttctgcagactattactagtggattttgtaccttcaggtgattatttattgctcattaatgtccttttctttcttattaaagtactccctttagcatttcttgtaaaaaaaaaagtctgatgttgatgaaatccctcaactttttttttgtctaggaaagtctttattttttcttcattcttgaaggatattttcaccagatatactattctagcataaaagttctcttcccttcagcactttaaatatttcattccactctctcttggcctgtaaggtttccactgaaaaggctgccactagatgtgttggagctccattatttgtttcttttctcttgctgctttttggaacctttttttatccttgacctttgcaagttgaattaccagatgccttgagttagtcttctttgcatgaaatctgcttggtgttctgtaaccttcttgtacttggatactgatatctttctctaggtttaggaagctctctgttattatccctttgaawaaagtttctatgcatatctctttctctacatactctttaaagccaataactcttagatttgcccttttgaggctattttctagatcctgtaggcatgcttcatggttttttattctttttgcttttgtctcctctgactgtattttcaaatagcctgttttcaagcttgctgattcttttttctgcttgatcaactctgctattgaacgagtctgatgatttcttcagcatgccagctgcatttttcaactccagaatttctgcatgatcctttttaattattttaatctctttgtcaaattcatctgatagaatcctgaatttcttctctgtgttatcttgaatttctttgggtttcctcaaacagctattttgagttctctgtctgaaaggtcacatatccctgtttctccaggcttggtttctggtgccttatttagtttattcattgaagtcatgttttcctggattgtctggatacttgtaggtgttcatttgtgtctggccattgaagagttaggtatttattgtagtctttgcagtctgggctctttatacccattcttcctgggaaggctttccagatattcaaaaggacttgggtgttatgatctaagctatatctgctttagagaggacccccaagaccagtaacactatgattcttgcagactcatagaggtactgccttgatagtcttggacaagatccagaagaattatctggattaccggagactctggttctcttcctttactttgtcccagtctctctctgtgctgagccacctggagctagaggtggaatgacacaagcacccctgtagccatcacccctagaactgtgctgggtcagacctgaaaccagcagagcactgggtcttgcccaagccctgctgtaaccactctttggctaccagctatgttcattcaaggccctgaagatctgcaattagctggtgacagagccagccaggcctatgttcttcccttgagggtgatgagtttctccaagcccaagctccaggagggtccagaggtgccattcaggagccagaaactagagtcaaaaatcttagaagtctacctggtgttctattgtactgtggctaagctggcactcaaaccacaagacgcagcgcttcccatgcttccctcccctttccaaatgcagcgagcctcaccycatggccacggccacctcaggcccacagggagtactgccagactaccaccatgttccctttaggctcaagggctcttcagtcagcttgtgttgaatgctgcctggcctgggactcaccctttagagcagtgaggtcccttctggcctaaggcaagtccagaaatgccatctaaaaaccaagtcctgaaatcaggtaccgtgagagcctacttggttttctayccagctgtagggcctaccttatataaactttttatccaggatagctktcttttttgtctttgggrcagtattgtaactaagcaaaaagataagcggatttaatttttcttattagtcatttaagatttttatttgccttttataaggagtctttaatttaaaatactgaaatactttagaagcttctgcatatcagtaggcatccatagatgagagtaatttggaaagcttcattttcttttctttttttttaatttcaacttttattttaaatacagggtacatgtacagatttgttacataggaatattgtatgatgctgaagtttggagtacaggttccctcaccctggtagtaagcataatatagtactcaataggtagtttttcaacccacccactcccaagctcgagtagtccacagtgtctatcgttctaatatttatgtccatgtgttctcaatgcttagctcccaattagaaggaagaacatgcagttttgaattttctgtttctgcattaatttgctgaggattatggcctccagctccatccatgttgctgcaaaggccatgatttcatttttttataactgtgtactattccgtggtgtgtayatacagcattttctttattcaatccaccactgatgggcagctaggttgatcccatgtctttgctagtgtgaatagtgcaacaatgaacagaaaagtgcatgtgtctttttggtagaatgatttattttcttctgggtgtaaacctagtaatggtatggctgagatgaatggtagccctgttttaggttctttgagaaatctccagattgctttccacagtggctaaactaatttaaattcccactaacaatgtataagtgtccacttttctccacatcttcaccagcatctgttgttttttggatttttagtaacagccattctgactggtgtgagattttatctcactgtcagtttgatttgcatttctctgatgattagtgatgctgagcattttttcatgtttgttggtgacttgtatgacgtcttttgagaagtatgtgttcatgtcctttgcccattttttaatgaagttatttggtgttttgcctgttgatttgttcaagctccctatagattctggatactaggccattgttggatgcatagtttgcagatatcgtctctcattctgcaggttgtctgtttgctttgttcatagtttcttttgttgtgcagaagctttttagtttaattagatcctttttgtcttgttgttgttgttgttgcaatggcttttcatacttagctaaaaattttttaccaaggctgactttgagataagtatttcctaggttgtcttccaggatctttacagtttgaggaccttcattgaaatctttaattcattttgagttaatttttgtatatggtgaaaggtaggggtctggtttcattcttctgcatacggctaactagttatctcagcaacatttattgaatgggaagtgctttccccatggcttgtttttctcagccttgttgaagatcarattgtggtaggtgtgcatctttatttctgagttttctattctcttccatttgtctttgtctgtttctgtaccagtactaagttgttttggttactgtagccttatagtagtagtgtagtagtaggagtagtagtgtagccttatatartgtagccttgaagttgggtaatgtgatacctctggcttcattcttttgcttaggatagctttggctattggggctctttttcagttccatatttattttagaatcatttgttctgtgaaaaatggctttggtagtttgataggaatagtgttgaatctttaacttgctttggacagtatggccatttttacgaaactgattcttccaattcatcggcatggaatgtttccccatttatgtcatctctgatctccttctgcaatgttttgtagttctctttgtagagatctttcacctccttggctacctgtattcctagatatttcattttcttttggctattgtaaatgggattatgttcttgatttcactctcagcctggactttgttggcatatagaaaatgctactgatttttatacaatgattttgtaacctgaaactttactaaaggtgtttatctattctaggagactattggcaaagtctttaggattttctaggtatagaattatgttatcagcaaacagggagagtttgacttcctttcctatttggatgccttttatttctttctcttgcctgattgttccagctatgacttccagtactgtgttgaacatgagtggtaagagtgtgcatcttggttctgttccagttctcaaagggaatgcttcaagctattgtccacttagtatgatgttggctgtgggtttgtcatagatggctcttattattttgaagtatgttccttcattgcctagtctgttgagggtttttaacatgaagggatgttggatttcatcaaaagctttttctgcatctattgagaagataatttcatttttgcttttgattctgcttatgtagtgaatcacatttattcatttgcatatgttgaaccagccttgcattccaggaataaagcttacttgatcatgttttactaacttttcmatrtgctgctggatttgattttctagtattttgttgaggattttcaggtctatattcatgagagatattggtctaaagtttcctttattaattgtgtctctgccagatttgggtaccaggctgatgctggcttcatagaatatattagaaaggaacccctcctctttgattttttgaataatttcagtaggattggtatcagttctttgtatgtctggtagaattcagctgtgaatccatctgagccagggctttttttggttagtaggttcttaattactgattcaatttcagaagtcgatagtggtctattcaggttttcaatctcttcctgattcagtcttggaagattgtgtccttccaggaatttaccyacttcctctagattttctaatttgtgtgcatagggttgtgagccctcattttcaactgcacttcttcaagtgcagtgttgtttctttggaatgttccattgtaattttaaattacctttagtaagattttgctatttctaaaagtgtttgctgtttccagaacctaatacttacacatgtaagtgtgggcataatcagaagatacattactcagttcttaagaaaataaggatcccatttttatcttgaatcttagctttaattctcagatcctcttaatcaacttagccaataattttttcctacctcagcacacaagaaaaacaaaggaggwagaacacaaaaatccctataaatttccaaaaccaaagtttgcatcccctgaaatattgccattttmtactggtttctgtctgaaccattcagacataagaggcctgtaactagatccaagccagttaattatcagattctggacccaattcagtttttttgtgacttccaaacctagtttcgatcagaaatttgctcaaacaaactcagaaagctcaaaacacaaatatgtggagctttgaattctgagagagaacttaccatcatccccagttgctgtgaaagagcaatggacacaatgggccctgcaggtacctcgcttggtcacttgatgctcctgggggtcactgaaagctctaattcggatcccacttctgacaccatctgtttaaaaaaawaaaaagccttagacaaattaaacttcacagagtttaactgagcaaagaatgatctgtgaatctggcatctggcagcctccttagccagagtaagctcagagagactccagtgcagccacgtggtggaagatttacggtcacaaaaaggaaagtgacatacagaaaatggaagtgaggtacacaaacagccagattggttacagctcaacatttgccttatttgaacatgttttgaacagttggctgcctctgactggccaaaacttggtgactggcacaagagtaggttactgtctatttaaacttccattgaggttactgttcactatgtacagagaaatctttatgccaaacttaaagtatgtaaggaagcaactttaggataaacttgatttaacaatattacatgtgaatatgtgtatatacacatgtgtctttgtgaatataaatataaatctatctatatatattctctaagatattggcacttctaataaagtggttattaaataatatttaaagataaaaacaatgaatttgattagtttagaaagcagagaaagttaacagagcaattctaacacaaatatagttgcttatcattttcagtgtgaaattagagtcaacaaacccatgattttcttagtattcactcactctatatctgtgtacaagtaattggcttattatattaaagttgctttttacttcattttatgttaactctaaaaaactgttaattgtggagtttttaaatgttgttcaatttcttttcattttaataataatattgttaatgttatcattgcttctattttctatgtgcctaacatttctctagagttgagcaggccttatcttccactttatagtgacagtaaattcatttgtgaatggggaagattttcatttatgcagatgggcttgagatagacaaatagatactcaaagagaacaacagagaaatacacaagaatatacacaatatttatactaatttatcatctatttacagaatgatagacattgccattgagttcatatgctagatacattgagtttatctatttatatatcatttaaaaaacagaatggaaatcttcctatatacagtaaacctttccctgccctctaaatcaggatattccacccataatttgcttatctcattgtgctctaatacattgacactcacagaatataggacagttgtatctacattagatggttccagttagtgatgctaatgttcttgttcagcttttcataggtgtttatttcttcaactttagagacagagttcaagatattagtcatttcttgctgctattctctgccagataagtcaatgtagtacaatgtgagagtctaggctttgcatccagatagacctgagattaaatcctgatcaactctttactagttatatggcttgtctgactgtaaagtggagatgataatatccacctccataaggttcttcttataggtgatgacagtacaaatatacagtactggccacctatcgggctttctttttttttttttttttgagacggagtctcgctctgtcacccaggctggagtgcagtgccgcgatctcggctcactgcaagctccgcctcccaggttcacacccttctcctgcctcagcctcccgagtagctgggattacagaagcccgccaccacgcccagctaattttttgtatttttagtagagacagggtttcaccgtgttagccaggatggtctcgatctcctgacctcgtgatccgcccacctcggcctcccaaagttgggctttcaatagatatgtgtctcttgccactaccctctacaacacccacaacacccaacacccacccacattcatccccttttcatgctttccttcctgtcatctgtgaactgggcaactacataacgaagaagatttgaattacatctaaaccaaaatccagttattataatagaagtatttatttattctgagtgtacactattaattagcaaaacaaagaacataagcctaaaggctaacctatttggacctttaggtgggtaatatttgagatggtccttgaaagttgataggatttagactgaaagacatatgtagagaagcattctgtacagaggaaactgtttcaggcctaaagcacagcatagaacaaggaatgattcaatttatctggaatatagggtgtatgtggtagaagataaaactcaagaatgaatataggcctgttttgtcaaggattctgagcaccaggttaagaagtttaatttgatggaaaataggagttactgatatttcctaagcaaaggacttttgttttaggaggatttctctgtgttagcatttgggatatattagtgctgggagaaacaaaagtgaggaggtcatttagaaagttattagagtggttcaagcaaaaagtaacaaagactaactctcacacattactagtggtaatgtaagtcagtacaatctctatgacaggcaacttggcaatctctaccaacattacaaacgcacataccattttccttagccattccacttctaagaatttatcctcagatatattttcgaatgagtgaagtgatgcatataccaagttattcataatagcataaaaccttaataagaacttgaataacttacagcacattcacagtaacagaattacagcatatatatatataataagaatggggaagtcccttatgtactgattaaaacaatctctaagatgtattaaatttttaaaaattaatatattaaattgtgtaccatttgcttccatctgtgttttaaaaataaaagaaaattctggaagaatacacacacacacacacacacacacacacacaaattatatctgtggcttcttgttgaatccaaaataaatattaaaagaaataaggcctaaagtcaaagtggtacctataatattggagagataacttattagaagttgatagtgggggaaaatttataaagaaagaatatggacttagaagaacagaaatttgtagaaagcctagtattgaatagtattatgccatgttatggcatgaagcagatgagtgtagatttgcgtgctttaagcagaaagaaaatttaagaaatcatgtttgcagaatataattgtcatcccaattttgccaaacaggcaccaaaatgcttggagatttattgtttcacccaaagtcacacaagtgatgacacagtaaaaacaaaaaacttctttcaaagttttatctaaagctccaatggcatagatatttagacaagtatagacaattgccttcacagctggaagtgccctcttcctccctcaccagttacccatgtaccttccctaacaaggtgaattttcttattcagcaggaaatattccctagacattagtgtttaatgaaaccatttattaaaatccgtgtaattctttcaaaattctaacatatccgaggcttgcctgattctgataataatattcaagcaaagatttttagaaaattttctttaagtcagtatgaaattttgacatttagtcaagattgaatctatggttcagatttcataacctcattaagtctccttgtgcctcttatgtgcagttctgggtacttactattatgtggaagsgttaacatttttagaaaggaaacatttataaaccctagttctttttaacaagctgatttagctagttcctaagataatttactttcagaaagtataaccctttactacataacagtattaacttatagattgatttatctatcaataagttatttaagggagttataatttaaagcaataacaaaaaataatacaccaaatgtgaatctaccactgcaaaatttttaatagatacatggtttagttacagtcttttatgaacttctcaccttttatccccagagttagaaacttctatcagggtattattctcactgcagctgaaacagccctccagatgccagcagctttggcagtaggtgtcctctagtgctgactcataaaggtttgaaattttttatatttctggtctttcccccatctctgcagagatgcctttctaggtattttgcttttaattaagtctttatacagtaccttagctgactcttgtatctgggtcagtcttctcatccctgcaaagccctgggaaaactacttcactgaggttatctttgtgacaaactttacttcttaaaatttcttatttcaatcaaaacagatgtggcttgcataggcccagtcaagccctagtatattctctctaataaaggaacagttcatgggtgactttgttaatacttagcaagtgttcattctttagcattgttctttttgtcctttgagtctttactctctacttaaagaactgggtttctgaaccaaattagtactctcaaaatttgtcaacacttcacaaaccccttcattagaggggctgtcttaaaataaataaattttttaaaactgtaaatgtttgaatatttagaaacttaacaacaattaatcactagctttttcaaacccagcatttttaaatcacaaaataaatatatttgtttggtattttgataaccctctccccccagagtgaattcagccttatgagcaaatatagttaattgaaacctcttagtagtgaagctgatctttgtgattacctaaatttaattcattcacatatgagccaaaatcaaattttcatgtaggtcaattttctggaaagtttttgaagttaaacacatttagagatgtttaatttaatgctcttcctatatctattatattgtggagggagtgatttaaaacaaagaagcaaaatgcttcctgctggaaaataaagatgttttcattgcaaaattaatataacctttgtgctatgctgctgcttaaaaaaggatgtctattaattaatcatttttaaatctatcataagaagtaactgtattcattattctgtcactttctaacactaaaggaagaagaacagctgttgtctggcctctaactaactgcaatggggtctttcagaataatacagaaagaacattagaacagcatgagcaagatacacaattcaaaaktaatcgaaaattggtgatctgagaactggagatgttctcatgacatgtaaatatttgttcagcagctaaagtaatagcaatgcrttaaaccaatagaattacttttgacacctaacagaaatgttaattgatcatcaatctttagctcgtaataaaagggctgaacttscagttctgaaagtatagccagaaaaattatgtgagagacataaatgttataaaaaagacaaactgctccaagctaaattgctttaaattacattgacctcatcactgtacctttgaaacctgtctctaattgagagcaattgatttacccttccaactttcctttaaagcctatcagatcccaaattctaaatgttaagaaccctttgccaaagtattctgcaattgagctttcctttgagattcttaagtgatgactaaggcacgagccaggtagaaaaacagtactcagtgaatttaaaccttagaaattaaggtgacatcttttgtctccccctggagaaggtgataaagtgaaagaaatttttagcataagaccattgtaattacacaaaaacatgaaagataatagacaccaaaatgagctgtgagagggacaaacatgccaaaatttctaacacctacccacacccagaataaaaatgtcaagttcctggaaattaaggaggatttgtggggaggatttttggaaagagttgtgctgtgtgttgagcatgatcccaccaccctctatccacgggagaacagaggggtcatcgcctgctctgctgctcagctgagctctggcttgagggtcactgagaccatcagagagcttragaggtgtttcctgcaggagggggacacagtaggttgttgtctgccttacaactaataaatccaaagtatgagagagagattggctaaagtggtatcagaagaagaaataaccacatataagaattatgtgcccttttttccaaagacagatcaaaggctcccaaatcccagggcccaaatgtgcaactcttaaaaggaatattagcctaggatccttttaaaagggaccctgctgggccgggcacggtgtttcacacctgtaatctcagcactttgggaggccaaggcaggtggatcacgaggtcaagagattgagaccatcctggccaacatggtgaaaccccgtctctactaaaaatacaaaaattagctgggtgtggtggcacgcgcctgtagtcccagctactcagaaggctgaggtaggagaatcacttgaacccgggaggcagaggttgcagtgagcctagattgcaccactgcactccagcctggtgacaaagtgagactccatctcaaaaaaaaaaaaaaaaaaagcggggggaccctgctcaagagggttcctgataaaagactaggggagtcactggctaccaaaggaagttgtactgatggggcccagaagtgatgactccaaagatctcagatgattttaaacatatgcatatgacagtatcagttgagtaataattccctgcatccttttcactccttcatctccatgtcccagatactaagggatcagaaacctcagtaagcaagtagagtaaaatcacccactggagaacagagcattgatcagactttcttcccagcctctcttgcaaattctctcctgcaccaggtctcaggaggatgagaggagcagatttaatattgcaacaagtttggaatttttattgttctttgaaccaaaagatttaaactactaaatcaagacttaaagctacatggcaactttctgtcacctaagaggttagggaggccattctgcaagggaaaactacccatactgaacaaattttaaagggacagtgggaaaaagaagtaagattgctttagtaataatatcccatgaatcctaattatttaacatatgagctacayaattatttttaagattatttcattcattttatattcagatttttataccatgaatatacatagaaatataaaatttctaagaatgaaataaaaagatttttaaatgtcttgctaatcacagtagcctcacattatgattaacagatgtaaatccatatttcaaatactcttcttcaaacttttgaaatttgggagcctactattgttaaatgtgattatatcatcactgttttcatcgcattaggggctgacaagggttcagactagaaggagcacaggggttggctctggcactttcctttccttcacttgtgctttcattattattaacagcattcactatgaaccatggtttcttataatctttttaaggcgcttggactttttgtgatggttagcctaattaaagctagaaagtacagtccgtaaatctgtgtaactaggctctcataaactgccatgtactataatacactgcaagtaaagtgaacgatgtgcctgtgtcaaggagtccccttgaggaactccttctcttccctcaggcttgcccacatcccagaagagggcttagtgagaaacttcagaaggcaaygactcaaagcccctcacttttatggaccccttccacagcttgtttgggaccactgtttctttccattccactttcccttgtatcaaacatccccttaggacaggtagggttggaatagcagcgggcatctttttggatctaattagaagagggatacagttagttgggttcacaatgcaaataaagcatttggaatttgtatgatgacctgatgaaaaaacatgccacaatgtgcattttattaattgttttttataaataaagcagatagaggcagctacagtctggattaaaagtagagaaaggccaggcctcatgcctgtaatcccatcacttagtgggggcaaaggtgggnnnnnnnnnnnnnnnnnnnnnnnnnnnnnnnnnnnnnnnnnnnnnnnnnnnnnnnnnnnnnnnnnnnnnnnnnnggggcaaggtgggcagagagcttgagcagcccagaagtttgagaccagcctgagcaacatggcgaaaccccatttctacaaaaaaatacaataattagccaggcatggctgtatgcacctgtggtcccagctactggtgaggctaagatggattggtaaattgagcccaggaggctgaggctgcagtgagctgtgatggagacgttgcactccagcctgggtggcaaagcaaggccttgtttttcattcattcttttataaataaataagaaattattatatccaatataatgtttgataatatcatacaacatagcatcaagagtatgctatgaccatttgcagcagaacaatcctacacctttaaagtctacctgatttggacattttttaaaaaaggatgaagggttttctgaatggctgacttattttttctatacatgaggaaagaaccaaatgagctccaaagtataagtatactcacatgccttcctcagaatagatcaaataattataacaggttagccttgggtgcaagaatttcaagacaagtcaaaatatcatattttacccaatctcaggtaacatgtatttcttgggtacttaactatgttgtcagacactatattgaacttttagcatgtattatctcattgaatcctcacatgtaattcatctggagctgttaaagctaacatttgctcccctatagtctgatgaaagactatttttctaccttccttattagtctcttcacatttggtttctttttcatctgcagttcattattgattgcaagctaaatcgtcaaagctaacacaatttccaaataatgcttcccagccagcaagaatcaygcaaaatgaaaagcagtgatttgacatgaagaggacaatttttctcacagctcgaacataaattgtcaccattcatgaactccagtagactgctcttcctttatgatttgttcttattcatgccccaggtgaacaggaataaagcccagggcactgagccagtgtgctgaacccaagacaggtggcacaataagatactagcctttaaaatatgcattcggttggaacytgcaatttcatccacttctaaaaatttttcccaggaatatagtcagataccaactaagatgtatcaatgatgatgaccaatccagtgttgtttacaacaataaaaattatgagcaaactaaaggaccaagagtagaaaactgactaaggacattgtgataattaataagataaattactatttagccattaaatatatatatatatacacattttaaagtatttttaacaatgtataaaatgctaaagatatattgctaagcagcaaacactatgcatcaagttataccatacattaacatacacatacaaaattttatataaaaataatttatacataatttataatatatacttttttatataaatcctatatataagatttttaaatatgaaaacaattcagaatttttttcttttttgacattttctgttttttaccttgactgtataatttttaaaagcaaaaagatcacttatgatatagacttcaattcaacaaatacttttcagtagcctattatgtaattaaattaagtttaacaaacatttctttaatgaaccatacacatgactgtagatataataaagagtacaaccygatccctgctcttgatgagctcacagtttagcargaggaacgtataacaagtcaaaacaactaatcctaatagttgttatgaaagagcagtggagatacaaagaggaagtagtcacctcaaactggaaaagcaatggtaggtaaagagacaggaaggtattccaggtagaataaaaaacatctaccaatgtatgctgtcatgcacactggaatggaaagtaaaagcaagtaagtgggaaaatatgaagatgaagaagaaggtagsggcattatcatgatggactcttgaagcattaaggtacagactctacagctgcaccagccacatgtgaattgaattcttgaaatgtggctaatcctaattgagatgtactgtaaatataaaacaccacaccagattttgaagacttcatatttaaaaatgagaaataactcattaataatttttatgttgattacatgctgaaatgacatttttgtgtacattgggttaaattaagtatattatttaaattgattttattcaattattattatttttcataatgtggctactaaacatatattttaaattatacacatgactcacagtatgtatctactggacagcattgttctagaggatagattagaggaacacagttctggaaggaggaagaccagttagaaagcttttaaagaacccaggtaagattcaatgaaagattaaaccaggcaagtgcaaatagggatagagaggatccgttggagttataaaagagagtgcattgacaaaacaagtccagttcaataagaaatgaggatctggtaagtgtctggaatgccctcagttttttggcttgataaccataggaacagtagtaaccttagggaaaataaggaatacaaaaggaagaccagatctgtctgtaaagattcattcattcaaatattatttattgagcatctaccatgtgctagttattatttagctggttaggtgctaggaaactagcagtgatgaagcagatgaggtccctgctctcctggagcttacttacactctattacaagcacataawgagctcaatttagccatgtttaaagtgagatggctayggcacattcagataaaaatgtcaactagacatttaagtataaaatttaggagaaagataggaatggtagtttgagatctggggatcattgtggtgattccacctagagacagcatgtaaaaaacaaaaccctgaaaaacactagctatctaaaggtaatgtggagaaggaagaatcagtgaaaaatatagatagaggagaactaggagaaaacagtgtcaaaaaagccaaggaagaataaaattttaagtgtggtcaaccatgttcaatggagtagattggttaacccaatgactaccaagtatccatatgtagctacgaggctattgcttaccttttggaaggcatttttcatgggatggtggggacaaaacccaagtcacaaatggctgaaacatgaatggaggtgaggagtaaagtcagcacctgagtactgttcctttgaagaacttggctgggtaggacagtggctagaaaagataaaatctcaagagagagcctaagatgagagagattgaaatatgttttcgggtatgagggaaggaccgtggagaggactgaaaatagaggaaaacagaggaatatgtgatagactaagatcacatgggagttgaaagtagatgcgatgaaaagcactgggggatatattagtcttgacaacaaaatggaacacctttgcttgacactccaggtgtcaggaggaatttttaaaagacaaatgtgtagaaagaaggacttgaaagagttcctgcctgatgaccagcactccctgttaattaggggatgattagggaaagtagggagagtggaaactgaacagaaggcctccagagagggatgaaagtttaaaatagctgctgaagggaacagaagagcaaggtgacaatgaataaataagaagaatatccagtagtactaaggattccattgagattggggaccatatgcttatgcgctatgaatagctcctattgtgtgtttgttctctaactgtgctgaagagtccatatgtggaagtgaactaattaaatggaagaactggcccaaagtctcatatttgcagagcattgaaagcagaaagatgatttgggaatctgagggtaatcgtagcagagaagttcaaaccattgcagatagaatcttgcctggtagaagaagtgatcagaagcacattgattgatgcaggaaaaaaataagagggttaagaggttggaaggctgtcctgataaggctggtgagctgctagaaagaaattgtaaataagaaatgatgtttctccaaaataacaataatatatcaacaataataaatagctcttcattattaagcaattactatgtggcaggcagtgtattaaaatttttttaactttacatttaattgtaatgacaaccctgtgaggtaattactattattatatcctttttgttttcttttaaacaagtamattaaagtactgagagtttaaataacttgctaagactgtagagccagtaggtggtggagccctctttcttaatcactgtacaggccaaaggcaaagacataaagatatagtttatttaaaaaggagtaaggtttcayggaaaacagagggaaatggacagtaagaaaataagtggagactagagaagcagagttcagaaagaagagtacacagtgaatggagataaagttagaggagacaagaataaatcattgaggaggcccacaattttaatggtgctaaaagattaccagaatgagtggcattgaaaaaataactgaccctagaatttttcagctttacaaataagattactggagccagctcaaagcacatacaatatattacagacagttcagagaataaagttgaaaggcccatgccagcccccaaggaacttacaatctagagatgaataaaacaagtatgtttaaaaagcacaaaacaagccaggataagaaaatgtcagaaagacaaaactaggggctctagggcttgcatttttaaaaacattgcatttgccttgagagatatgaaacagtggacatgacactcttgaatacataaaattgagctaagtagcaaagtgaggcagcgtatttacagagagaagaaaccgtataaacgaagccgtggagaggcaagtccaaggaatattgtagatcaacaaccaagacaagttggctggtttgccctgagcacagaaggggtacagaagggaagactggaaagataaactgggaccatgtagtgccttaggttgacacactgaactttattcaactcaaaagctaatgaggcacttatgagagggcccgagccagggaattatagtataggaagttcaggcccagagcatcattagaatatcctttctgctcagaattttatacttatttttcagaatgagacgtgctcatgtgatggagtacaatcttgagagtgatggaactcatacattttccacgatgataaaaatgaaacttctggagtttgttcattgccctatataaaaataaactggtttccttactttttctgtaaagagtgtttctggtctggggatctaagtcaaggagaaagaagaacatgaagtaaattacagtacactcttcctttgccacatagcccttaaaacgtcatgaaataaagcaaaagtgaatgtgaaaggcagccttttaaatagagaactcataagttaacatgcatctgagaggtacatggagaaatgaaaaattttgctttggtaaaaaacaagattgacaaatagacacaataaaaaatgataaaggagatatcaccactgaccccacagaaataaaaactatcatcagagaatactataaacacctctacacaaataaactagaaaatctacaagaaatggataaattcctggacacatataccctcccaagactaaaccaggaagaagacgaatccctgaataaaccaataacaagttctgaaattgaggcagtaattaatagcctaccaaccaaaaaaaagcccaagaccagatacacagccgaattctaccagaggtaaaaagaggagctggtatctttccttctgaaactattccaaacaattgaaaagaagggactcctccctaactcattttataagatcagcatcatcccgataccaaaacttggcagagacaaaacaaaaaaagaaaacttcaagccaatatccctgatgaacatcgacatgaaaatcctcagtaaaatactgacaaaccagatccagcagcacatcaaaaagcttatccaccacaatcaagttggcttcatccctgggattcaaggctggttcaacatatgaaaatcaataaatgtaatccatcacataaacagaaccaatgacaaaaaccacatgattatctcaatagatgcagaaaaggccttcaataaaattcaacatccctttatgttaaaaactcccaataaatgaggtatttatggactatacctcaaaataatgagagctatttatgacaaacccacagccaatatcatactgaatgggcaaaagctagaagcatttccttgaaaactggctcaagacaaggatggcctctttcaccactgctattcaacatagtattggaagttcggcccaaggcaatcagccaatagaaagaaataaagggtattcagataggaagasaggaagtcaaattgtctctgtttgtagatggcatgattctatacttagaaaaccccatcgtctcagctccaaactcgttaagctgataagtaacttcagcaaagtctcaggatacaaaatcaatgtgcaaaaaaatcagaagcaatcctatacatcaacaatagacaagcagagagccaaatcatgaatgaactcccattcacaattgctacaaagagaataaaatacctaggaatacaacttacaacaaaggaccctcttcaaggagwactacaaaccactactcaaggaaatcagaggggacaccagcaaatggaaaaacattccatcctcatggataggaagaatcaatatcattaaaatggccatactgcccaaagtaatttatagattcaatgctattcccttcaaactactattgacattcttcacagaattagaaaaagaaatgaattaaaatttcatatggaaccaaaaaagagcccatatagccaagacaatcctaagcaaaaagaacaatgctggaggcatcacgctacctgactgcaaactacattacaaggccacagtaacaaaacagcacggtactagtaccaaaacagacatatagaccaatggaacagaacagcgacctcagaaataacaccatacatctacaaccatctgattatcaacacaactgacaaaaacaaacaatggggaaaggattctctatttaataaatggtgctggaaaaactggctagccatatgcagaaaacagaaactggactccttccttataccttatacaaaactaaagatcgattaaagacttaagtgtaaaatccaaaaccataaaaaccctagaagaaaacctaggcaataccactcaggacacaggcatgagcaaagacttcatgactaaaacaccaaaagcaatggcaacaaaagccaaaattgacaaatgggattataattaaactaaagagcttctgcacagcaaaagaaactatcatcagagtgaacaggcaacctacagaatgcaagaaaatttttgcagtaaatccactacaaggaatttaaacaaatctacaaggaaaaaacaaacatcatcatcaaaaaattggcaaaggatatgaacagacacttctcaaaagaaaacttttatgtggccaacgaacatacaaaaaaaagctcaacatcactgatcattagagaaatgcaaatcaaaaccataatgagataccatctcacactggtgaggttgtggagaaataggaacacttttacactgttggtaggaatgtaaattagttcaaccatwgtggaagacagtgtggcaattcctcaaagayctagaaccagaaataccaatgggattgctgggtatatacccacaggagtataaatcattctactataaagacaaatgaacacgtatgtttactgcagcactatttaaaatagcagacacgtggaaccaacccaaatgcccaacaatgatagactagataaagaaaatgtggtacatataaaccatgggatactatacagccataaaaaggaatgagatcatgtccttggcaaggacatgaagctggaagccatcatcttcagcaaactaacacaggaagagaaaaccaaacaccgcrtgttctcactcataagaggtagttgaacaatgagaacacatggacacagggaggggaacaacacactgaggccagttaggggatggggggctaggggagggaaagcattagggcaaatagctaatgtatatggggcttaaaacctagatgatgggttgataggcagcaaaccaccatggcaaacgtatacctaggtaacaaacctacacgttctgcayttgtatcccggaacttaaagtaaaattaaaaaaataaaataaacaggattgaagggaattaggagccaaattcacatgtctgtatgaaccagttctctttttagcaatcttctgaacatcaccacacatctgtcagcagtacagaagccctcaaaagtcatggccaagggcacttaccaagctgttttttgtactaaggacaactctaagtgtaggacattgaaatatatttatgaacttaataaaacatgcttgcttttaaaatgtgtttaaaaaggactactacaaagcaaccaatgggtttgataacctgagttagatctttcctatatgaataaaatatatatttctatggaaaataaaagttcctctgggagaactgggtctagccaggctttctcaaactgtattccaatgatccctgcatcaagaccactagggattattaaaatgcaggtaccagggcctcctccagacctaaaaatcagaatctctgagtataaagactggtgatcagaatgttttaaaacttcccagttgatttgtatatatcataaaccttttgaacctatggtcacccagaagcatactaaagcaaaacaaaactggwtggctgagagaaagagtttgctgtaaactctcttctaccttctgaattctgactcttttcatgaacaaaacttaaaagaatgagcagcatatttatatttgcaccctgagaatgaagcagagcatctggcaaatagcagaataatcagaaaaatatttgtggatttaaactgagcagcgtggtcatgaaaggcatastttataataaataacatactttttttcacatccacatttcctctcctcttcccagccttctctaaagaaagagaatacttactgcattgtcaacagcgtttgcaccaggacctgtattttgctttttattcttggtaatgagccatgcatcccccatacctagagcttagtggattcacagggttgatgctagaaagyatagataaagcttcccacacktttctcttagttacactttgacaaacagtatctgtttcctctctcataaagactaatgtatgtggtatttgacatttaccttttccctttttacagaaaaaaattcacagataaccatctggctatacacatctatatctcacagactagaaagaattgtttcagttgttaatcatataaacattatgcctttggcagtttcaaatgatgtgagttttaagcagctaaacagtccttttggtgacaactaattactcatagtgtgtttatagcaaaaattgttttataaatgcaattgtcacttctattgacactttccatctcattggaatctacaagtataataaaaataatttattttgatcaattttccatctaaaaaaaaaaaacaaaaataaaacctcagtcctgaagcactcttaaaattgtaaaagtatcatctttaggaaaagactaatatctgcttctcctgaactagcagccttttcaagccttttctttgtttctttctatgctgtacagaaattgttgtcaggtgaggaattgccaagaagtgaaatgacattataaatgtcataggtcagtacacaggtaaggaagaaagactgtctagaaagcaagctaactttttaaccaaaacattcttgttatatatctgtttttgtcaattatgttccttaatgtgcataccttcctaagaaaaaagtaacaaagaaagagaggttacatgttcagcaaaagatatgcaatattccatgtctatagaaaatattgtgattcatgaaaaaaaaaagttcaaaaagaaattgaaatgtattatgcctgacaaattatactcccttatggccttcaggggcacaaaacaaatctcaggcttgagtacagagtctaaaagggtcataaggtgacatgcgttacaaaaacattaaaccgtcctttagcttatggtgcaccttgcattatattaaagtgggaatataaaaatagaattgaacatttgggaaaagttccacgcttggaggctaagtaggttttcttttacaggactaagttcaacaccttataagtatcaccttaattcttccaaatcaggttcagtttcatgaaaagcaatgttctttactagctcataactcattttgggttccatctgtctttatcagaaagagtagcatttttttactttccatagtcatgcaggtagagagtagctctctgctttaattgtcagaataaaatgttttctgaggttaaaaagtgaattcaaagggatttcgaatgtattagtatcatgaggttatatagtatctctatttcccattttctgtcccatgcagatattattcaagtgaaatatgacacatatagacttactgacaaatctttcataaaaataaagcaagaaatttgaacttactaaccaggttaaaaatacacatttttaaaattgtatttaaaaaaatttttaggagaaaggtgaccagaagtatcatttttctaccttattaagctacactgaaaaatgtggcatgtaaaacaaatgagtaaagaccacctccaacgacattagaaaaaaacttccaaatttaagaatgattttcataagtttctcaatcacctaatgttctgataaattttacaggagaaaaagaggaaatttaagtcacagaattgaagttgctattaaaaaataaccagaagatttaagttttaaagtctcattttttaagaaagacccaaaatggtaaaaggcttagttcccaattccatgactgcattggtctgctggtacagacagctattttaaatcactcacaaaataatttatttgtaaaagttcaaagatttaatatatgttcaggcagagtgaatagaaatgcaaatattcttgatcacaatgaagctttttatgtaaaagcctgcaggatttgttccataggatattactacttcctcttattcatagttgttaagtaattacatttttcttatttattgtgttaaatattaayataactttttctctcatctctgtcacattacctcaatgaattttcttgaatatttctttcagcctcttaatgaatgacctattaaattcattattatgattatagtaaaccattgttactattcattcacatgacattatatattttaggaaagtactattatcacatgaattattttatgatcttttttatagcagcataaacgtcacaatggctttctttgccattaaaaatctcatgcagaagaattcatttgtcaacactaaccagcaaaaattatctgcattcacttaaagctacaaatacccattctacgtctacatcccagaccaatgcagtctaacctgcagagttcaaatttattttattataaaaagtttcctgcacttkctgtgattgtctttcaatgcatggattcaatctaggtcaggtgcttccataggaaragtcaattttatctagccaagcattaaagatttttcttaaaggagatgttttatattgggaataatggaactaaggaatgtgaaaaagggcttgagaaatatacaggttgttattcagcatcagtcttattgcaccaacatgggtatacagcagctattgatgttgaatgtatttttttgttatgaaatataagaaaatttcagggaaaaaatgctcaagtcttgctgataacacatcctccagtatgtattaatataatgagggtttgagggacatgtcccaaatccaaaaacacgccatcaactgaaaccctgtgcagactacttaaggaaaaaaactagcatggctgtgattatactgccctctagtgtcaaaataaatgttatttacactgaagttcatttgcttttttcagatcagcattttcatgacccatttgtccaactaygggaatgaccgactgggattatatacatttgttaatctggccaactttgtgaagagctggaccaacctgcgacttcagactctgcctccagtacaactggcccacaagtattttgagctgtttcctgatcagaaagaccctctctggcaggtaaaattaattaaataattgatataaccagttaattccaggaacataattctgtgagatatcccaaatttgaaaagtgaaggcacctgaaaaaacytgcattttggaaatgttagtaaatttgagaaactactccttcctaaactgtagttgtatatcattgctacatattgcacccaattccctgttcccttgcacattggaaattatgggattcggaaagttcagtgacagattcaatgaatataacgtcttcaatcaggagtgagagataaatctacaggttgcaataggctggaagagtagaagatggtaaacaggtcgtytgttagacaggtagcctttgaacacatccccatatctctaatgactaaaccatattaaaggatctctgagaagagttcagaactgacatctgccttctgaaccacgaggtacaccaamagccaacagccactgaatgtggacagctttcaaaagtattaaytggggattaatatgggggaaagcatttcatgggaaaatcactgagcttcttaagataaataccacatgaatacagcatattcagatgactctgggggtaacctagatttcaaagcatagactcttatgtatcatagaattgcaggaacaactttgaatttaaattgtccactccatgatctgtgaaaaataataatcttggcaaataattacatattgcttattatatgtcagacggggcacttgacatgtgttaactcatttaatcctcacaactaccttaagtggtaggtacagttatgatttgcattttacagatgaagaaactgaagcacagaaaggctragtcaattaagcaaggtcacacagctagtgtgttgcagagcaggaatcagttgtaggccatctggttccaaaagctgtacttcttaatcactgttctaaacgctactagagttacagacagagctgatggtaaaacaataacaatcatcagaagtagaactcagtaactttttaccacagattgaagttgttaactctgaactttatastcaatgcattcagctttcaaccgtaagttaattacctcctgagcacacacagatgactccaagagacataactgcatatttagcaggttaaagttggtggttgtggacttatgactgcatattacttttccgttgttttaacaagcatcttttcattttaaccaccacgaaacatcaccaaatgttagccaatggaaagacatgcaattttcctgctaattcaaccttacttttaaactgaaatcattatttcaggtgacaagttttaaactgtttttttgttttttttttcagaagaacagccaaaaagaatactctcactttagtcttaacatctgttgcttattaaaaataagcagaagtcttatttaacttcacatacctatggtattaattgactagaaataaaaaagtggtactgtttgcccattcctgaaataatattaaagggtactgtaattcttcctccttttctacataatatatactttgttcttaaaatgaagggtgttctaaataggacttgtgcagtggatgttggtgttaaatattatagaccaaaagcagaatccctaaggtagtaattcaccctcaytattcccttttgctaaaacttaggactttctagcatcatagtctataaagttacatttttagatatacatttatcaacctttgacggcagctgagacgtatctgctgtctctttagatagtagtattttggccagatccctatccctttgaagcacagctggaaagctcaaagttacttagaataaagatctgacaacttacatttcagttatgtattgaatactgagtgtatcatcttttaggttagcaggaagcataatctctgcccagtaagctaactattaaaaaaaatagaactgctagtagccaattaaactcttcatgctatgagactgtttacccaaagtggaaatactgcctctctccagcctgctctgtagactctcaacctcaacatggaagggagttattcagaacttccatgatgccacttcagggctttcatttttttaaaagagtctattttttatcccagcgtttcctggtatacttttaaagaacacaagttggraaagctggcacacaatggacacattcatgaaaaaaaatacatctctatgttcttctcccatttagaatccttgcgatgacaaacgccacagagacatttggtctaaagaaaaaacttgtgatcgcttaccaaaattcttggtaataggaccccagaaaactggtgagaactttttaygttatgattaacgagtgtaaattttctgatgactagacaatgagatcttgtcacaataagttcgtaaacttcccataactgctaatgaatgaataacatgtttttctctgacataattttcatttagcycagtaatatacctaaatgcttatcgaagtgttttttaagtgaagggaataaaacagatgtcacastgttcaaatatccagcagtcaatttggtagcacatgtttttttttttycccccaaatgttttaattgaaaagtattgtaattaacacttctaaaatcaaagctgatcactgacaggattgtatcaaaagtcaagagggacacagataagtacctataactctttataataaatcccttctagaaaaatagtcccttaggctgccattttcctaatattgtttatttgtaaactatttcttgcagagatgactattttttaaaagtctaaaagatatttcacaagcagaattcctagacatacacaaaactttgtgctaagaaaggtgtttattcatacccaggagaaatcttttgcaccttttcttaaattgatgtgcaatttttttcaccataaacttctttatcaccataaactttttttttttttttttttgagacggagtctcgctctgtcacccaggctggagtgcagtggcatgatctcagctcactgcaaactccgcctcccgggttcacgccattctcctgcctcagcctcccgagtagctggggctacaggcgcctgccaccatgcccggctaatttttttgtatttttagtagagacagggtttcaccgtgttagccaggatggtctcgatctcctgacctcgtgatccgcccgcctcggcctcccaaagtgctgggattacaggcgtgagccactgtacccggtctataaacttcttgtttctaagaatcagtattaaaatgaagcatcatggaagctttaaactaccagacattcatgctatatcctgcatgataaattatttggggcccttggttacwggcttcacagaaaacagcctttacaatcatattgcttgctaaggagaatacattccctctcctcattgatccagaaataactgaggaaaattctgtgcaatgtacacagggagttcagcatgttcatttttttccttaatgtcatttgcagatatcaatctgaaaacaataataaacatgacaaatacttacatttttcttgtccttatttatttcacttgtccttatctatctaaagtcaaaaggcaactaggaaaacatttaaactaaactctcttcagtgaactcccagtcatcacataaccttgtcaagactgataacatcctgaaggcttggtagcattttgctttagaaagtcctgcaggattcgcttcctctcgtgttgtgctggatatgcagacattttgatatcatggttagatggtagaattattacttgtcctcttaaactgaattgggtttccaaatgtttgttacaatttggatatggcatttgtcgttggaaaagaccttttatagaaattgattcttttttatagaaattgatttttcccagttttgttgaatataatttacatgcaataaaatccacccattttaaatgtacaattagctgaattttgaacattgcacacagttatgtccaccaccacattcaaaatacagaacagttgttagcctaaaaaaatttctccttgttcctttgcagtctatcccccccgatccccaccacatccccagccacaagcaactactttgtaccactacagttttgccttttctagaacttcacataaatggaagcatgtattccgtgtagtcttttgtaactgacatctttcatttagcataatacttttgagattcatgttgctgtatatatccatattttgtgaaattgattttttaattaaagtagtttctcatatcagttacatgagaattaaatagcttcatttttaactgtacttttgtcaaaagtatttttctgggccaggcgtggtggctcatgcctgtaatcccagcactttgggagaccaaggcgggtggatcacctgaggtcaggagttcgacaccaccctgamcaatatggtgaaaacccgtcactactaaaaatacaaaaactagccaggcgtggtggcgtgcacctgtagtcccaggtactcaggaggctgagacaggagaattgcttgaacctgggaggcagatgttgcagtaagccaagatcgcatcactgcactccagcctggacaacagagtggactccatctcaaaaaataaaaagtatttttctggataattttgcagatttctagttatctggatattcaagtatttttcagtgttgaggctgacaaaaatataaaaccgaagatttayagatggttatttaaatgtgtgtctatgattatgtagttgagttaccactgacaaaatatatatgcaggacagtttattcagacccaagaatatgtacaggtaaagacagaattcagaaaccacaacttaacaattttttaacacttataaattcattatgccttttactgactatgcaaaataattagattacatccattttttctgtttgtctaatgctggtcatgaaaggctattaaaagtgaacaaatgtatttaatacaattcttaaaaataagattcagaaaagaatgttttcagttgatctaagaaaggaattaatctctctgctttttttctcacattataatggcaatacttatttccaaaaagatatttttaactttaaaaatgcctcatgcatttttctggattatatctcatgtatgtaattgagattcaaatgtatttaatgtatttatttattgtaattctaagttatatctcaataaagtttttatctggaaaaatgccttttaaatattgagatatggcactctttaggtgatttcacctaggttacctcgctaatcctcataaaacactgatagctaagtattttcttccccactacacagatggaaaaactaagactcaagagaggttaaataatttttgttcaaattcacacagctggtaagtacaagaataaaaatcttggtcctagaatttacctgacttcaaaaaacatgctttttctactttaccgtggatttcatgtaatggagcttttttcctccaataaattttagatattgcttcatagttattctaagtcagtgattctcaagggtggttgccagagcagcaacataagcatcaccagaaaatttattagaagtgcaggccaggcacggtggctcacgcctgtaatcccagcactttgggaggccgaggcrggcagatcatgagaggtcaggagatcgagaccatcctggctaacacggtgaaatcccgtctccactaaaaatacaaaaatttagccgggtgcggtggcgggcgcctgtagtcccagctactcaagaggctgaggaaggagaatggcgtgaacccggcgggcggagcttgcagtgagccgagatcacgccgctgcactctagcctgggcaacagagcgagactccgtttcaaaaaaaaaaaaaagaagtgaaattcttgggttataacaaagacttaccgaatcagagatactgggatagggctgtgctatgttttaacaagcccccagatgaatctgatacatgctagttagaggaccactgttttaaggcaagcttgtgaagcacatttttactttgtatatcatagattactgttttattccctataatgatctatgattacagacaaactgttcattgtttggctcagatataatctaggaagactacctctttcaattcattttttaagacaatattgctgttgacagagttattttaacaatttttctattgtatagatatggtagatttaagtaaatattaaagaaagcttaatttataaatacttaaatagtatttatttacttaaatattgccatatttgtaccatttaagtaaataaacactaaaatactaccttacttccatattaatactatttaagggcggggcacagtggctcatgcctgtgatcccagcactttgggaggctgaggtgggcggatcacctgaggtcaggagttcgagaccagcctggccaacatggtgaaaccccgtctctactaaaaatasaaaaattagctgggcatggtggcaggtgcctgtaatcccagctgcttgtgaggctgaggcatgagaatcgcttgagcccaggaggcagaggttgcagtgagcccagatcgtgccactgcactccagcctgggcaacagagcaagactccatctaaaaaaaaataaataaataataataataatactatttaagtaaatactagcatattaatgctatttaagtaaatactatactatcatmttaatactatttatactactattatttaattagtactattaataataccatattaataccatttaagtaaataaataataaagaaagcttacctgaaaaataagaaaattcaaagttttgtacaaatggcaacatgacataattactaagcataattagagtaatttctccaagtgagagaaatattataaggccatgtcttgttactattgctagctattgacttggaatataattatcaagtcctgctccacagattgtataacagtgtaaataatagtatatttctctcttaggagtagccaatatatagaaatacttttatattatgatcttttaaacacagtcacagttacaagtattaaatacatggctaaatctttgacaaactgaacccaaactgccttactttctcttgtaccaatctgactaagctacaccctttatctcctcatttagtcttataaaaccctaactgtacagtttatgacattgctcactttttgaaaaatcacacccttgctccccaatagtcacaaatatatatacgtacctgtgatacaccattctcttcccyagtaaatgcaaattctataagttatgtcgctaagaaagggcaccatttttttttccaatttagcaatttaaacaatttttgacactactaagtacattgaagcttaagcaaacttgtggaaagattaaattctgtcttgagtttaattagctttcataggcctctggaagaacttaatatgagaacccaagtattgattttggtaatgtaatatgttaaataataatatatttcatttatatagtgccttattaccgtcaaaatgtcttcaagtacatgttctttcattctcagagaaaatctatgaaataagtaggcaggtgattttccattaagaaagctgagacaggtcaggagaggtgactcactcctgtaatcccagcactttagggggccaaggtggaaggattgcatgagctcaagtgttcaagactagcctgagcaacacagtgagacctcatttctactaaaaattwaaaaaaaattaaaaattagcccggcacagtggtgcatctctgtagtcacagctacttgggaggctcagacaggaggatcccacgagcctggtgtcaaggtygtagtgagccatgattgcaccaccacactccagcctgggcaatatagtaagatgctgaaaaaaaaagaaagaaagagagagaaagaaggaaagaaagaaaagaaaaggaaagaaacaaagaaagaaagaaaagataaaaagaaaactgagacaaacagaagctaaaagacaaagtcacagacaaatcagtcattgagctgagattgaaagccagttctctcaatccctgcaacaggcctcttttcacaccacactatctccattttttagaacctgcttctattaaactgccrattatctattcaatttatttccagcagtagttgtaataaatctgtttggatcattctaatatttattmatgactttaaagtgttgatcataggaaattgtgttttcatttaattaatttctgaacctctattgtcttyctaggtaccactgctttgtatttgttcctggttatgcayccttccatccttagtaactcccccagcccaaaaacctttgaggaggtacagttctttaatagaaataactaccacagggggattgattggtaagatgggttattagtataaatctaaaagtatatgtactgtgcacagtataaacttagcactaatatttagaaacatctaagtttgtagtcacaaataaaatttaacctctgtgccttggaaattgattgaatatcataaaggggctcagaaatttttcagaacaaactcttctcagtttataaagagacttgttataccaagaggatcacatgtaatttcaattggcattaattttctttgatggtaattatagatattaagtcagaagaatagcataatattcagaaatttaattcctttctactcgtaaggaaaaaaaattttcatatatttttcttcttgtgcactttttatgaagtgatgctacagccaacatatgtaattttctattttctttgtcacataaaaggaaaaataaataaataaaactagaaatgtttgtatattacatgagtaatcaaagctataaaaaaaactatcaacaatacacagaatttaattcttgcctttgaatcaaaattagaaatatatcaaccatctgaacaaacacttaaaaactaaaaatgtcagaatacacaaaatacagtaatgtagtagagatagatggtacaaactaacatgttaaccataaaatgtctctgaaggtcttgctatgaaggtataatgctgaacagagggtggtataaaggagtgaattataataattctgcagcataaatatattttgcatgtattttagcatagtcatatatatctcttgtcaaactgcatgatctcaattttataattatcagccccctgaggagctgcttatgagaagtccgaatggaaaggaaaagaaatggattgagtataatttgagcacctactaggatttacatatattctaattgttatatatttcactgccaatttttcagttcagggtttgataytgattaattgtgtggtgttacataacagctggaaaatcaagaaaccatcgacagtggccaggcacagtggctcacatgtgtaatcccagcattttgggaggctaaagtgggtggatcacatgaagtcaggagtttgagactagcctgggcaacatagcaagaccccatctctaacaaaaatacaagaattagccaggcatggtggtgtacacctgtggtctcagctaatttgggaggctgagatgggaggataacctgagcccatggaggttgaggctgcaatgagctgtgattgcaccactgcactccagcctgagtgacagagtgagaccctctctcaaaaaaagaaaagaaagaaaccatcgactacttcagctgtatttgatcactgactcaaatatacatgccagtatataattatagaataaaatgatattaacatcaggactaaaaggactgaataaaaactgctttggaggtggacaggaatgtattagtattacattcctgtcaataattggattccctaggatgttttttcaaagaacatatttttgaaaaatttatggtaaaaaattattgcaacagttattcttaattttttaccataaattttacaaaaatatattttgrtcatcatgtggctaggtactctaataggaacaaaaagtccagctgggcacactggctcacacctgtaatcccagcactttgggaggctgaggcgggcagatcacctgagctcaggagttccagaccarcctggccaacatggcaaaaccccgtctctactaaaaatacaaaaattagctgggcttgttggcaggtgcctgtaattcgagctactcaggaggatgaagcaggagaatcacttgaacctgggaggcagaggttgcaatgagtcaagatcgtgccattgtactccagcctgggtgacagaaggagactccatcaaaaaaaaaagaaaaaaaaaggaaggaaggaaggaaagaaggaaggaaggaaggactgactcagggttgacccaaataacaaataaatgtggagtattgcaaaaaaaatcccatttttcaggtaaaagaaaatgctgaagttttatgttttatagaagtagaaaaacttaagggaggcaggcatttgcttttaaccctgaattgttaaaacactccagtttgttcactaattctttgaataacctgaatttacattctataaatgtgagcctatttgtggagcttcaaggtctcatactaaaaatatgaaccttktatttacttctctattaatcgaacatctttcaaatgcctgtaagtgccagcmactacactagaaaaatgcggacatataggcaaacaagagctgtgccctgccctctccatgagcccctggggcctggcaaaatcaacacattataggtccaagatccagacttgcttgaggaggttttcaaagcctaaactgttccagatacaaaagacttctaggaaggtatggmaggtttaagaagctaaaatttctgctcttttgtgtgatttttgaagcctttttcagaacaagcaagtttgagtcaagcttggaccaaataagataccactagacacttgaaataatcttagcactcctggaaccagtgtgagcttctacataagaagcatcctgaaagttggcactctccgtaaatagaatgtacaccagaacaaatagcacatcaaaccttccagaaatttttgtatatctctttctccctaaaagggtgccagaattacatatcaccaacaagccaattccagacaacataaaaggatttctttactgctctgaatctcaagatatcactgtgttgcaccagctaagctttgcaatatgttaacaactggaatcctaccagaagctttatcatgtttgaggatatgatctcagtcaaaaatctatgaacatctcatgtgatcttttggtcaaaagaaaacaagacactgtaaaaaaaaacaggtcattgcatgaatattaatgacttttttattcagtaattattgaactaccttgtcttggtagcccagtgtgataatggcttatgaattgaagggggtggcaatggaggctgagaatccctagaagctatatttttacagtcactctaaaaaatcccttttcctctaaaggatgttccttagtgcttcagatatatttcttatcatatgctgaattagttacatttgacaacttttattcaggtggaacattaaataaaattctacatttcagtgcttgaacctatagatatccctgtgttcattctgctggtaatttgaattctctctacccatgaggatatagaacatgaccttgggaaatttgttagagttttatatttggaatgtacatagtttttaaacttctcttacaattattctaaagaggaacataagtggctctatatgagaaaaattaagcaaataagcaatatttataccagatatactctgcatctttcacactatgtgattaaacgtaacaccggcacaatacatttgtagaaaagaaattatttcacttgcaataaagtaaaaaatattttctctaaatccttttaaaatgtctgaactgaacatatcgtctgttttaatacgattttctttttgagtacttgaatttttctctgtacagtgtttctacattgagacacatttgatatagttaggtcgatcactgttgcagtttgatcactctgtgtctacatttttgttattgcttatattttttcctgatattaagcaaaacataaagmaaatgtacttagaaaaacatcttccaaacacattattagtgttctagatatttttctcttcctaactatggaggacaaatgctgtaaagaaaaagccttttatttaggaaacacatgaatttgtgggacacttttaacatctttggtcaccagaatgagtataaaccagaatcttattttgagaaaaatattccttttctaggtatatggatttcttcccagtcccatctaatgtcactaccgactttttgtttgagaagagtgccaattacttccactcagaggaagcccctaaaagagctgcttctctggttcccaaagccaagattatcaccattctcattgacccttcagaccgagcatactcctggtaccaggtaaggaaaatgcaaataaaatccaacagggagaagtggagtatggacaatggagcattgtttttagcaatacccactagctcaggttttcacaaaagagatttgctagttgtttgatatctacagaaaaatggacaagtttttcttgatttctattgasaaatttcctccactaagtttttgttcttattttattaacttaatcaattaatttaataaaatgtattaatgcaataaaagaaactaaattaaaatataacaaaatwttatgtacttttttatatctatgcytctatatatctgcattttaaggtaataatttaaaatcattattttttcatctaatacttgtgtactctataaagagtcagattgcaacaagttcagacattgaggtttatacagtctccattgcaactctaccattgtatttcgaaagcagccatagacaatatgtaaatgcataagcattcctgtgttccaataaaactttactgaataggcagtaggccatagattgctgaccctggctctaaaacagcttaaatagctacttgtactaaagaaacagcttagtggcaaaactaatatatataagaatctttaggctgggcgtggtggctcatgcctgtaatccaagcattttggaaggtgggaagattgtttgagcccagttcaggtgggaagactgtttgagcccaggagttcaagaccagcctgggcaacatagggagactctgtctctacaaataaagaaaattagccaggcatggtggcacacatatgtggtcccagctacttggaaggctaaagtgggaggattgcctgagcctgggaggttggggctgcagtgagctgtgattgcagcatgtactgtgcagagggagactctgtcaaaagaagagagagagagagagagagagagagaaaagaaagraaagaaagaaagaaagaaagaaagaaagaaagaaagaaagaaagaaagaaagaaagaaagaaaaagaaagaagaaaaaaagaaagaaaattctacatccctgagagcctaacatgtctaaatgtttcttgtatactcattgccwttgttttctgatgttggttagaaccttgcacaaaaacgatcactttgaaataatttaacaaactctagtaataatatatatgtcaaatacacttttaataaatcattgcaaataggaaacaatcttttaaaacttgtttcggtgataatttaaccaccagttggaagggtttaatatgaagcagtcaaaattaacataagaacatagtaaaattaatagagtcaatgtctttagtctctaggacccttagttctcatttctcagttttgtaacttaaaaaatgctttcctactgttcatgtgtttatccgttcatcaagtaattttaatgactaccatgtgcaaagttttgttctaagtgtgatttgaaaaataaatttgawgctatacttgaaattgctttcagcctaattggagaaatatgtataaacaagcatataaattagaaagtaataagcgactgacatacagactccttcggaatgacaaagcccacctgacaaagaccacctgggaaaggctgtcgcagagaagcccaaataccagaaccatggggcactttcttaaataagggaaagatacgtaaggggatacatttaggcaaaattaaaatgaagaagtgttttcataggtgcaaagcagagctgtgtaaaggagttatcatcaggtcagtgctgaaaagcagactgagggtcctattttcttggaaacaaaaatgttaagacaaacgtggaatgttctatgtacaaaaacctctaatctgaagtctgcaaataggctggatatatgactgcttccctgtgttaaagtgacccacatagcttagatcctccctacaagagtgggatgttccattcttattgatttgatttaaaacagctaagttcttgacaatcataatattagagaataaagttgctcattactgagtccttttgctacttaacaaaagcagtttttgaagttcacaagaggaagaacagattgttggaaaaggttttgtggcaggaacatagtagggaaaggtcataaaagcagatgaaatcttagggattttgataataatctgaaaaatagcgagtggagacatcctggaaagctaagatccataaaaatccaccattctatactaatcattcacgccaaacctgaagccatcttttaaatcaaaacatacagcaaattgcaaattgcctgatttgattttgcaacttctaccttttccaccaagtatctggagaaaagagaaataagccttaattgactccaagaaaaagaagaaaattggagcttggcaaccacttagtccctgaaaaatagagaatttacagaaaaagaaggctttaaggctgcaagctaacaaaatgtcctaaatattacaaataaatcacagtggcaaaatgcaggccttaacaaagtctagtagagtttgtagtccagtgatttgaatctcaattgcagaaaatttgctattcaactagatgaggtaaacatccacaaactcaccactaagcctgaatatttattggccaatttaaagaaaaggtgatttcctcaaacccatgggcctaagcctgagcaatcctgttggattgctgctttctgcattttctgcacaataaatgattctgattcaccgcaaaggttaccattagataaaataatcttggcttttagatatcagggaatgtatgataaaagctgtggatttcagataatgtacatgtcagactttctagtactttcttcatttaaaagagctgataggccttttctaatctaaaactgcattactagatggagcaaaactatttggcagaggtagtagggtgcttctctattatagatattcactggacactataaatggtttgcttatsagctggaaagagggcattaacacagctttcaaaagtttactttcacaataaaatacatacactaaggaaacaactcagtaatgctggtgaaggaatcctatcgataggaattcaacttctaccagataaattctcaaaaatttactcccataagtatcataactttaaatcctgatgctccaagcaaacattttcttcctttactaatttcaaaatagataactctccagcagtgaggcacttctttctttagctttgagacttgtcacaaagattgrtttttaattatttatgcctayggttcagattagtttaattatccaccttttcatcatagcatcagcgatcacatgaagaycctgcagctctgaagtttagcttctacgaagtgatctcagcagggccccgtgcaccctcggagctcagagccttgcagaagagatgtttggtcccrgggtggtatgccagccacatcgagagatggcttgtttatttccccccatttcaggtatggagtaataaggatttacatcatgttagaatctcattaagttgatgactttgcyttaaggttaagaaaattttcaattgttaaactattastagtttttcctctttagttgtaaataatgaggctatggcaaagagaaataggcagaagtagaaaaactttaattttctaagagtatttcagrataattctccctgctctatttgctgtgcgtacctttcctgattgtaaaaagctttgaaagctttagatacgattcttatcctgagaataaagtttgaaagagaacctcttaaccaaacaagacaaataatgttttgcttaattaagtgccattatttcctttttgaaccaccttgctgaatttttgataagtcctatgtttttctcagccccttgaatttcttctgcctggcatcaacctagattgcaaaatcagcccctcatgggatcatgtaagcaatccagacacatcagacatggtatatacctgtgagtctagagccatgctttccagtatgacagccactaccacatatggctattttaatttatattaaaatcaaataaaatgaaaagttcagttcctttagccacattttaagtgttcaatagctaaatgttagacccagcagctatagaacatgttcatcatcacagaaagttctattgaacagtgctggtctaggctaaacagaaatatcagagaagaggtatggatagacaagacctgctttgcaggctttgtggcctttaatcctggtctcctctcatcttgctgggtccaccctccttggcataacaagcaacttcttctccttagtttcttgaggaactttgtccatgttcaagtttcctgagaatctaaccttattctccatatggattatcgaaatatttcttcaaacctgacagtgctattcctgaaaggaatcgtgaggaatgacatgttctctgtcagattacatctgagtttattataacctttcttcttttctattgtactttccagcttgaatgacaggatcactgctttgtctgttttgaaagttggtttccatttgtgattttctagtcacttttctaagctctcttggtctttcaactgccttttttgttttcatagtgtgacttctcagactgcaaacctgagtgtacttaattggtgtgatttatttcttattccaggtcattaatgaggatgacctggattctatctaacaccaatgcatgcaattctgctcaggacagtgtctctcactgaatgagtttagartgcagaaatttttcattatacagtttacatgtcttttttcaatgtgcatttttttatttgataatttagttgctaattattgatgggcaacaactaagaactgatcctgctacagtgatggatgaagtacagaagtttctaggagtcttgcctcattataattactcagaagctttaacgtaagtttatattctaattagtttattgacatttcagcagagaattgatttcaaagaaattgcagtttggtcatacaactgtcaggttacttgttccttatatactggttatttttcaatttgacattaaccacggaaaaaaaaaacatttcaacagtgtgacacagaaatgtcctaaatcctgtgttaattcctaattgtacaaagatttccctgaaaggaaagtagagaaataaaacagtggtaaatcttaaaacaaaccacaaaccttaaaagaagttatctgaaataaattcgtaaagcctgagcctatttaacaggcaatatggggcttcttggaagtatgaacaggtgagtaactaggtagtttaggaacygactcttctctcatttgtgtaattttcagaaacaatgtcatacagcaagaaatagtccataggtgattgaataagcagagagagatgtactattatcgctccyaaacaaacgtccttttttattttttcatctttgtctttatccactatttgaccctgtcatctctgcttcagagtcctcagcagttaaagcactggtttgatttttctgtttgtttgtatggttttttgctggtttcctccgattttcttaggtaactgactctgtaaggtccatgaccagggaccagtaaggaactagggctgaagaaggcagtcactctcggaggtgtgcccatgcctgagactgagtgctgtgtcctaggtgcctctcttacctcaccctagtgctgactctgggcttcacttagcatttttgaagaagacctctatcttactgcgtccatttagaatagttggcaatcagatttaggagaattatatttgttcctaccacatgtgtagagcaactggaagatactgagttggattgggtcatggacctgactcacaccgtaagttggtttttttttaattacatggactgagccttaaaaaaaaactgaaaaagactatcatggaatttttccattgtgtttttcagtataaaactcagttccacagatcgagtagttttccctttttttgtactctttaatatcaatttagaaagtgagaggcaggtttcctttacctttcaacaaactttgcaggaaaaaaagattagcaggaaaacatcaaatactgcttatatctcctacaaatcaaatatagagacacgtaagggaggcattttgctgtagaggacaaaggagtaggtggaactctgcagttttgagcttccttcctaagagtcatttatactttgctgttattattaaccttctgacctctgtgttttctatactatgagtactgtcagagttttgtatagcttagttcaagtactaacacagacactggccttaggtatttaacattcaacttgaccttaaagaaagctgagtgatttcagtttgcacttaaaaattcaagaccattttctgttctgtatctttttaagcatctcttggaaaagaaagcttttattttctaaacagttttctatttcaagttaggttatctgtgggtcttttttatagagtatgtagcaaagcattgtatttcagaaaaaaagaagtacagtattctataaagacagagttgctttttcttatgggatggtccttgacctgcatgctgtgtatttgtcccctctgcagccagctcagcagcaagctttttattcatctccactgctgagaaaaggcagtgtaaacttaagagaatatcaaagcaacatactatatacaaagaaccgtagtccgtttgcacctgagctgtatctagctaaaattactgattatatgattctctaacctggttgggggctcagtgggtgaaatagcaagataagatatgtgtagtccctgaaaccacagtttctattccagcagtgccacccaggctctcaccctgcaggtggagatactgtgtttccattccatttctttttatattttcttgtcaatcatcaattggcctgacataccttgtaaaacctggcagtgcactagttgtagaatatttggaagtttcatgtcattgtcttgggtctaaattgatcatccttcaccctatgccctttgtagttgtttatctgaaacctgtcttcacaatttagttactcctattagagtaactatactgatagctgtttctgtagtgctttggaaatactgaggatgactagaggtacaaaatatatatcgtcagaaatgccatttataccagtttgtatactttgtacactttggtattgcttcttattttttcttcttattttcctgctggtgataatgacgactatctcattggtgcttaaaattttttttttctcattggaagtcctctaaggatatagtaaactgtaaaccaatatgaattctcaactaactacataaatctagtgctttgcatgtagtagaataaatgaatgaagcaaggtctatacaaatgttttgctatgcaatcttggygtgaaagagtactccaatttaagatatctctaaacttattatcttccatatagcaaatttcagcatcaaaactattttcaagaagaatcacaataagcccccaatgtcaagattgttgtttattcttttccacaagtgctaaagaaagcgttcaagacttttaaagatatacaaagtcactgaagaatctgtgatgtcttaaaatgacttattactgttatcatgggtgttaaatgacatatttaatgttaaataatctgattttctcagtgattgtgtgaatgaaataagcaaaataagctttaaaaatataaataagaactttctcattcaatcaagtaaattataatttacaactcttgttccacatacccttaatccctaaatgggattaatatattaacattactttagtttttgtgttacatgttatatagtgttttgaagcaatcatttgaaataagacaggaaaaacaatgcttagcatggaattgtactaatttgtatacactaaaatgaaaaatatgaacttttagttttgccatgaatacatctgttcacaataatacctagccatcaatgccaatgacagatgtcttcatgtttagaaatactagttagctaaatacctgaacctggcatctttatgtctcagtcagttaacctatttgtcaagatgaatgaaaccagactatgttatatgaatttttagtattaatttactttgaaaatgtcaataaatgggcaatgagaagttgaaagccgagagttgagtatagttgtttgtttgttttgtggacagaggttagctaagtcacgaaggactgaagctgcttcaaaattcagaaggacttcaatagcttttaatataacttccttggcaacgaaatttatattgcccgggaattgttttcctacccactgtagataaattttagtacaaatgtactacactaaaactttcttattagcaaattatagtagccacagtaactaaaatctgctggttctctggatggcatgaaagaacacctagaaatgctgagtagggaaaagaaaaaaatagtctattctaatttcttattataaatttttaagtggttgtaacagttcaaaataaatatacatttatatgtcctatatatctctctctcttcataaaaacacaatgtgatacgtacaattagctccattttttcagattaaaaaaaactggggcacaggaaagttaagccaaaggtcactcagcaagtaagttgaggaggcaggattgaaactcaatcagttatctctggaacctacattgccaacctgttaagctcttcatattggcacaggatgttagaaccacagaaaaacaatactgtgaatttttaatagtgaatagcatattaacaggaagtgcttccttaaaaagaactagagccttaaaatgagctatggaagttgtttcagattttattatgaataaaatccatttccaggtgcactggatgtcacttttcttcataaatatgtaatcataaagatatgcaaattaaaataacattgaaataccactacatacccaytaaaatggctataatccaaaagacaataccaatttactgtattagtccattctcacgctgctatgaagaaatgccccagactgggtaatttataaagaagcaagatttaggctgggtggggtgtctcacacctgtaatcccagcactttgcaaggccgtggcagatgggtcacctgaggtcaggagttcgagaccagcctggccaacatggagaaacttgtctctactaaaaactcaaaaaattagttgggcatggtggcaggcacctgtagtcccagctacttgggaggctgaggcaggagaatcacttgaacctgggaggcggaggttgcagtgagccaagattgcgccattgcactccaacctggggaacaagagcgaaactccatcaaaaaaaagagagaaagaaagaaaaagaaaagaggtttaattgactcacagttttacatggctgggaaggcctcaggaaacttacagttatggcagaaaccaactcttcacaaggaggcagaagagagaatgaataccagcagcggaaatgccagatgcttataaaaccatcagatcttatgagaacttactatcacaagagaaactgccccaatgattcaattacctccagctggtcccgcccttgacacgtggggattattaaaatccaaggtgagatttggtgcggacacagagccaaaccatatcacaaatgttggcaaatatgtggagaaactagaatcctcatatactgctaatgataatgcataatatatggccactttggaaagcagttttgcagtttcttaaaaactaaacagaatctcactcaacaatccaatttcacttctaggaatctaccccagaataaatgaaaacctaagtccataaaagctagtaagggaatgatagcattattcataatagctaaaaactagaaacaatacaaatgttcttcaactggtgcatggctttgttatatccacacaccaggggrgtttaaaaaaaaaaaaaaaaggaatgtccagaaaagagacaaatgtagagttagaaaaggtttatctgggccgggcatggtgactcattgctgtaatcccagcactttgggaggccgaggcaggcagatcacccgaggtcaggagttcgagaccagcttggccaacgtggtgaaaccccagttctactaaaaatacaaaaattagctgggcgtggtggcgcaggcttttaatcccagctactccagaggctgaggcaggagaattgcttgaacccaggaggtggaggttgcagtgagccaagatcgcgccactgcaatccagcctgggcgacaagagtgaaactctgtctaaaaaaaaagaaagaaagaaagaaagaaagactttatctggaactagggatgacagcagggattgactgcaatgggctgcaaaaatatgggttttggaaggatagtggaaatgttctaaaaytggattgtggtgataattgtacaactatataaacttgctaaatagtgctgaattgtatatttaacaatatgtaaataatacctwaaaaaagttgttaaaataaaatgcatatcagtaaaatgattccttaaatcataaacgtgtttgccaaaagagaactgattttaaaaaactgcaatgcctatcctatattagtaatatctaaatgatggtattttgattttgaaatttactgaattgctattttcaattcagtattcacccatagaaatggtttttcgatgtaaaggcatttcagacatactttagtcttctaagtgtaatctgaatgttttgtacgattaacccgcacgagggtagaaataaagtcatgttttcattaatataaaaatgtcagccaggcactgtggctcacgcctgtaatcctaacactttaagaggccgaggcgggtggatcacctgaggtcaggagttcgagaccagcctaaccaatatggtggaaccccatctctactaaaaatacaaaaattagccaggcgtggtggcgcacacctgtaaccccagcaactcgggaggctgaggcaggagaattgcttgaatccagcaggttgaggttgcagtgagccaagatcacaccacttcactccagcctgggcgaaagagcaaaactccatctcaaaaaaaagaaaaaaaaaagtcactgtttagaggttgaatcattggagaatcttggtgcccctgcccacaagtcttttacagttatttctaaatatcccagatgatattccacacaagctttagaaccattcttacccattcttgttttactctttaaatcaacaaaatgttattgaataattatgtgcatgactctggagacacaatgatgaacaaagtatccccacctccaggttagggtagccctagaagcggacactaaacaatatatgaacacttcctccaaaatgttcactgcctgaaggccttgaaaggagggccccagccatgacaatggttgccagtgcttacataaaaagatagtttccttgctgttccaccagacttcagagaaacactgctgctttctgaatagatgtggggagattttctccatcttctattacacttcttcatttgggctctgaaatagtattacttgtgtcccaaactcataagaccttcaatgaacagcagtcccttcatctatgatggttctccatgaaggaccagacccagtccctcaggccaytgggtaaataaacatgctttcccttctagcttctccttctcattttcatcctgacacacttataccattgcctatgagggtatgcacacagatgcctaggctaggtgccagctacacacacagtttttctcagtgaagcccagcatgacacctgctgcataagatctaattaattagcygacataaaagaaaaacctatttttcttttgattcttaattttagcatgtgtggagttcagtgcttcttagaaaaactttctctcagaagactactcattttaatacacagcatatgtatgttccagttacgttatctacagcaaggtatattagcaaaaagtaatagctgctctggattctgaattttgatcacttgaatacttaaaatgagtcagaattcaattttggaaaattgctgatagcaaaatgttaatgaaaaatattacatcaatcacagacttccagaaatgttgtattaaagtttcccaaaggctttcatgtacagattatttaaataatacagtctttattaatgatctctttgtaattctgaatatagcactaatttattcagttgccttaccgattcaaacaagaccataaacagcatgaaaacataaaatgttgtgtcctgatctgacacaattgctttaataatgatgagaaacaggctttacrtaaatggaaagtgattattctctctaatacacaaagtcatacagaggcagaaatctaggtttgtattcttttcatagggctagagttataaattctacaagattaactacatatagactacagccccacatacacacacacacacacacacacacacacacattagatcacacwatcattttaagtgctttgttaatgtataatttacatataatcacccattgtaattgtgcagttcaatgaatacaaatatatacagttgtacgtaccaccagaatcaagatatagaacaaaaaggtataatccaaaaaatttaatcatgctccgctgtagtcaacactttctactcaccttgacccctaggaatcatcaagctactttctttcacttagcataatgattytgagtttcctctatgttgctacatctatcaggagtcaattcttttttattgttatatattactccattttatggatgtaccacaatttgtttatcctttcaccagttgatggacatgagtaatttgtattttttggctatcacgaacaaagctactgtgaacagttgtgtggacatacatttgcattgcattcgagtaaaaacctagaaatggggttggtgggtcatatagtagttatgtattttaatttctaagaaactttacaaagaggctgtaatatttttaatttctaccaacaattctatttgttccatgtctttgccaacatgggatatttttaaaatcagtcattctactgagtgtacagtgctatttcatttgtaattttaatttgtatttccttaatgatgaatgatgttcagcaaattttcatttgttcattgaccattcatatgtgttctttggtgaagtgtctgttccaatcttttttttttttttgagatggagttttgctcttgttgcccaggctggagtgcaatggcacaaactcggctcacygcaacctctgcccsccaggttcaagtgattctcctgcctcagcctcctgagtagctgggattacaggcatgcagcaccatgcccggctaattttgtatctttagtagagacagggtttctccatgttggtcaggctggtcttgaactcccgacctcagctgatccgcccacctcagcctcccaaagtgctgagattataggcgtcagccattgcacccagcctgttccaatcttttatgcagtttttattgatatttttatcttttatagtgagttatatattccaaatacaagttctatattagatatattttttacaaatgttttctcccagtctgtggtttcccttttcattttcttgtgtctttatgagagcaaaattttaaattttgataaattcaaaattatcattatttttcccttatggttcatcctaagaaatctttgcctaacccaaggttgcaaaattttctggtttttttccctatgttttctttcagaatttttataattttagctataaattttttatttatttatttatttatttatttattatttttattttatttttttttttttttgagacggagtcttgctctgtcacccaggctggagtgcagtggcacaatctcggctcactgcaagctccgcctcccgggttcacgccattctcctgcctcagcctcccaagtagctgggactacaggcgcctgccaccacgccyggctaattttttgtatttttagtagagatggggtttcactgtgttagccaggatggtcttgatctcctgacctcgtgatccgcctgcctcggccttataattttagctataaatttttaagttttcagcttaaatttttatagtttaggtttagctcaataatacatttcaagttaatttttacatacaacatgaggtaagggtcaatgttcagctttttcatatagatatccaatttttcttgtgaaatttaaaggactaatcctttcccactgacttaccttggcagccattttttgaaaatcagttgactgtagatgtgtagatttatttctgaactcttcattttgttccattgatccattggtccactgatgccaacaccatacaatcttcattactgtagaattagagtaaatcttgaaattaaatagtatgagatctccaaatttgctctttgttttcaaattgttttagcttgtctacttcctttacatttttatatgtactttagaataattttctgtttctacttaaaatatagtccactggagttttgataggaatcatactgaatctatagacaaatttggagagacttggtattttaaaagtatctagtcttctgatttatgagcatggtatagctccctttttttctaaaacttaacaaagttttgtagttttaagtgtgcagccattgcacatattttttgtaaactgtcaccctagatatttcaggttttcacattataattttaagcaaagtgttggaagtagcattcctagaagtagaacagattaaaggcaaaagaaaaacgttatctgaaataattctaattgagaagaaaaatggcaatataattattgaataacaaaagctatgtaaaggaattatcattgctattacattcacttttatatctgagcatacaaattagtgctttatttacagtgaataataatataaaacctacttggagaccagtaaaaaagaaaaggccctaaaccgaaaatcagcaggcctagacttgagtcatgacttgaatattgaagaagtgtatagtacaaggtaaataaaccttgacaaacattttctcccttctcattttgtgttcaactaatacttggcaaatgtttacaagagccaaacagtatgctaaatgctataaaatgggaagaatccttcacagcatatccttaagtgtyagaatgaaacctcaaatgagaaagagttatatgaaatattttggtaagataaaatgtgtattttaatgtgctattattatttattataattatggcataaaaagttcatttaggctgggcacagtggctcacgcctgtaatcccagcactttgggaggctgagacaggcggatcacctgaggtcaggagtttgagaccagcctgaccaacatggagaaactccgtctctactaaaaatacaaaaattagctgcgcatgatggcacatgcctgtaattctagctactcgggaagctgagggaggagaatcacttgaacccgagaggtggaggttgcggcgagccgagattgcgccattgcactccagcctgggcaacaagaccaagactccttctcaaaaaagagaaagaaaaaagaaaaaaattcatttgtaggtgctattactttaatacagagctcataccaaaagaagaaagtagctctgaaaaaaattaaatggattatagctagagaatcctaaaagtaatcactccatgatacactgaaaccttttctcttctattaccttctagttgtatgatacaagtagcatctaaatccatagacayggaagaaggctgacttgtttttaaaccctacaaagaaaaagaatgacttgtttttaaacccaaaaaaaaatttgaatatttatgcattttttccttccagatgaaggaagtagccttattaatttctattaataggagatgtgctgacaatttttctgttaggaacctggcaaactcacaaatatgacagatgaactcagaatttagaagtatgccaaaagactttatgcaaaggaatatagtaaaaaagaattcagtttctctggttatagattgttatccaaataaaatatttatgtattggwcactatatcatatgtattggtcaccatatcatataaattggttgaaaaatgattttctggtttttctgtgtgtattcttttttttttaggtttgattctcataaaggtttctggtgtcagttactggaagaaggtaaaacaaaatgccttggaaagagcaaaggaagaaaataccctccaatggattctgatgtaagcatagaccttaaaaatacaaactaaatcagcaaaatggtaaccaataatatcatctactttcttaaaaaactagttaaagtcaaaattcagcctttctaaaaattaaaagtgccatttcaatttcagtacaggtaggttgcttattttgatttacccacaatatattattacctgtcatgcaagaataaaggaaaacaatagaattcaacattctgaataagaacaaagagataatatcttattccaaaaagaatgatacctgcacaaaaattttagtataaatgttaactgaaaccaagacaggaagtatatccattggaaagtgaaaataggaccaagatttctatttttggccgagtgtggcggctcatgcctgtaatctcagcactttggaaggccgacgtgggtggatcacttgaggtcaggagttcgagaccagcctggccaacatgataaaaccccatctctactaaaaatacaaaaaaagattagctgggcatggtggcaggcacctgtaatcccaactactcaggaggctgaggcaggaggatcgcttgaacctgggaggtggaggtcacagtgagcccagattgcaccattgcgctccagcctgggcagcaagagtgaaactccaactcaaaaaaaaaaaaaaaaatyctatttttttsactgcctgagtcattctgttgtagtaagtgtgccctgggcagtaatgtaagttactgatataatatactaagttttgagctgttaatatgctaataaaatgaaagaagcaatgtatttcccaacatctaacatactagcagataatttaggctttggggaatgtagacacacactttgcagtatgtattcagcacttcctgtttattctgttcagaatggagacatggtgatcacttaatgytacagttttctccatttctataccycacatttttactttaatgcttacttgacatatattaagatttactaataatatttttatttattattagtctagttagtagtttcaatataaccatgcaagtagattttgatttgtaaattttttttagatctcagaaattaaaatatgatttgggatttttcccccacaattaatacattacattaactgagaaccctaagatrgtctgaggatcctaaggtgggctaaacttattagaatactttaacaaaaccttgaggactactttttgtgccttgcctgatagatgcagggtctgtcctcaataaactcataattaaatcatatacggaagagagagagagtttctgttattttgataaacaaactgcattttcagaactccaattttctgtggctgattaaaatataccttcagagcactttgaaaacaacccttcttttcccaaaagaaattgacatacaatttctatagtatttcaagaaagtaatataaaatatatcatatgcatttatgtcaaagctatttccccgtaaatttattaaagctaaaatgtttaagagacactgcagaatatctttcttagcattttgttttactctggtctaacacagaccttattaaatttggaggtagagaaagataagaaaaacacaacttttcaggatatccttccttctcaacaaggttactgagtaatccatattgggtttatttaagggagtggctgattttgtgaaaataatgtccacaaagcaggtaagagtaaagaggtcttcacagaggtaatgaaaatacaaatgtgtaggagggattagagtgggcagtactgtcaccacaccttttgcctcttcctagtaagaaaaatgccagtacccaagactgtcagtaaaatatcatagcatgtgctaaataaatagtccatatgcttaatacaaattttaatccagatctggtatacttggtacttatttcaacgtagtcaaagtgtatgaaatgtrataaacaaaataaaatgtacttttctctcctcctctccacttagagcaggacatttctgtcaagctactatcgagatcacaacgtggaactctcaaagctgctgcacaaactgggtcagcctctgccatcctggctgagacaggagctgcagaaagtaagatagcactgagagaaaacttgagacttcatcgtccatgtagaacacaccttttccaaagcttccagaagctaccaaaaggcagttgaaaaatatacctcttcaaatgagaaaaaagaacagtttcttccatgtgctggcacgtggatgattagaaaaaaagaaaaagtatgtgttacaagccttgaggcctgtggcctttctcttaacccatatctgagcctgtgggattattgtagactactgtgcactcatgtggaagtcaattgcaaccaacataaatatcaaacacaaatgcagaactgttccatttcatagtaatatttacacttttatatatcaactaagattgtgtctctgtaggtttttagaccactgtttgcctgtacgatgttttcttattattttattctataaagtgtcctatgaaacaagaagcaaaataaacatcacaatgtagcataaaatgtcaaaagcataacacccatgaaaaatgcttgccaaaatttaaatccacttaagtatttagaaataattgtaaattataatttgtgctagatcagagtggaaaagttatatatgagtgttatctgcaccaaaaaaaaataagtgctatagcaaaagtgattttttcatatacatagtctagtgaatatatgtaaaaattactaactcttccatcacaacgtaattgttatactgaaatatatactgtaaagctgttggatggtaaatagaaacacatcaagtacaccaaaacagtaaataacaatgtaaagtgtactgactgaatcctctaaaagggagaaattgtaggggtctaaaaacatatcatcgagaattctatgtccacttgctgtaagctgtgaatctatcccagtagtcctcactagttctacagaaatgcatgcctagagtctgaggtatgtgtcatctccagaaacaggttgacttttaaatgtgaatagctatttttaatgctccccaaaacaaaacctattaaactaaaactaaaaacagtttccctagatgatgtggttaggctatttacatttaggttattaaaaaattgcattttcccagatagttcaaaataaaattatgtaatgtagtagagatttataacaaaaaacaaattaatatattatttgtaatctaatgtttgcaatgatacttttgatataaggcaaagaaacataagcagagcagaggcccatttttgaaaatatttcacccatcactctggtggaagtaacagatcataggtacaattaaggattagctactaaattaaatgcaggaagtacaaagatgagcaagtcatgctcttgaaatatatttacatttcaattgtaaataatatatatggttaataaagtttccaaaaaagaaaagaatacatcatacttattttcctgttaatatttacttaatttttttttttgagagggggacagagtctcactatgtcacccaggctggagtgcaatggtgtgatctcagctcactgcaacctccgcctcctgggttcaagtgattctcctgcctcagcctcctgaggagctgggattacagccatgcaccaccacgcccgggtaatttttgtatttttagtagtgacagggtttcaccatgttgactaggctgatcttgaactcctgacctcatgatccacccaccttggcctctcaaagtgctgagattacaagcgtgagccaccatgccctgactacttaatttttaaatgtactgtacatatacataaaatttaagtagtaaattaattccctgctatgattataagcctttataaaatattatcaaaggtatgattagaaacaaatgggaggaaaacccatagtaaaaatattttcattgtcattttaatgggtaaaactatcaattactaattagaaaatgaattgtgagatccacttactataaatttttaactgtacattataattacttttttaaagtttcatgtacctaaagcatatgctaatttttaaatatactattagcagaaaaaattggaaaaatcaccaatttttaagactcttgactctaaaagcaaaatcaaagtgatttggacaaatatgggaaacacagtcttcatgcttactgctgtctcttttatagcagcagatgccagacatgctaggaaaattactatagtcttccatctccaccaacttaagaaaactggcttaggaaggttaaacatgagaataggcctcagcagttatatacagtgtcatgttttcatttggcaacaacatttattctaataaaaaaagaaaagaaaaactgatacatttatgctttaatggtaagatgtacatttgaactgctaagcaaagctgctaatggcctattttgtttaggtaaatcgagttgactgaacacttcatccttttaaatagatgtcaaaaacatactccgtgtttgtataaagacaggagaaaaaggaagagatcttaccaaaatttattcattcacaagtacatgtattacgctagctagagcagcaaacctgtgaaaggatttttgaccactcaatgtgtcttgaagacagcatcaaattctagaggacatgcatactttccacattatatactccaactggttaatatgctaatctgaaagtaacataaatacatatgagagaataatgagagataatctgatttaaaactagctttgtatagaattccctttttcattgtttaaaatatgaaacttcctcaggaagaaatgaaatggttatttcaatgtttatagctgtaatattcttgtcattcacattgaatgaaaattactggaaacatttttttctctgagttttttaaaataaaaaacctagatataattctgatagtagcatggtacctcatatgtacaacaataaactgataggaaaatgaagagtttggacctggtgattttaggtaacagtaggtattttattgttttggcctgggagtgagtgggaggtggttacggaacatagatactactaacataattcaaaatgaagagatagaaaattttcaagtaggatatatatctatcctatatttataaaacctttcacagatccttctcctcctaaatttatatgttacttgtagtgaatttttttttagttctaataaatataatgcagtttctaggtcatttatgggaccctagaataagagaataagagaatcacacagctgttactaaatggacttcagaacaggaatgattatagcatttcttacccctagtattctgttctgctccataccaatgagcccatttctttcctcagagtttaaaaggtgttcatctctcttttctaaaaatctggcaaaacaatctctgcaaaaaaaggagggaggggggattcggggagtttaaatttagccatttatcttcattctccacacattttcttttctctcttccaatccctttcttttctagacatcagcttttcacatgttgcaacccaccctatctcggggcaccagctgaataccccacaggcttgcctcccacacacacagctcactgattgagctgggacatctcatctcatcttctgccttcagactgtgatttacagcattggcttccctgttcctcaggctttcagtctcagattggattacaccgttaaccacccagtctccaacttgcacagcagattatgagacttctcagccttattaattcggcttttttggagaactctaagacacacagtttcacttagattccatccccccaaaaatctgcaatctactttgagtaagcctttcacctatggccaaggatacctaacaaaatttgagggccacttgtccccaaaccagtgctgctaccagttcttgccatttattgtccctaatttgttatctataaaagttctctatatactcagtgcccttaataaatgttacagcgtaaaatttattcatttatttgttagtactgaaactaataaataagttgaacctccttccattaatcctgtaactatcctcatctttaagtatctatcacttctcagtctatttccaaaagttataaatacaaaaattaataaatcactaaagttggaattagttatatgctcaccatttcctctggagcatctcttagagaaagaggaatcatgaatagtatcagtaagttaaaaaagacattcacttgccagagtcaagtcaagtatctcttttactatactatagtcagagctctccagagaaatagaactaggggcagatacatatacatatatatatatacatataagcacatatatacacacatataagcatatatatatatatatatacacacacacatacataagtatataaagactcattataaggtattggcttaaatgattttagaggatgcaaaggcccatgatctgtcatctgcaagttggagacccaggaaagccagaggtgtagttcaaaagcttaagagccagagagccaataatgtcgcagtctgggtttgaaggcctaaaaaccaggagcactgaggacagaagaagttcaatgttcagctcaagcggccaggcagttaactggaccttcttccaccttctcattctattcatgcccttaatggatcgcatgatgcccaacaacactggggagggtaatctgcttaactcagtctaccaattgaaatgctaatcttatccagaaacaccatcatagccacacccagaaataatgtttcaccaactatctaggtaccctgtgacccagtcaaagttgacacataaaattaatcatcacatttacttagcaatccctttcaaggaagtcaaaccacattttacaaattaaatgctcacagcataaggtctccaagatattgttagaaagaatgtatttgcccacattttaccatacagaaaagtgaattacactgaataaaatgtgagatagttcgaaagcacccagaatctgtgacaaatcttacaaaactgtctacattaagctgcttcttggttttgagggaatacattaagtgtaggaaatgcctgctgtctacatttctgatgccaaaatgctctatttcaaatcaataactgaaatggaaaccagaccttgctcttaaatattatacataatttataaagttggaccaaagaaaatgagccttctctatttgataaataatattctgaatctaaatttttttcaatttcaacattaaacagaaatgcaagctcaacatgctatatactcctagtgctttagtgtatcatttcagaacttactgtaaatccttcaaagcaaacaaaacttttaaaagcccacaaaacaaatatactatcaaaaataaagcttgcttcacatataaatgaataaattgacaaatttttaataatttaaagattataattttaaaaacaataaaaagctatgaaaatataatattgataaattctccctcccacttgtgatcatcctgagaaaaccatactgttttcattcccagttaattacagggatgtcctcagtgcaatcagaatagcaaaaaagatagattggactataattgaacatttgttctttactaagtaacattgggtaggtgacttttctgatctcaatttacacatctgtcaatggaagtcacatgtgatgattggtaaggagggggaatgcttttctccctgctttgtttaacatgttccagtagatcaattattgtaacatgtgattctgtctctgatctactctcccatagaggaggaaccaatgaattatctaagtggtaaaactggaagcagaaattccgcttgaatagctcaacctatctccctcacttctctttgggatctacctgcaaagatgagccaccctggtcctcttggcctgtgttaagtttagcagacactgacgtttatttaaagccacaaacaaaaccaaaagaagagctaaaaacaaaaataaaaacataaatacatgctcaaaaattaggaagataagcaagaatgtgagaaacagtaatataaatgagctaaatgtctccccctcatgtggggagccaacagatactgcttaaagttgaaaaattaacaaaggtaaaagcgtaattggaattatgaagataatcagcagagcttaaaca

SEQ ID NO: 95917 - DNA, 37039 bp, Homo sapiens
  misc_feature (1)...(37039): n = A,T,C or G
cgcctgaggccaggaggttgaggttgcagtgagctatgatggtggattgcaccactgccctccagcctaggtgacagaggcagaccctgtctgtaaaaaaaataaaaaaattctacaagagctggaacactcagagccgtttttctaacacatctgatggcactcaaatgtgccatctctgatggctccttattgctgtcaggcaggagcaattggcagcagctcacctacactccaaggctggttgtttatgacccacatctactttgactgggtggtacctgggttgtactggtggttaaatattttgaacatcacccctgcttataacatacagtccaaactctaagaaggtaagtagaaaagaaaacgcattcgtttggcatctgtgtcaagcctggacttaatgctttcacagcattgccttttttcattttcagaacagccctggaggcagctactatccccattacacccattacaatagaggaagaaactgtgtctccaatagattcagttacgtggcctacagggtccctaacggcccaccggcccaccttcccaacattgtttctactctaaccacactgagcttttgatggtctctgagtcataagcaccttcatgcctccagcattggaatatgctctcctctctgcccctctgcttccttttcacctcacagatcccactcagccttccacgtcaccccactgtgggaaataacagggcaaaaacagtcccatgggagtaccgctatgaatctttatgaatacaaccgtgtactgtgcaatgcaacaaacaagcaacagacacaatcaagcttgaaactgcggggcagtgagaggggtgtgtaatgatatggaaatgattttaagaatttcccaatcactgacaaagaagtaaaatacattatcaggtgaccaggcaagaatatacttacgacttggtctaaatcttaaggaagacaattaattaactgggaagcatagagcaacaatgagtattaagagatagagaaactgatttagggtttttaagagctattcaaggagaatttgaaatataaactaattttgtctcagtgccaaagttaacaatcccacataaaatgcaattccctatagagtagttcagccttaacggtactttcactttccacagtttcagttacctaaagtcaacttaagtcaaaaaatattaaatgaaaattccaaaaataaacaatttataagttttaaattgtatgccattatgagtagcataatgacatcttgtgccatctcactccttcccacctgggacatgaatcatccctttgtccagagtatccatactgtctgcactatccacccattactcacttagcagccatctgagttaccagatcgaaaaagcacagtatatgtagggatccgtactctccgtggtttcaggcatccactggagactaccgtaagatacagtgtggtgggagaattgatttcgcaccccaattctatcagatggagaggctggatcaaagtccctccaagtcctggcagctttccccgacccacgctatttttaaatgattcctgcttagttgctgaaggatagcaacgtggacctcctttgttactgtgtctctctgatagaagggagtgggtaagccagaactggaggcagggttgtcagttcctcctgaaacagtatcatcaatactactgtactgtgggaaacgggaagggtgtctaaccaatttgcagggaggggtaaagaggatgtaagagaaggcttccaggagaaaggaggaattagccaggtaagaggaacagagaagggaaagggagttccaggtagaaggaacttgtgcaaccaaaggctcagagggaaggaagggagccacaagaaggttggaatggggaatacgagggggaaatgttaagagataaagagggccaggtgaggtggctcatgcctgtaaaccctgcactttaagaggccaaagtgggtggattgcttgaccccaagagttcgagaccagcttgggcaacatggcagaaccctgtatctaccaaaacaaaaacaaatacaaacattgcctggggcatggtggcacacatctgtagtctcagctactcgggaggctgaggtgggaggatcccctgaagctggaaatgtcgaggctgcagtgagccatggttgtaccactgttttccagcctgggcaacagagtgagactcagtctcacatacacacacacacacacacacacacacgagataaagagggaacatgttagagaagctggtagggacagatcatatatagcgttgccagccatgtttggattcccctgagggtaacaggtatccacagaagacttctagcaagggagtgacaggaccggacttgttcggtgaacattgagaaaccctactccaaatccaagacagaggaacacaaagggctgccacagtgaggcctcagagaacccttccgagttagccagctccaaactgggaaaactgaggtaggcagcttttgttgggtgcctcacacccgctttttttgctccgtctctgcagttgctcttttcccctaggctgcccactagctgcccaggatccccaaggcagtatcttcacccaggactctgctcgctgacctgcaacaagctcccatcctctcagcctacttcctcgcaacccactcactcagggaggatgtaacaagcacttaccatgggtaaggcagggtgctaggtcccgtggggagaaaaatgcaaatacgcaatggtctctgccctataagatcaggccccatagcatagtcagggtcctcactgacctgttttctgctaaggattgctactaaaagggcaaagcccaaacattaggctatcttaggtatttacctgtgtcctggttttgattccatcacttatcttctctggggctgtttccttatatagaaaataaaagggttagcctggctggctgttttccagtcagggcttcttgagcacttcagtcctcagaggcagtgcccaagagcattcttggtagtaagggttaacacatatycaaaggtggcagggcttcacaccatcactccataacgaaagtttttatgttgatttgtttttgcgttagcttctggcaggagttacttggtgcagtaacactgcctatttcctgctgatcagaatttctaggtggcagccatatagatctgattaataaaaaaggcaaattattattttttaaaaatcatgttcattagacaaaaatatttcaaaacatgagggacaaggtgatgaaaaaatcaggaattattaagttaacagatagctgaagctcccctccaactctaaaaatcccacgattctaagctgatgaagtatgctattatgttaatttattatactcatcaggtaacatcaacttttttttttttttttttgatacagagtctcactctgttacccaggctggagtgcagtggcgtgatttaagctcactgcaaccttcgcctcctgggttcaggcaatttttgtaccttagcctcccaggtagctgggattacaggcatgtgccaccacacccaactaatttttgtatttttagtagagacgggattttgtcatgttggccaggctggtctcgaactcctgacctcaggtgatccacccaccttggcctcccaaagtgttaggattacaggcattagccaccgcgcccgcccatatgaacattttaaagggagatgtttgtaatctaatgataagatcaattgtaaaaatgcatgaataaatttggagagatcagaatttcaagatcacttgttgaatgacattgatgaccttcctaaagggttgacccagtggccctcctcccctaggcctgggatcacttcagcctcagaaacacctgccactgttttagaaacttaattggcaatacactttggcggtgccttcaatgacatggaagcagggagcgcccccatcacagaccttgccctcagaaggttttagggaacccaacactttgaggagagtcttcttagatgttttcctccaagactgcagctcctcacccttcctttccactggttttaaatctaataccataggcaggttgaaccaaggagagcacacccagacaagcccctttcctctgcctccctcagggtctctacttagctctatcattgttgttagacctgacctacacttcagggttggcttggcagaggctttttggggagcagggatagtgtaagaggcaaaaaaaaacaaaaaacaaaaaacaaaaacaaaaacccacactcaacacacaacatttctgtgaccagatgcagtggtgaggggccctggggggtaagttcctcagacaccaagcgattctccagtggacattggctaagcattctataattcaattcgattctgattctgacactagctacctggaggtagtgtcagattccatggggtaagggcttgatcccactagactgctcctcttcagatgccaattgcaagtagtagatttcacctatacttcttagcagctataaactggggctcccactaccccctcctttggtctgattaatttgctgagaaggctcacagacctcaaggaaacatttaccagtttattataaaggatagtacaaagggtacaaatgaacagccagatgaagagatggatagggcaaggtgtcaggggtgcagagcttccataacctttctgggcaagacaccctcctggcatctccacatgttcaacaaccctgaagctcatcaactcttgttgttcgagcgtttatagagtttgatgtccagctcctcccctccccctttcctggaggttgaagggtggggatgaaagttccaatcctccaatcacttggtctctctggtgactggccccatcctaaggttatctagggcccccatcctaaatcacctccttattataaactcaggtgttatcaaagagacccattacgtataacccaggaaattcaagggttttaggggctgtgtcaggaaccagggacaaagcccaaatatatttcatattataaataaataatatgatagttagctatgtcacaccctcatctcaggagtccatgacggcggtataagatcaagaaggtcttagcacatctagcttcgagaaggcattggaagtgaggctttaaagtttctgcagagtggaaggattgggggtgggggtgggggaggagatcacctgttcccaaatccttcaaataatctcttgttatcagggagattctttgataactttggcttcactcggcaactagaatatttcatttaaaggtctgaacattataaaatcaaagtatgatacaaaccgttcttcaagacgctttcaaattgacccaagacatgacctcaacaccttatacggcgttcaaatctgcttaatgtccctttggaaaagttttctctcgtctctctctaaaagacaaccgcactttcccaaagctgtgctcttaagagttggtaaagtgacaatttggtttatccaataatcagattaataaaggtataccatttctaaggcacgagagcaggaatcttaagctgaggtagccctgggactaaatatgccatcctcttgtatcaagatggagaagacggccgaggttcagggaaagagcccagtggaagaacccaacctagtgagaggaaaacgggcacctggtgaaggccccggcctctaagctagggatgaggggacaggcctctgcctagcctgagacaggagtaggaaactgaggcattcacacttttatgtggcgatcacagttcctgcagactgtagcagagctggggagcaggaaccagaggtatagtcccacgcccacccactctcccctcccctccctccgcggccccgcctccaaccagccgcttccggtcgcggggagggtcgcctgcgggctccagctgcgcctgcgcaggaagggcgggtcagcgcgccggcgcagtgcggcggtcacaggctgagtgctgcggcgcgatccttgcttccctgagcgttggcccgggaggaaagaagatggtgctggatctggatttgtttcgggtggataaaggaggggacccagccctcatccgagagacgcaggagaagcgcttcaaggacccgggactagtggaccagctggtgaaggcagacagcgagtggcgacgatgtaagtaccgggacgggcgggttacctccttgatgctaaacccaattttctctctcaaatccagccaccgctcctgaggccacagcttccacccttcgtcagaccccctcccagggtgcggtggctccgaggttctccccatccccgaaaacacagcctggtcgccggggtcatcccactttctcctccacccgggcggagcgaggtcccttccacgcgtgctcagtgccgttcgctgccagtgtgcgtacgcacgcgcatcgggagctgtcaagccttcctgccccaggggttgccagaacatgccggggcgggaggttgtggggtctacgcggctttcctaacacgaatctttggtcccccccagtctttttctcatcttcagcaaggccagagtggttttcctttgttttgataggatcaaaggcttctcctgagactgcgtcacttctgcaacacagtagattcattccttcggtatcggaagcatttcggggcgttggaggccgctcttggccaaaataaatgaccctgaagcttttcggaaggccatcccccgacctatgggcatacctttaagaattagaaaagtcttttccgtggtagatcaaacgcgaggggagtgaggaggcgagcaaaagattgtaatgactgaagctgtttaattgtgatttgtggacgttttcctttaaagacattggcagagttgggytagaacctggaactgccggatcttggagtcatatcgggcatctatcatgaagccgaataaaaccatagaaccatctgcccataaatctctgcctgtattaactggagtggtcgctggttgggcggatgctgtcaagtacttgtgatttgatttgtctgatgcaataggtctgcaaccatctgggagctaggtcgatgacagtacactgcaaaggcagccactatccaagagtgtgatggatttctattaggaaaattgattttctcctgtttataaggatcttggatgtcaaaagaatatttgtttaacttgagttttgtgctgattctatgtcttaggccctctattgtagtagtttgtttgattgtgagattccacacttgacctgaagtttcgagttgcaatggaatttaattttgccacattttttgtttaggataaaactagcctgagcactgttctactgaatctgaagtcaggagtatcagatttttgtgtcagtccagcccttagccagtgctaaatgactttgaatgtgttagctagtcttttgggtataatgtccacatctgagggatttgtcccttatctgaaaagtagataggtggtgagttcttcagggacaaggattcaattttattcatacagtatatatgtggatatacatatacacatttatacataaaatcccagtacctagcactgtacctggtccttggtaaggccttgataaaggtttgttagaggcgtgaatattttctgtcttcagggcactttatattctttatgaaaagcagtttatgtagtttatgttattgttttaaaaaacttaatcctaaatgtgaagtcatttcttttctttgttttgttttgttttgtttttgagacggagtctctcattatcacccagattggagtgcagtggcaccatctcggctcactgcaacctccatctcccggtttcaagagattatcatgcctcagcctccaagtagctgggactacaggtgtgcaccaccacacccagctaatttttttttttagttgagatgggagtttcaccatgttggccaggctggtctctaactcctgacctcaagtgatccgcctgcctcagcctcccaaagtgctgggattacaggtgtgagccaccatgcctggccaatagtttatttccaatgcatctattaatttgattcttttctatttgacaaccctttccaatattctctttgcatccaaatggaatttatgttttttcccaagttcccaactgcccaaggtagacactggcagatttatatcaaggttctttgacatcttgaacttcagatcagaggatggagttcttctctcattgccttgagcaagggcttataaccagagccacattaagaactcagatcatgctccctaattgaggacacatagcaagcttcaccaagccctccactacaactataccaatttgtcttcctgtagacttacaaggtaccactagggttcctttggagaactcaggagtccagtataacttggagtgataataccacattggaactcacaactcttctaactccagggatttgaatgtgatttcttctttttaattcagagtagcgtaatgatcctacacttgggcatatttgtcttggccccactcccaaagcaaatagatttccatgtaactggaaatctgctgcaaaccccaagaattttatcctccctcaaaaagtgctatcctgagtggttttttttttctttttactgtacattgaaaattgaagttgttgtttcctttttttttaatttgagacaaggtctcactgtgtcacccaggcatgatcacagctcactgcagcctcaatctccccaggctcagatgatcctcctgccttagacttctgactagctgagactacaggcgcaatgccaccatgcctggctaatgtgtgtattttttgtagagatggagtttcgtcatgttgcctaggctggcctcaaactcctggcctcaagcgatcctcccacctcggcctcccaaagtgttgggattacaggcatgagtcaccatgcccaggctaaagctgttatttcctcataacctttactgcacatgttttaaaacaggtccttatcattgtttgccccagcaactggaatagctttctatctgctttcaatcttaacccagtctcaccagggcatataatctttctagaatgcaaatctgatcattttacttgaaggcttaagttttgcagtgacatactttagagcagcactgtctgataggaatagaatgttagcttcrtgtatacagatgctccttgacttaggatgggtttatgtcccaataaatccaccataagttgaaaatattgtaagtaaaaaatgcatgaaatacacataccctactgaatatcatagcttagccaagcctaccttaaatgtgctcagaacactgatgttaacctacagttgggaaaaatcatcttacacaaaccctattttataataaagtgtgaatatctcrtgtaatttattactattgatcataaagtttaagcattataagttggcgatagtctgtaattgttaatttgtttgtatccaatataaaaaatataaagagaaacagatgaaattaattttagtaatacattttatttaacctagtcttgtrtacccaaaagttatatatatataaatatatatataattattattattatttttagacagcgtcttgttctgttgcctaggctggaatgcagtggcatgatcacagctcactgcagcctggacctcctgggctcaactggtcctcccacctcaaccttctaagtagctgggaccacaggtgtgcaccaccatgcccagctaatttttaattttttgtagagacagagtctcactttgttgcccaggctggtctcgaattcctggactcaagtgatcctcccacttcgacctcccacactgctgggattacaggtgtgaaccaccacgcccagccccgaaattatattttcaacacataatcagtatttttaaattactgaaactagcccggtgcggtgactcactcctgtaatcccagcactttgggaggcygaggcaggcagatcacaaggtcaggagatcgagaccatcctggctaacacggtgaaaccccatctctactaaaaatacaaaaataattagccgggcatggtggggggcgcctgtagtcccagctactcgggtggctgaggcaggagaatggcgtgaacccgggaggcagagcttgcagtgagctgagatcatgccactgcactccagcctgggtgacacagagagactctgtctccaaaaaaaaaaaaaaaaaaaaaaattagccaggcgtggtggcgggcgcctgtaatcccagctacttgggaggccgaggcaggagaattgcttgaacccgggaagcggaggttgcagtgagctgagatcgtgccattgcactccagcctgggggacaaggtgagacttcatctgaaaaaaaaaaaaaaattactgaaactactgagatattttactttttttttttttttttttggtacaagtcctcaaactccaaagtatgttttacacttaaagcaccactctgttcaggtgctcatttcaaatttcaaatgctcatagtcacatggtattaaaagctactatattggacagtacagccttaaagcataaaaatccaaattcctgaacacaatttacaaagtcccccatgccttcctggcctcgcygtctaccacttcccrcatagggcctcccgctctttgctctagcttattgctactcctagactctttcacacttctgtgactgttgcctcttcctggaatgctccttatcagggtgtgccactcccacttccaacggccctctttggcactcaactactgttgtagtgccacctcatttattgagtgctctccttatattatcttacaaatctcttacagcatttatactattcctgtatatacccttcaaaaacttatttttattgacatagatacagtaaagtacacaaatcttagtgtacaggttgatgagttttctaaatatatacaccaatgtaacacttagatcaaaatataagacatttaggccgggcgtggtggctcacacctgtaatcccagcactttgggaggccgaggcgggcggatcatgaggtcaggagatcgagaccatcctggctaacacggtgaaaccccatctccactaaaaattcaaaaaattagccgggtgtggtggcgggcgcctgtagtcccagctacttgggaggctgaggcaggagaatggcatgaacccaggaggcggagcttgcagtgagccgagatcacaccactgcagtccagcctgggcgatagagcaagactctccatatatatatatatatatatatatatagtgtacatatacagtatatatatacactatatatttatatacacactatatatatatatatatatgacatttacagcacaccagcagattgccttatgccacctcccagtcagcccctcctccaaaaataatagtattcttacctccatcaccataaattcctttgcctgattttgaactacatataaatggacttatgtagtatatacttttgcatatggcttctttcttttttttttttgagacagattcttgctcagtcacccaggctggtgtgcagtggcgtgatctcagctcactgcaacctccgcctcccaggctcacaccattctcctgcctcagcctcccgagtagctgggatgacaggcacccaccaccatgcctggctaattttttttgtattttattagagctggggtttcaccatgttagccaggatggtcttgatctcctgaccttgtgatccacccgccttggcctcccaaaatgctgggattacaggcatgagccaccgcgcccggcatggcttctttctttcaagattatgtctgtaagattcatccatgttattaacatgtagcagtagttggttcttttcattgctatataatactccattatgtaaatatgccaatcaattctactagcatatttactgcatgacatttggataaactgggttgttaccggttgagggcattatgaataagcttctagagactcttttttaaaaaatgtttgattggcaattaacagattatagttgtatatatttatagggtacaatgtaatgttatgatttatgaatacaatgtggaataataaaagcagctaattaacatatccatcacctcaaatacttatattttgtgataagaacatatgtacattcttatgtgtgtcttttggtagacattaacactcatttctgttgggtatgtaccaaggagtagaattgctggatcatagggtgggcacatgtttagatttagtagataataccaagtagttttccaaagtggttgtaatgattgatattcccaccagcaatatctaagagttccagttgcttggcattcttgccagtacttgacattggcagtccttttaatttagccattctggtagatatatagtggtgtctcattgttattttaatttgcatttttttggtgactaaagatactgagcgctttttcataagttgatggcatttggatagcctattttgagaagtatctgttcaagccttttgaccaatttttatttgtccttttcttagtggtttgtaggaattatttatatcgtgtggatagaagaatacctgtgagatacagataccacagatctcctctcccattctgtggcttgccttttcattctttcagtcttgtgatgaatagaagttcctaattttaatgaagtctaatttattgacttttcttctgtgatttgtctattgtgtttccaaaacacaatagataaatcacagaatttgtattctgttttgaaaatcatgttatgtcttaaccttcagaagagattctccagtttttttgtagacattttatttctttaccttttacatttaggtataagatatatttaatattaattttggtgtattatgtgagatagatcaaaattttttttaatgtggagagtcaattgctcatggtaaaaatgcaataaactgagaatagaagggagcttccttaatctgatagtagatacttacagaaaaacccatagctaatttttcttttcttctctttttttttttttttcttgagacagagtctcattctgttaccaggctggaatgcagtggcgtgacctcagctcactgcaacctccacctcccaggttcaagcgattctcctgcctcagcctcctgagtagctgggactacaggtgcgtgccaccacgcccagctaatttttgtatttttagtagaaacaggatttcaccatgttggccaggatggtctcgatctcttgatctcatgatccrcccgcctcggcctcccaaagtgctggtattacaggtgtgagccactgcgtccggccacatttttcttaatgatgaaatatcgaatgctttcccccttgaggttaggaacaagacaagtatgtctcttatcacctcttctaatcaacatcatgccaaaggttccaggcagtatgaagaaggcaagaaacaaaaataaaagattggaatggaagaaactgtcattatttgcagatcacttgattgtgtatgcagaatctgaactattacaattaaataactttaacaaaataactggatacaatacacagaatcaaaggtacttctatatacaagtaacagtttagaagcmccaggtgcatagagatatacctaataaataacatttaagactcatatactgaaaactacaaaacattgctgagagaaattaaaaacaatgaagggatatactatattcattgattgaaacattcagcattgttacaatatttggttttgttttattttctttttgtttcttttctttttctcttttgagatagagtcttgttctgtcacctagcctggagtgcagtggaatgatcttggctcactgcagtctctgcctcccaagtagctgggagtacaggcacacaccmccatgctcagctaatttttttktttgtgtgcrtatatatatatatatatatatatatatatattttttwtttttttttttttttttttttttgtagagacagggttttgccacgttgcccaggctggtctcgaattcctgggctcaagcgacccacccacttcagcctcccaaagtgctggaattacaggcatgagccaccacacctggccttattttcttttatactcccaatacctaccttggtgccttgcaaataggagggaatctcaaaacgattatagatttacaggaagttggaaaaatagtagaaaggtcccgttttccccaatgataacatcttatataactctagtacaatattaaaaccaagaaattgacattgctacaatccacaaaccttattcagattttgccagttttgcacacatgtgtgtgtgtagttctgtgcaatcttaccatgtgtaaatttgtataaccactgccatgctcaagatacagaactgtttcatcaccacaaagatccttcttgctatctctttgtagtctactccctttgccctccatctcacccctagcaaccactaatctattatccatctctatagttttatcaatgtgaataagtgaatgagaaaatagtgatatcattttgcattgaagttttgttaaagaggtatcaaagaggaaagcttcttggtaaagccttaaagaatggctctctaggtgctatcttatttctagtcatcaattttgcctcttaaaagcttgagtttggctggatgccaaggctcacacctgtaattctagcactttgggaggccaagatgggtggatcgcttgagcccaagaatttgagaccagcctgggcaacacagcaaaactccatctctacaaaaataaaaataaaaaaattagctgggtgtggtggcgcacacctgtagtcctagctgcctgggaggctgaggtgggaggatcacttgagtccagaaggcagaggttgcagtaagctgaggtcgtgccactgcactccagcctaggtgacagagtgagaccctgtctcaacaacaaaaaascttgtgcttaawttttatcatattgcccctgacgtttagattcaagaggtccaaattttgctaatcagagttagactgatgatccatgataccaatatattaatttgggccaatatgttgaccagttagtgcctgtcttcccccaraggaaaccaaattataagagactaaattattctcaaggctgctagatgagcattatatcaaagtaaaagggtawcattagccatttctagcatggagaggtagcaatcatgactgcactctctatagattcctgtgcatagcacctagtttccttaaatgagttttaagataattgggcaggttagttacttgagtgtcttccaagtttttcagatgtgttactctataatggcttcatacaggttatgatactttttaattttaacctcagattggtcttttccttgtcaccaaatgctggggacaccctattgtagtcaccattgtatgccaactacatttggggctctaaagctctaagattaggccgggcacagtggctcacgcctgtaatyccagcacttwgggagggcgaggtcaggagttcaagaccagcctggccaacatggygaaaccccgtctcttccaaaaacacaaaaattagccgagtgtggtggcgggcacctataatcccagctactcgggaggttgtggcaggagaaccgcttgaacctgggaggcagaagttgcagtgagccgagattgcaccattacactccagcctaggcaacaagagcaagatgctgtctcaaaaaataaaaataaaaagctgtaagattttataacttcatgaggcagatccttcagctctgccggcatttgggccttaacctgaaatcagtactaagaagtcaagatcaggagaaaggagtatcttaattatgggcatttctttggtatagtcttggattctttattcctaggtagatttcgggcagacaacttgaacaagctgaagaacctatgcagcaagacaatcggagagaaaatgaaggtaagagaactgaatawcaaacagccatgagaacttgagcggagatatttgatcttgctcttagctaatgttcacagaagttctaactcagtgtttaagtctacaagatgttcaatttcttaccaaaggggaaaatattattttaaaaagatagggaggcagggaacttggaggcattttcatatactttaccacaagtccatcttctgtgttcaggtaagattctttgttgtctagctgtttgttgtctattctgttcttatattagaaatataaattccaccagtcatcttttttatggcagatttcagatttgtcgtctcagcgtagttatgctccataatgaaaactacagattcagagttcaaatcttgctacgttatgtgtcttttaggcaagttaatgcctcagcctcagttttctcatttataaaatgacaatactaacactcacctacagaatggaattgttagaactttttttttttaatttaaacgccaagcaatggttatggatagaactaaatttcttttaaatgtagaaaatttggcacagtgtctagaacatgtagttgttcagcaattgtgagttataatgaatggcaagtaatgttactggccttcatccaaaaaaaaaatccttcctatgcctgaaaaatactatgtttcagctcagcttttgctttggtatccagaatagttcatgtttttaaccttccttcaaaaatacctgtttagccccttaatcatattacattacatattatagctgggtacagtagctcacgcctataatcccagcactttgggagccaaagtgggcaaattgcttgagctcaggagttcaagactagtctgcacaacatggtgaaaccccatctctacaaaaataaaatgaaacaaaaaaattagccagacgtggcggcctgtgcctgtagttccagctactcaggaggctgaggtgggaggatcacttgaggccaggagtcaaaagttgcagtgagccaagattgcgctactgagctccatccagcctgggtttccagtgaaaccctgtctccaaaataaataaattaattaattaaatgcactttacaatctagataacttttamattgtaaacctcaaaactaaacaacaacaacaaaaaattatagaactttggaactgcaccagtaaagagcataaaaagatgacctcgggattctagcaccttacacttaacttcatggcagtcggcatctttctctttgacaatattttgttacactttcagcgtgtaacacttttagctgtggaaagtgatattgataatcatccagtttctttctgtgggacttagtcattcgcatactagaggccccataattatgttaattcccatgcatactcctccctgggtgttctttgggacctatgtacagtcagtgccagctgggtattttttgaagcaagaagatgggattgtgagtgttgtcattcacaataacattcttagatctgattttgttgctagccatgcagggagtgttcactcccactgccattgaaatggtaatgatagtgctttaatttgtagagcactcgaaagcattcagatactttcacagacatcttattttggttttgatccttactgcagagctggagtgcagatagtacatttgtcagccctatttaatgggtaagggaatcggcttaggaaattaaagagcttgcttaaaatcatattctaacttagttgcagagtcaaaccttgagctcagaacttgaatttgctgccctgagggattatcaaatagcaagggagcctggtaactatcttgcaaacatatcaccctgcctatgatgccattgcaaaaatcttgagatttagtccattttttccctacctctgtagtctgttcttatcaagactcattctgatagtttcagatttttccaactttttttctttttttctgagacaaagcctcattttattgcccaggctggagcgcagtggcacaatcatggctcactgcagcctcaacctcctgggctcaagcagccctcctgcctcagcctccctagtagcatgccaccacactcggctaattttttttttttttttttttgttgagatggagtctccctgtgttgctactgcacctggccagatttttccaactttttaagatgattttgctctgagtcactgaagggtgtgagtggagttayggttagaattttgattgtatgagaatgtgtaatgaacctaaaggatttccatgctttacatttaggagatttagtccttttgttctttctttttttttttttgacacagtgtcttgctttgttgcccaggctagagcgcagtggcgtgatcatagctcactgcagcctccaactccttggctcaagcagtcctcccacctcagcctctcaagtaactaggactatagacacatgtcactgtgcctggctaattttttaaaaagtcacccaggctggagtgcagtggcacaagcatagctcaccacagcctctaatacctgggctcaagcagtccccccgcctcagcctcccaagtagctgagactacaggtgtactccactatgcctggctaatttaaaaaaaaaaaaaaatatatatatatatatatatacacatatatatatatatatatayacacacacacacacacacacacayatatatatatwtatwtatttatttatttatatttagatatggggtctcactctgctgcccaggctggtcttgaactcctgggctaaagtgatctgcccacctcagcctaccatgtagctgggattacagttgcaagccactgtacctggctatactttgttttatttatactcacaaagcggatgctaaatattcttatgcaagttttgttgaagtctcatgtatcttattataatgacctttgactaactttctttaactcttttttttttttttttttgagacagagtcttactctgtcacccaggctggagtgcagtggtgtgatctcagctcactgcaacctctgcccccaagttcaagcaagtctcctgcttcagcctcccgagtagttgggattacaggtgtctgctaccgcgcctgcctaatttttgtatttttagtagagacggggtttcaccatcttggtcaggctgatcttgaactcctgacctcgtgatccacccacctcagcctcccaaagtgctgggattacaggcatgagccaccgtgccctgccaactctttttaatttaagaagaatttaactctttaagtgatctttttaaattcacctggttttgtgcaaggattacaaatgatgatttagcagaattatcatacggaaggatgagaagagaaactagagagaacgaaatccaaccctggttacacccctgccattttgtcaaattacattgattgttctaaactgagttccagatcctgtgactttttgtttgtttgttttccttggctgtctgatatttcatcattccatccatctttcacccttagcctcaatgctgggattgttgttagcaggtagataagaatctacactcggggccgggtgcagtggctcacgcctataatcccagcactttgggaggccaaggtgggggatcacttaaggccaggagtttgagatcaccctatccaacagagtgaaaccctatctctattaaaaatacaaaaaaaaaaaaggaaaaaaaaattagccagacgtggtggtgcactcctgtaatcccagctgcttgggaggctgaggcaggagaatcacttgaaaccggaaggcggagcttgcagtgagcccagatcacgcaaactgtactctagcctgggcgacagagtgagactccgtcaaaaaaaaaaaaaaaaaaagaatccacactcaggtgtgtctgctccagggcttgctcctgagcactgcactacctctccagcgcttatagctcatgagcatttcgaataaattctcttctgattcctatgatgatctatgtacagggaatgacattcttctcatattcttcaggatgttaattctctgacccagacagattaattgattttaggatcaaaaagctattaagtggcagcatagggaggggcttgacactttgacttctggcttccagtgtackaatttttttcctacatgttgtatcttttagaaaaatttatgtaagaagttctgtgattcatttatataatacgttaatttrgtgtacactttataaaacaatgccagagattttcttttatttatttgtgttgggtttttttccttcctgcagaaaaaagagccagtgggagatgatgagtctgtcccagagaatgtgctgagtttcgatgaccttactgcagacgctttagctgtaagttanagttcttttctaagttaggatctctgctattttgtcttaattttattcctagacagcaagtgctctcactctgctccacacagcattgtgacatcctttcatttctgctgctgggaaatgtccccacccattcttgttatattctatatttgagtatttattagacagcagagatggagacagatggagtgggagagtcggagagtcaaggacaggaagaatagaaaaaggaaaggaattgtgtttggtttatataactccatattctaccgtttgttacacaaaggcaagaaacttcagtttactgtaacacagtaaatattcagtacgctggcaagagcagtaatttttgagttttttagtcactgaaccctttcttgaaacccttaacatatagcaagaacataaaccaaaaaagcaaagttgctgtgcttgaaggtctcggattgggggcctgaacctgcctggccctactgctaaagcgcttgcctcaaagaaataagagcacagtttgaaacacctgcaatacagaatacaaaatatgcttcagacaaatctcttactcctaataaatttataatcttcctagagaacagttgaatgcagcacatcaatggagtgctaaattggttcagtcmagaaaatcagaaagtgcaaattaagggaaagttctcataagagagcggcagtacttaaatttctgcaatgtatgggaacaatagatagtggccagaactatctatctctgcctcaagcacccccaaagaaaaatgccgatggatttgtagggcaagactgtgtatatctgtgtgtgaagkaaatctcagttcttaaaagtcttcgtttccagtttttaaaatgctaccacaagggctatctttagagcacaacagggttagggcaaccgaatcatattcctgtgctgtccttgcctcactgtcctgcttatgggcctggcctgttcatctgcagaacctgaaagtctcacaaatcaaaaaagtccgactcctcattgatgaagccatcctgaagtgtgacgcggagcggataaagttggaagcagagcggtttgagaacctccgagagattgggaaccttctgcacccttctgtacccatcagtaacgatgargtaggtggctgtgccgcagcaggaggctgccttaggtcgctgctgtctctgcaggggcggggacgggaggagatctgtggaacactggcattgtctgtcagaagcaggttctttgtatattccctctgcccaccaattgagaattgcaggagtcagatccttgtctgattgggaagtagcagagacagcaggtaggaggagactcctggcacagaaatctcttctaaatagggctgctgtcctccgctgcatgttgcccgtggtagcaggcatctcgtgggagggatctgctaaatcaacctaaccccttcacccacaccctgctgagaagctgcaggttgaagggaaatctgcatgataaaagtttcctgctgagcgggagcttcccctgcacaaagctgctctgagcccagcctttgttccccgacaccccagccgtagcagggcccatctgtgcctctttcattcattccctggtgaacattaaactcactgcaggctggggtgtgcaggaggctgcagagcacagaccacgagacgactctggaggtcagggccctgagtccgccctcatgtggccctgggaccaatgagagcctggaaaaaaaaaatctacattctcctctgcaccccaggcaatgtcgattgtctgggaagggttgtccttgtgcaggatttgaggggtaatttaaaagggtaaaaaaaagaaataaacaaaaaaaamccccgagagaatgctatagacctcttggaaaatcatcaytcccagtttcatggctagaattacttctcaaactttgtaagttactacttctccattgagtagcaagttgccttctctagttatgagacacagtagtgtttgagttaagcgatgacttcacaaagttaagttgttcgtggaataaagtttggaaagatggaggttgtagaattaagaaatcatatatcaagcttggcgcggtggctcacgtctataatcccagcactttgggaagcctaggcaggcggatcactcgagcccaggagttcgagaccagcctaggtaaaatggcaaaaccctgtctctacaaaaaatacaaaaattagccgagcatagtgttgcacacctgtctgtagtcccagctgaggctgaggtgggaggatcactggagcctggaaggttgaggctgcagtgagccaagattgtgccattgcactccagcctggatgacggcgtaagaccctgtctccaaaaaaaaaaaataatttaaaaataataaaatcatatgtcttgtatgtctctttcttgctctgtttccttaggatgtggacaacaaagtagagaggatttggggtgattgtacagtcaggaagaagtactctcatgtggacctggtggtgatggtagatggctttgaaggcgaaaagggggccgtggtggctgggagtcgagggtacttcttgaaggtaagagctgggaaccagtgaggataggattatgaaaaagaaacaaaatatatatatatatwtttttttttttttgtagagaaacataatctgtttaaagaggcccacagatctaccagttgtacttgcctttctgcaaatgtattggcaattagatgcaattctctttctaaagcaagagagggcttatcaggattccgtagaacaaaagccactaagtggtcctccataatgaatgtctgttttgctgactgaatcagaacagtctctgcctttaagtagctcagtataattggacagtcagacaagtaacaaagaatcaaaatccactgtcataagctctgtggtttgtgtaggcccaaagtgctttgagaacatcargataattctcttaacggtgtgcctggatgatttgctgggcttcagtgttcagaacgaatctcaaggttcagaatgtcagttgctgggatctgtggtcttttcttggcctcctgcttgcccctcggtagtcctgttctcttggcccaggtgcctttaggtgtcagttctagctgaacatgatggtgacaagacccaatcacatagtactgtgtctctgctcctctagggggtcctggtgttcctggaacaggctctcatccagtatgcccttcgcaccttgggaagtcggggctacattcccatttataccccctttttcatgaggaaggaggtcatgcaggaggtggcacagctcagccagtttgatgaagaactttataaggtgagtagcctgggtcaggtgacagaatgacttcttaagttatgtagcttaamwtcagtgatgcagagtggtgctgtccaataggactttctgcgatgatggaaacgttctctctctgtgactcttgagcacttaaaatgtgggtggtgcaatggaggaagcacattttttattttaattaattttaacttaaacatgtagctaatgactgcnatattagacagtgcagctgcagagcctcttttacctttccctgggtaatctgtatgatgtatctaaatcaagcatacttgaacaccatgagcttagaaaagaagcccattccttgggtgcttggacaaaaggaaattacagtggtggcactgatctcctagcctgcttcccatgtcctcccactcctaaccccagactggaagcttccacagggtgagacatacttgccttgggatggaggtggcttccagtttgtggctccttctcaaccatggaccatgtcagggagagccagacaattcaagtcaaggttcagaaggtcattctgatcaactggctctaacaccaataacagcaccccactctgtgttcagcactcaagatttctagagcgtctctgctaacagctgtccaatgcagcagtgtctactattcatttgtccctccctttcaactcttctgtcagaaatagggacttagttcctactggcttatttcctctccagacagtggaggtagagttagacaactgctgttggactcatctaatttatatagggagatagttcaataattagaacgatctttccattgtttctgttgatgaggtaaaagttaagttttcattcaagacgcactgggaaacaaagtgctctccctaaaccctgagcatcagtataaccttgacctcctctcttctttcttttaatgaagggaggaatgtgttcctttactsgctaaaacctgttttaccttttctttctttttctaatttcaacccctaagattagataatcactaacagaacattagaaatatccgctgcaggtaacagtagggagaaacctatgtggagtattatggaaactgttaggtagctggtgctctctgagtcctgcaatctccgtctcttatccagacgcttcttggacccacaggcaggaagaatcacaggtttcatagtgaagaattttggctggcacttcttgtctgataaaaacctcagttctgtaagaatgaatatatcgctgcctaatagaactttctgcactgatggaaatgttctaagtctgcatgatccagcatggcaaccatcagccatatgtgacttgagcactgaaaacgtggctgatgcaaccgaggaactaaattttaatttaatttaatttttttttttaattaatttcctatgtagagacagggtctcactatgttgcccaaactgatttcaaactcctgggctcaaacaatccatccgcctcagccttccaaactgttgggattacaggtgtgagccactatgcccagcccaatttaatttaaatagtcatgtgtggctggctataccatattaggctgcacagccctagagctttcgtatgttgtatgtgaatggccccacagtggctaaattcctactgccaggtagcaaggtagttttccaggcctctaaacactgatccaggggaacctttcttccttacttttttttttttttaattaaaatgctgctacataacaaaatttagaaatggcagagggaattatytgctttcccattgacctaatataacaattgtcatcttaaaatattcatgttgggatttttttcatatatatgttgttttcacatacttataattgccatgtacataaattgccttttaacttagcattatttttaatttttatttttatttatttattcattttttgagacagagtctcactctgttacccaggctggagtgcagtggcacgatcttggctcactgcaacctctgcctcctgggttcaagtgattctcatgcctcagcctcccgagtagctgggattacaggcgtcgccaccacacctggctaatttttttttttttttttttttttttttgagacggtatctcactctttcayccaggctaaagtgaagtggcatgatctcggctcattgcaacctctacgcaccgagttcaagggattatcctgcctcagcctgttgagtagctgggactacaggcatccaccaccatgcccgactaattttttttttttttgtatttttagtagagatggggttttgtcatgttggccaggctggtctcgagctcctgacctcaggtgaaccacccgccttggcctcccaaagtgctaggattacaggcatgagccattacgcctggccacacctggctaatttttgtatgtttagtagagacggggtttcaccaagttgtccaggctggtcttgaactcctgacctcaagtgatctgcctgcctaggcctcccaaagtgctgggattacaggcatgagccaccgtgcctggccacctttttatgtatcattatatcaaaagtatttttctgtgttactgcatggtcttcatttttatggttgtataatattacataaataatgttacagtgaactttgtcctgtctgaacttttttttttttgcattattttcttcagttgaacagcaaagtatattctttaaggatcataaccactaacctgtaagcaccaagaaagcagagactggtgtccctttttgctccacattggtgtttagtaaacgtctcacaaggattaatgtatgtggctaccagcacaggtttattgcatacctgccagcattgaccattattcatcatggatgagttttctgtattagataagtggaaaatagctgggcacagtggctcacgcctgtaaccccagcactttgggaggctgaggcaggtggatcacctgaggtcaggagttcgagatcagcttggccaacatggtgaaaccttgtctctactaacaatacaaaaattagctgagcgtggtggcgcgtgcctgtaatcccagctactcaggaggctgaggtgggagagtcgcttgaacctgggaggtggaggttgcagtgagccgagattgtgccactgcactccagtctgggcagcagagtgaggctctgtctcaaaagcaaaaaaaagataagtggaaaatattctttcctcttaatttacatttctttgatctctgtcagggaccccattttggactgacccattcctttatctttttagtattctctccccactcccaggcagggattaaaggaaatttttcytgcactattattgatctctttcttgtggtttcttattctagccaaggtcctccccacttcctcttaactggtatagctccttccttccacaggtgattggcaaaggcagtgaaaagtctgatgacaactcctatgatgagaagtacctgattgccacctcagagcagcccattgctgccctgcaccgggatgagtggctccggccggaggacctgcccatcaagtatgctggcctgtctacctgcttccgtcaggaggtgggctcccatggccgtgacacccgtggcatcttccgagtccatcagtttgagaaggtgagtagatgggtcagggtaaggagtggaactttctctgtctccagaatggttagatgagagataggatctgtgttgctgaggcccatcctggctccagcttttcctctcattgcttacctctgtgtttctggggaagtgcatggtggagtggcgtggattatggaccctgaaaccaggctgyggctttaccactcaccagctgtgtaacattgggcataatgcataagcccccagtgctccatttctgcctttgtatgaggaggataacagtaacagtgcctgcctcaccaggcctattgtggcctattgtgaggattatcccagtcactatatgtaaagcactcagaacaggggctggcatgcatacgggaagctcgcaccataagcatttgctcttgtggtccagtcccagttgctgggggcccagacttgcctgcctcccagtggtgtggaaacaggtcttcatggcaaggatgtctcccacttcagtcctttattcaccctataccgctgtcaccgtntccttgggtccctctctgcagattgaacagtttgtgtactcatcaccccatgacaacaagtcatgggagatgtttgaagagatgattaccaccgcagaggagttctaccagtccctggggattccttaccacattgtgaatattgtctcaggtatgggacccagcctcttctcagcctccctttcctgtaatcccagacgccacccttaccagctgagctgccacacagagaaacagctcacaattcaactcattgcccacattaattaaaatattacactcttctcacttgggagtatttggtgttaagaatatctgggtgtgatttcacctctggagacaggacatgaattaaagaattcttcaggcttgctaaaggttagccttctgaaataccatccctccttcatgaattctaggggtttttccttacaggttctttgaatcatgctgccagtaagaagcttgacctggaggcctggtttccgggctcaggagccttccgtgagttggtctcctgttctaattgcacggattaccaggctcgccggcttcgaatccgatatgggcaaaccaagaagatgatggacaaggtagatggcccccagggaggtgggaagcagagtcttcagtacacggcccgtccgaattatttctcagcctttggggtgcactggtccccagcatcatgggaaaatctgagcttctcaatctagaccaaaaagggaatctgaaaatgccttctactgagtcaggactgagttcttttagctagaaacctgaatctagctctcttctataaggtaattctagcttttctctttctggctttgtttttcttaactccagagaaagaataatctccatttatctacacagaacaagttggaggcttccctcttctcacccaagaaggtctgggttgtaagctgctctcttcaaacccaattttcaggccctactcttttccaagtcaggwgcttgaaaggggtgaaaaggaaaggccacaatagtagtttcttccttccctcaaagggcccaactcctcagaataccagaagctaccacttgtcactcatcgaaacatgagggatctttctgcagttatctaataggcaataaataccaaataattcaaatttagaaaaaagttgctaaggggtagaacccatcattttgatttggacagttgtggttggggaagtctggttgaatggatggttcctggccgtcagtaagacccgatgagagttgagcccgacttcccctctgggaccctgtcttcccaggtggagtttgtccatatgctcaatgctaccatgtgcgccactacccgtaccatctgcgccatcctggagaactaccagacagagaagggcatcactgtgcctgagaaattgaaggagttcatgccgccaggtaaaacycccagctcatctcatcgttctcctcttttctgtcttcacactcttctaaatagcagtcccctttcaggatataccaggtttttttgttcagacacagcccctgaaactctgtctgccctctcgggctgggcagggcagggggcctggttgagaaagtagccagtgcaggtatgatgttgaaatgctgctaaaattcagactagggaagaaaagaataaaggaaaccagtgcctatcaaagggacccctctgttcaaagggatcattgtcttgttgaattctccccagaggtcttagggctttgactcactgagaaacaacaggtcatttggttggctcttccctcccaggactgcaagaactgatcccctttgtgaagcctgcgcccattgagcaggagccatcaaagaagcagaagaagcaacatgagggcagcaaaaagaaagcagcagcaagagacgtcaccctagaaaacaggctgcagaacatggaggtcaccgatgcttgaacattcctgcctccctatttgccaggctttcatttctgtctgctgagatctcagagcctgcccaacagcagggaagccaagcacccattcatccccctgccsccatctgactgcgtagctgagaggggaacagtgccatgtaccacacagatgttcctgtctcctcgcatgggcatagggacccatcattgatgactgatgaaaccatgtaataaagcatctctggggagggcttaggactcttcctcagtcttcttccccgggcttgaaccccgcctctgaggttctccctgatatacacttctgcttttccttccaaattaggctgctccctccagttagcaagtcacagagcctttgaacaggtaagcgaagggaggggtacacttagaaaaagctcaaggggaaggtggaagatggagtctgaatcacaaaagcttgcagggcaagggccaggatcctcctttacaaatatattcctgcttgaaatcattgaggtaggactagcttagagaccagaactgttttaaaagcctcttagcacttctgttccctacaaaggactctgtggaaagcgagaggctgtatttaatccagaagagcccctagcttctatgcctagcatgggttggggacttattaacagcagtttctctcgttacagccatccccacatggggagaccaactgcataccaacttgctgctgcacctccaaaggattgggatagccagcagggcagaggagaggagaaaatgttgtagcccctttgtggagctcccactgttgccctaatagccagttcctttctcaggggaggctgatgttcaggctgtttatttacctgctgcctttcatctgcaatctacaaaccctttactttaataacagcttctgttagtttagtgcctctctcctaggaggttaaaatactccctatagatgatctcttttatctttgtgatggtcccagaaggtagggtggggacatgattatatgattatgcttattccatcctttggaagacagaaatacaaggacggtaagggagatgagacaacgtggcctggtggaggtcggaagtcctgactcctcggcagtgctttatgtttctttgggaggttgagagctggaatgtgaactgggctgtcacttaggagcctttatctcacctcagcttccttagtccctgagcagcgacttgggcctgctggagcatagtaccaaggaaaggggccatgtgctccattttccactgggggcttgagattgatcctattaatcttgctgctggaaaccctgtcaaaactgaggtaggtgcgtgaaggggtgacagtggctctcttgtcttgcctggctatgccagctgggggcccacaggcagacccgcctgggccatagcccattgccccagctctgggataacaaagccgggacaaggggacaaagagcaagctgctcccatttgtaattcagaaggaccagaaactcrcatttcctgtggcctcaactatttggtttgaagaaaggcagcgtacacagtgtgcaggaggctagttttgccccaccccctataccattccagaagcccactgggaactctcacagggccctgaacgcccctgctctgccttagctctgtcttagaagtccctacagctgcctgcaccactccccacgcctacctgcttaggctcctggtgcctgtccccttcctaccagtaggaggctctgctttttgccatggccctgagagctctgtgggagggcagaagctggggctttgagtccctgaggacccagctgacttacctgctggagctggctgcctggactctcagctgctttgtgcagagagaccctcctgccttgggcagcccagctttccctgccagccttcctcctgcccgtgtagggactggtgtaggagcctggctaggaagatggctgtatggacaaactggcttgttagcagaaagtaactataagggaccccatgcttccagaagccagaggagaggaagtcaatggtagtgaaggcaaggatgactgtggctgaggtccctccccacaggtcatacccaagagcacaacagcaggagggcacacacggtcaccgagtgcttaccttgtgccaggcaccattaggagcagggtttacagaaagaaggtaacacagttcctgctcacaaataactgttgggaaaggtgtggttcgccttccttcagagagggaaaaccagacactctccctccctgaggcagtgggatggggctgatgcaagcttcatttaggaggggccgacccacctggaagccgagcagttgggaacaggcccaatagccttgactccaccctggtagttgcctccgcatcccacgcctgatgccctcatctctggcaccttgacctgccccatctccaacctcagctacccaggttacctcagttagcaaacaccctccagaggcctagtggagtgagtcagagccctgggtccctcaccaaccctgggttcccacacccaggtattcagggcccaagatgcaggtctgggtgctttaggcagggagtgaggaaacactgggaccaacagtctggcctctccaccaagagagacaaccataagccagacttctagaaactctaaagaggctggtaactggggacccaacgtaaggccgagggacctgcctgcgctcacagtccaggctgggcagggcagctcattagccaaacactgaaacctcactcctgggaaccaacattctcctagccgtctgtcctgcttttcctcccctgaagcttttccggtttaccccaggtcctgagaatgcctcctctccccgagtccccatccttccccagggggtacgcggcgggggcggccctggctgcactcccaggatgagtctgacaggcagagctgggatgggcgccagacaaatgtactgcgtgtcggagcctgtgccgggatgaggggcctgccccgctctcccagttacctcccaacatggggttccccagcagctcttcccaggtgcaaaaggggagtgcwtccttgcagcctggacttggccaggtcctggtggggctgatgcctcggcctctgacattgcccttttaagagccctctccggcggggccaacctgtaatcccagcgctttgggaggcctaggagggcggatcgcctgaggtcaggagttcgagaccagcctggttaacatggtgaaactctgattctactaaaaataccaaaaattaggcgagcatggtggtgcgcacctgtaatcccagctactcaggaggctgaggcaggaggatcgcttgaacccaggaggcataggttgcagtgagccgagattgtgccactgcactccagcctgggtgacagagtgagactctgtctcaaaaaaataaaaattaaaaaagccctccccatgggggtggggtgggggtgctgcaggcaggttcatgttgcagaaacccagcaatgtgcagctccccatccatctgccaggaaagaagccctgaactccaggtctttacctctctgggaccttccggcggaggtagggtgtcccagccacctccgagagaacctcttgttacggaggggcgggtcctcttctgctgctctgactggctggttcacaagccctgcattttggagattggtccctgtccctccatgggacttggttcccttccccctacacaaacctgctgtcaaaatggtctgggagtttattttcattggggtgtaaattgctgataagacggtgtgaccttctgggacaagtggtttttaaacctgaagaaattgaagaattaagctcccatttggaatacgcttcatccttgcctccttccatcttgtctcagagaaaaccttttttttttttttactccttctccaaaaccaggtcttatctacttgtgccctggatctcgccaccatcctgcttcccctgagtccttgttcttgagctagctctctgctgaacctcccgccccacttcccctcagtcccgacctgctaacatattccccatctgaaaacagccatcctgcactcctgccgctcctgtcaaattgcgatcccatctggctcctctccctcaaagatgaatgaacagtggacacttgcaggctctgttacctcattaacattcctggccctccttcaccccattcccctcagagggaaggtgaactgttccagagggaactgcacgaggggacaggaagaaggcctgaatggctggagcatgaagtaagggcgatactgactggaggctggagatgtgggcagggtcaggagatggcacctgaccctaatgctggcctccacctccgctttccctgctgctctgtgacctccacatgcagggctctcaaatccattctctctcatctgagcatctccacccacccccagcatacacattgggcatctcctcttagtattcaggcaccccaacacacacctgagactcaccctggacaactccctcctcttcatctccaggggccagtctgtttcgcagcgccattgagtcttcatcactcaggtctgcccccttgacagcctgctccctggccccagcacagccctcctcctcctggactattacagcggcctccttgctagtctgctggacctcagtcccttcttccggcgcagcctcctcactgtgccagattagcctgccagatggcacagccatgatcattcctcccctgccaaaacacttcagatggttcccctcaacttataaggtccagacttctcagctggagccccagctcatcaaaatgtgcccccagttcagattagcggctctctgctccttattctcaccgcccccttgtttcctcctgtttcctggcactgaccgtgtgttgcacctctccacgcttgctcacactgttccccctgcctggatgccttttcctcctgcctattagtggaattcttccttcctcttcaagatagctcaaatgccactttctttttttttttttttttgagatggagtttcactcttgttgcccagcctggagtgcaatggtgcgatctcggctcaccgcagcctccgcctcctgggttcaagcgattctcctgcctcagcctcccaagtagctgagattacaggcatacgccatcacacctggctaattttatatttttagcagagacggggtttctccatgttggtcaggctggtctcaaacttccgacctcaggcgatccgcccatctaggcctcccaaagtgctgggattataggcacgagccactgtgcccggccaaatgccaccttctttaaaaagccctccctaactcctccacccccacacaaaaatattagtgactattgctctgtgacagcttttgtctctgtccaagggactggctgtcccttggggacatagctcatctgtgtacctctcacacttagccacctaccaccgtggctggagcatggctctggccagacagggcctccttccttggcctgctctgacagcctgaacagccacgttattcagagggtgcttagggatttgccgctcgaagctcagccccaggttccatctcttcctgcccggtggtcagaggcagtattttcagctggatcttagatggctttacatctttatggaatgctgggcctattaagccacccttgacaaagaacactggcactgtgggtggaacctatcactaggataaagcatccaatatcatcttttaacaagcgccaaagaaggtctatctcacagggctgggacatcaaaacctctacccctggctgcagcaggcatggggaatgcagttttgtggttaaagtgaatgagttcagggctgcccttaaaacagcctagagacccaactggcctaccagatggtggctccaggcataaagggacatgtggtcacccctctcttccatccatccatccatcctccattcatgtattcattttatcttttatctttttttttttttaagacagtcttgttctgtcacccaggctggagtgcagtggaatgatctcggttcactgcaacctctgcctcctgggttcaagtgattctcacgtctcagcctcccaagtagctgggattataggcgcatgccaccacggccagctactttctgtattttttgtagagacagagttttgccatgttggccaggctggtctcaaactcctgacctcaagtgatycacctgccttggccttccaatttgctgggattacaggcatgagccaccatgcctggcccatgtattcattttttgaccaatattttccacgtgcctactgtgtgtgtcaggcctgtgctaggtgctaggtgataggcattcaagacatatgtgttctcgctggtcctggagctcactgccagtgggtaagactgatgttagccaagtgaatactctaattacaagttgtcatatgtgccaggaaagtgggggcatttaagactgccatgttcaacagctggaaggaagccagcatgtccagaacagagtgaaaggggaggagtgagaagaggctgggccactccacactggactttgtggataaatataaggacgctggattttattcaaggtacaacagaggcccacggcagggttttcagaaggggaatgacatgctcagatctaaggccgtgcaatagtaccctgtgaaggataccattaggtatcctttaatcagataaatgcagaatgtggcacttcaataagaaaactggactcttcagtcgatgtcaacaaaaaaggaaagagagagagagagagagaaaaaaaaaaaaaaaagagtgacatatgaccaaatgtaatccacgaacttgaaagcagcagctgtctaagacctttgggagacagtaaggaatttggattggactggatattagatgataccaggaattccccttcatgttcctggtcgaagcagcagtcctgtgggtgtgcaagaaagggaagaaggggaggcacttggaaaatattggtcaaaaaataaatacc

SEQ ID NO: 95918 - DNA, 35625 bp, Homo sapiens
  misc_feature (1)...(35625): n = A,T,C or G
tatattgtaataatagtgaaatattttatagttttgtgttttttttaactctctggcaagagggaacaaatagattttttcctaatggtgctgacagtctgcattcccctaaaggaagtctactaagaactgagctactcttctccttcagagtgccttgccagggtttctttatcctctctgggtttgtcccttaacaggttcagcagtccrtttctgaagcctgtgtcagaaaggcaggccccagggtacaaggatgtggtgaaaaggtcagtgaaaaaggggtcaagaaaggttggttgcttttatatctgccttttcattttttatttcccatctgttagattatttttataacttacaaactcaagatatgtttcatagccaaacaagtttataaagttatgatgagctcagtatcatatcttcatttaagaaggaatgcagggaacaaaaggatgatataggctttttattttgtactattgacttttaagtaatatgatccattctatatatatatatatttttttttttttttttttttgacagggtctcactctgttgcccaggctggagtgcagtggtacagtcttggctcactgcaacatcctcttcccaggctcagctattctccagcctcagcctcccaagtagctaagactacaagcatgagccatcacgtccggctaatatttgtattttttgtagaaacggagctttgccatgttgcccaggctggtcttgaactcctgagctcaagcaatccacctgcctaggccttccaaaggctgggattataggtgtgagccttggtgtccagcctgatcattaattataatcttaaattagcctttggttgtttttgacactattcttttggagcaaaactttaaaaggaaccctgtatttattcagttagttataggtatagtaaggcacagatgtcgatccaaatggaagttatgaacattggttgattgtagtattgtgtccggaattggttccttccggtgggttcttggtctcgctgacttcaagaatgaagctgcagactctcgtggtgttacagttcttaaagatggtgtgtccagagtttgttccttcggatgttcagatgtgtccggagtttcttcctcccggtgggtttgtggtctcgctgagttcaggagtgaagctgcagaccttcacagcgagtgttacagctcttaaaggtggcgcctctggagttgttcgttcctcccagtgggttggtggtctcgctggcttcaggagtgaagctgcagaccttggcggtgagtgttacagctcttaaaggtggtacatccggagttgtttattcctcccgttgggttcgtggtcttgttgggttcgtggtcttgctggcttcaggagcgaagcggctgaccttcacggtgagtgttacagttcataaaggtagtgcggacccaaagagtgaggagcagcaagatttattgcggagtgaaagaacaaagcctccacagtgtggaaggggactccagcgggttgccactgctgccttgaggggccagcttttattcccttatttggcctcctccacatcctgctgatttgtccattttacatagtactgattggtccattttacagagtgctgattggtccatttttatagagtgctgattggtgcgtttacaaaccttttttggtgcgtttttacagagtgctgattggtgcatttacaaatgtttagctagacacagagcgctgattggtgcgtttttacagagtgctgattggtgtgtttacaaacctttagctagatacagagcactgattggtgtgtttacaatcctttagctagacagaaaagttctccaagtcccacccaacccagaagcccagccagcttcacctctcagtattttgggattttatttttattttttatttaaaaaaatttttttgagacagggtctcactctgttgctggagtgcagtggtgcaatcatggttcactgcagccttgacctcctgggctcaagcaatcttcccacttcagcctccggagtagctgggactacaggcatgtgccactgcacttagctaatttttaaatttattattttttaaatttttacttactattattttttgagacaggtctcactctgttgctcaggctggagtgcagtggcacatttcttggataactgagcctcaactgcccaggttcaagcaatccttccacctcagcctccctaataactgggtctagaggtgtgtgccaccatgcccggctaatttttgtattttttgtagagatagagtttcaccatggtgcccaggcttgtctcagactcctgggctcatgcagttcacccacctcagcctcccaaagtgctgggattacaggtgtgagccactgtgcctggcctgatatttttattataataaaatattttctttgtttgaaatgttattaataactttatttttcttcagaatatcactgaggaggaatttttaaattttttgtagatatggggtctcactagattgcccaggttggtcttaagctcgtagtctcaagcaatcctcccacctcagccttccaaaatgctgggattacaggcaggtaatcctagcctattttggattttttttttttttttttttgagacagtcttgctctgtcaccaggctggagtgcagtgatgagatctcggctcactgcaacctccgcctcccgggttcaagtgattctcctgcctcagcctcctgagtagctggaaccacaggcacacgtcaccacgcccagctaatttttgtatttttagtagagacagggtttcactatgttggccaggatggtctcaatctcttgacctcgtgatccgcctgcctcggcctcccaaagtgctgggattacaggcttgaaccactgtgctcggcctattttgggtttttatagcataggtcatctaaaatgctgtcataaacctgtatggtaatagaatgtaaaagatcatgataggacctttggagagtcactagtctgtgctgctatagcacaataccacaggctggataatttataaataatagaaatctatgtttctttgttttggttctggaggctgggaagtgcaagatcaaggcattggtagttttggtgtgtgaggtgggttactctctgcttctgcttctaagatgatgccttgttgttgtattctgcagaggggacgaatgctgtatcctcacatggcagaagggacagaaggataagagggcactctcttcgatatggagcccttttataaggatgctaatcccattcatgaaggcagagcactcatgaattaattacctcccaaaggctccacctcttaatactgttgcacttgggattaagtttcaacatgaattttggaggggataccatcattcaaacagcagagacaatgataccatcattcaaacagcagagacaaacttctttaggaatgaggaaactaaagctcagaggtgcttggtcatgacttgctcgtgatcaaccaacagttaatagcagagctagaactaagccccagattcttacctgcagttcagtcttctttctacactgctgtgccttctcttatatatctactttctgtgtctcattaatattgtcttaatattcacttgatccttttttcatctccatgaaaggagaaaaaaattattcttagctttttatttgtgcagtaagagaagtagatgaaataatatatgactatacattgtaaacagcaaataactactgtgtgataaactgatgattggtgctctttacaactttgatacctggggccagcactcctcctctgatagtagaatatagtggcttgacctgtgggctctggagtcaggctgcctctgaattggaattcaggctgtgtgcctttcagtgagtacttaacctctttagatttcaatttcttcatctgtgaaatggagataataaggccgggggcggtggctcacacttgtaatcccagtactttgggaggccaaggaaggtggatcccctgaggctaggagttcgagactagcctgaccaacatggtgaaaccctatctctactaaaaatacaaaaattagctgggcatgatggcgcacgcctgtaatcccagctattctggaggctgagacaggggaattgcttgaacctggaaggtggaagttgcagtgagctgagattgctccattgcactccggcctgggcaacaagagtgaaactccgactcaaaaaaaaaaaaaatgagatattaatgatacctaccttacaggtttattgagaggattaagtgagttagtatagaaatacagtgtttggcccattgtaaacaggcaaatattaactgctgttgctattttattatctgatgagggttgttatctttgctactgttttcattaagaactggttagttcttcaagagaacgtgttaggttatcatatgttccacatgaaggtttgattttctttgttttttcttggccacctgcagacccatggacttaactagcctgaagagaaatctctctaagggtcggattcgcaccatggcccaattcctgcgagacctgatgctgatgttccaaaatgctgtaatgtacaatgactctgatcatcatgtataccatatggctgtggagatgcggcragaagtcctggagcagattcaggtactgtatgcagatacctgtagcctctggaatcttgatttcagaacgcctatgagaataaaggtgatttcgaggtgactgtgttctcagagtttatttttaaaggtgattaaggccctgaaggattgataatgtgcctgctggtttggaaaaccctgagcctcagtaagtccagctctgatagtgaagtagtctaggaatgcaggcagcagtgaagagctctcaagagagctgaggatagacaagtaatgggaattcccgcttccagagcctcaagtcaagggctaaactccaaagaggctggagtcactgtgtattttttggttgcttcatctgttgttattaatgtacgttcacactttcccatctttaggggataagatatagtagctagaagacatttgtgggtttcttttctgggtagcatcatactttaaagaaaaaagtatagttgagtctatttgccaaaaaaataaacttgcaatactttagtgtttaaggttcataatagcttgctatgtgttccttaaccctttaggtactgaatatctggttagacaaaagaaaaggctcaagtagtctggaaggagaaccagctaacccagtagatgatggaaaacctgttttctaacctggagctgctatcctgactttttctagagtttgaatctctcccggaactctgacctagagaggatcctggtacttctttgccatgtcctcattttcttttccaacaagaataataccttaactcacaaccaacgagtcaaagatgcatgtggacataatataaagaaaaaaaggggaagctgaggtttggatttatgccataaatgttgcccacatctttgttccatcggcttgatttaaagacaattccattagatcttttctaagccttttactctataaataaatgtatttacacaataggaatattgctttttaatgactagataagctgggcatagagggcacagcatcatctggtgaaacgaaggtatctgacacgggtcatttacatataccgcctggaaaggaatggttgggggaggggttcttatcatttatagagtagggataattgaagcatccttcaaacgggaagaaggatgaaataagataaattatgagtaaaatgtcagaaaacatctagtgctctaagattcacaaggagaataaaagtgactggctggctccctttggttaaaacgaactggccagaagctgcaaggttccttgctgggattggctctctgcagccaccgtccccacgctggggcttcaggtctcctagcaacaagttgtaccatatgaggacggccgctgaggtgagtacttagagagggtcaaattcagaatttgcaggtgcaacccggaaagtccccgcggacytagaggccctgcttttcaattagcctgaccctatgcacagagaggtccctgcgggacagggtcgcttcacagaggcagctggccgaggccgctcacccgccgctgtaatggtgtgtggttgcccaccagccaccgtcccctcgagcccccaccacccgctctaccgccccctcgagcccccaccacccgccccaccgccctctgctgcctggggctgttgctggttccaggccttcgggtcgccccttggcctctggttatgtgagcccatagtccttcctgccttggtgacatcgtatacgaaaagccggggctcgatttggacatagtaggaatcctattattgagaccctgtatatagaaaaacatggcagtttctaccttcatcagttaataaaatcaagtacctactattgctattcttaatcataattacattgaatttgcgatgggggtggggggaaatgcatgtcattgcagttgatacctgttaagaaactcttaatttgtgccctgaaaagccataatggagatatcaatgcctccacctcagatatatgtagaaaaaactctggccawtatcaaaccagatattgttgacaaagaggaggagatacaagatattattcttagatccggattcaccattgttcaggtaacttctgggtatratgattcatgcttttttcctctctgcccttaaaaaaaaaatgcttatgtaaatgtgcctacccatttaaacccttagtgttcagcattaaatttaagtttattcttctaagtataaaagttatatgtgatagtttttaaaaggatgtaaaatgagaaataaaatggacttttccttcacctgtcctcttttaccccaagtcccaggctccagagagaggcaaccacttaacactttctgttcttccaggagttttctatgcatttataaacattttccccccataaaacagaacagtccctttcccttgacccctttacagagtccctcagataggattccagatcattgcatctgaattgatctcactcttcctaatttctgtgtaatatttccctgtgtattagaactacaatttatttacttgatcttctattgatggaattttaggctattggtacttttttcagttatggcataacatttaatgttttaagccttatgttctgcaattagtaaacattgtcattctaggggtttgaaagtgaatataaatagcattgttaaggataaatcaaatagaattgaatatttttaatcttcctcttttatagtttttttttcttttttttgagacagagtctccctctgtagcccagactggagtgcagtggtacgatctcggctcactgcaacctctgccttccaggtcccggttcaagcaattctcctgcctcagcctcctgagtagctgggattacaggcatgcaccaccatgtccagctaatgtttgtatttttagtagagacggggttttaccatgttggccagggtggtcttgaactcctgacctcgtgatccacccgcctcggcctcccaaagtgctgggattacaggtgtgagccactgcaccccgcctcttttacagtattctyattcgaacttccaattttttattttctcccatttatacagtgtcatattgcttattcagtcagtatttttaaaaataaagagaaaatggcgggtacggtggctcacgcctgtaatcccagcactttgggaggccgagatgggtggatcataaggtcaggagtttgagaccagcctggccaatgtggtgaaaccccatctctatgaaaaatacaaaaattagctgggcgtggtggcgtgcacctgtagtcccagctacttgggaagctgaggcaggagaatcgcttgaactcaggaggcagaggttgcagtaagccaagactacgccattgtactccagcctgggcaatagagggagatctgtctcaaaaaataaataaataaataaataaagagaaaatatcaatcttcagaaaagatacggaatttcagttgagcttcaaaggacaggtggagtccgagagtagggatggcacaagaaagtgttaggaagtatttaatatgattaaagactcaggtaaataactttttagtaaatgttaggaaaactggtagccactgaaaaatttggatcaagtattatataccaggataaactccaaataaacctgagatctacatattaaaaaaattaaaccatgtaagttcaggaagaaaagataatggatttattttgttgttggagtaggacagccttttttttttttgttatgacttaaggtctaggagccatggaagaaaagattgataagattatatcaacaaggccaggcacggtggctcatgcctgtaatcccaaaactttgggaggccaaggtgagttgatcacctgaggtcaggagtttgagaccagcctgaccaacatggagaaaccccatctctactaaaaaatacaaaattagccaggcgtgggggcgcatgcctgtaatcccagctactcagcaggctgaggcaggagaatcgcttgaacatgggaggcggaggttgccgtgagccgaratcgtgccattgtrctccagcctgggcaacaagagcgaaactctcgaaaaaaaaaatttttttaatttaaaaaaagattatataaacaaaaaatttctgcacaatgaaataaacaccataagcaaagtcaaaacacaacaaacttgggaaaaagatttgcaactcatagacaaagggcttgtcttcttaatacataaagagctcctagaaaaagataaaaataaattagtagaaaaatgggcagaacagatggatggtcacagaaaaggaaaaacattttttaaatatatgaaaagatgctcaatctttaggtgggaaaaaaagcaagttaaaactacactgagattccatttggcaaaaatataaaagtaaatggcacaacccctatcaaagggaatctggcagttatctaccaatacaacagatggacttaccatttgatccagcagttctgctcttggaaatctgtcctatagaattccttgtgctcttactacctgtcatgcgcagagccctgtttagtcccatcagtaggtgcctgtattaatatgaagtgatatatatgcaggttattttttgcagcattgtttacttatcaacaaaagattgaaaataacccaggttgggagattgggagacaggactaaataaactctggaaaacccatcaaattgcataatatgcaactaattgtaaatagaagaatgaggaacctgtctgtactgttaacggaagaaagcaaagtgtgtagcaaaaagaacaaaatagcaaaaaaaacacaaaatcatgtgtaccaaccttttgtgatagagacaaagtaatatattcatgtttgccaatatttgaaaaatggaattctggggaaataaacatttaaaaagggttgcctattgagggcaaggaagaactgagtagattaggaaatggataggaataagatttttcagtatatacctttttgtcttgctttgaatttttgaatcctgtaattatattacccattaactttagaaaaaataaatgaagtatacagataaaggcgtcccatttaagttttttaaaagtccgtattttgcccgggtgcagtggctcatgcctgtaaacccagcactttgggaggccgaggcgggcagatcacaaggtcaggagattgagaccacagcgaaaccccgtctctactaaaactacaaaaaattagccgggcgcagtggcgggcacctgtagtcccagctactcgggaggctgaggcaggagaatggcgtgaacccgggaggtggagcttccagtgagctgagatcgcgccactgcactccagcctgggtgacagagcgagactccgtctcaaaaaaaaaaaaaagtgacaaacttaataattaagtggctagtgttaattataaattaaaaattagccggccgtggtggctcaatcctgtaatcacagcactttgggaggatgaggcgggtggatcacctgaggtcaaaagttcaagaccaccctggccaatgtggtgaaaccttatctctactaaaaatccaaaattagggctgggtgcggtggctcatgcctgtaatcccagcactttcagaggccgaggtgggtggattacctgaggtcaggagttcgagaccagcctggccaacatggtgaagccccatttctactaaaaacacaaaaattagccgggcgtggtggtgggagcctgtaatcccagctactcaggaggctgaggcaggagaatcgcttgaatctgggaggcggaggttgcagtgagctgagatttcaccactgcactccagcctgggcaacaaagcaagactccatctcaaaaaacaaacaaacaaaaatcagctgggcgtggtggcgcatgcctgtaatcccagctactcaggaggcaaggctggagaatcacttgaacccgggaggcggaggttgcagtgaactgagattgtctgggcaatgtactgagaccagaaaaaacaaacaaacaaaaaaatttaatgtaaatatatatgacactttccctagttagtaactttcagagcaaaggcagccatggtacatccttcattttttgctttaattgcggtaaaatatacacaacataaaatttaccattttaaccgtttttaagtgtacatttcagttgcattaagtacattcacattgttgtacaaccatcactactgtccatttctagaaccttttcatcttaaactgaaacactctacctaatgctaactcgttgcttccctcttccccatccccgataaccactattctacttgctgtctgtaggaatttgactattcaagctatctaatttaagtgaaattatgcaagttttgtcctttgcactgtatgcttttaaaataggcttgggagtccaatgaacttgaggctttcctgtcccacttaagggaaaagctgaaaaatgatatgtcatttcagtagatggcagtgttgcctttgttacaaactaagagttctgttctgatagtacttggtatcactgcttctctgtgaaaatattcaacctaatttcagatgagatcgggtgtgttcagggtggtatggctgtagactattcaacctaatttcaaaaaatttcacctgatccagttttaaagcaaccaatggaataattgatttagtatcaattttatttaaagatgaacccttaaggccgggcgcggtggctcacgcctgtaatcccagcactttgagaggccgaggcggcagatcatgaggtcaggagatcaagaccatcctggctaacacggtgaaaccccgtctctactaaaaatacaaaaaaaaaaaattagccgggcgtggtagcaggctcctgtagtctcagctactccggaggctgaagcaggagaatggcgtgaacccagtaggcggagctcgcagtgagccgagatcgcgccactgcactcaagcctggaggacagagtgagatgagactccgtctcaaaaaaaaaaaaaaagatgaacccttaattttaaaaattgtgctacattggctggcatacctgcagaaggtaggttcccctgctttttaaggggcaagtggcagataagggcttacattacaacagatgagattttatttttaaactcagcaagaaaaaacaaaaaamaaaaacgctaatacgcataatcatagtttcatgtcttaattttagataatagaatggaggattatgctaaatcaggtgctcttgtaatttctcacatcttttatttaatcgctgtatgaatttcaatttgagaacaaatgtcagcacctttttcatagtaactggcccttcactggtgagaatccagtgggtcctattcatagcagagctatgccacctaggtaagcgtgttcctaaacttcttgctctgggcggtttggtcccttgctacaaaccaagcaattttaccaagtttctgaagcctgcggagacacggaattttggaaagggctttaagaggtgagttacttggtaaaattcacacttactctcaggaaaatctaagacattttagaaagacagatttctgccataatcatggagatttttagccttcacttagtgacatatctccatttttcatcatccttactgcaggcagaggttctttgatttctactttgaatccctctgttatattttgagcattttctctcctcacccacctttagtggaattgaaaaaacagcagtaataaataattttttttttcttttgagaccaagtctcactctgttgcccaggctggagtgcaatggcatgatttcggctcactgcaacctctgcctcctgggttcaagcaattctcgtgcctcagcctcccgattaactgagactacaggtgtgcaccaccaatttttgtattttttgtagagacggggtttctgcgtgtggcccaggctggtgttgaactcctggactcaagcagtccgcctgcctcggtctcccagagtgctgggattagaggcatgagccaccgagcctggccagcagtaataaataattttttaaaagctctcaaggccgggcgcggtggctcacacctgtaatcccagcactttgggaggccaaggtgggcagatcatctgaggtcaggagttcaagagcagcctggccaacaaagcgaaaaacctgtctctactaaaaatacaaaaattagccaggcayggtggcaggcacctataatcccagctactcaggaggctgcggcaggagaatcacttgaatccaggaagtggaggttgcagtgagccaagatcacaccactgcactctatctagcctgggtgacagagcaaaactccgtttcaaaaaaataaaaawaaaaaaaagcactcaaaatagctgcttctagagaaagcatgagtttcaaattagactgagctaccatgattttttaaacctgattaatttttatagtctcatttgtgaaggaaataacatctatttgtccagagtgtttcatactctttcagattgagaaacatactagcatctaattttttttttttttagacagagtctcatcctgttacccaggctggagtgcaatggtgctatctcaatcttggctcaccacaacttctgcctcctgggttcaagcaattctcatgcttcagcctcctgagtagctgggattacagacatgcaccaccacgccttactaatttttgtattttttttttttgacggagtttcactcttgttgcccaggctggagtgcagtgacacgatcttggctcactgcaacctctgcctcccgggttcaagtgattctcctgcctcagcctcccaagcacctgggattataggtgcccgccaccacggctggctaatttttttttttttttttttttttagcagagacggggtttcatcatgttggccaggctggtcttgaactcccgacctcaggtgatccacccacctcggcctcccaaagtgctgggattacaggcgtgagtcactgcgcctggcctaatttttgtatttttagtaaagatggggtttcaccatgttggctaggctggtctcaaactcctgacctcaggtgatccacctgccttgtcctctcaaagtgctgggattacaggaatgagccaccacacccgacctaatttttcttttttcttttttttagacggagtctcgctctgtcacccaggctggagtggagaggtgcaatcttggctccctgcaacctctgcctcccgggttcaagctgttggcctgcctcagccttccgagtagctgggactacaggcgcgtgccaccacacctggctaattttttgtattttcggtagagacgagatttcaccatgttcaccaggctagtctcgaactcctgacctcaggtgatccacccacctcggcctcccaaagtgctgggattacaggcgtgagctaccgcgcctggcctgatttttgtatttttagtagagatggggtttcactatgttggccagactgttctcgaacccctgacctcaagtgatctgcctgtcttggcctcccagagtgttgggattacaagcctgagccaccatgcctggcctaatttttcttaatgttacagtgaatcaagatatttatgacagaaccagaataaagaacacacgttcaaatgaaaaactttttactgcatcattatactacatgttactttttttgttagtttgtttgatacagggtctgctttatcgcccaggctggagtgcagtcgtgttatcatggctcaccacctctaatgtagtggggactacaggcgcacaccaccacacccgactgattttaaaatttttcatagaaacaaagtcttcctgcgttgcttaggctggtctctaactcctggctgggatgaagcgatccttccgccttggcctcccaaaatgctgggattataggcatgggccactgtgcctagctgttatttctaagtactaaaatgagaccagctcccaaaatagtaacacaaatagagaaacatgaatttggaatatttttaagtccagttttgttaattgaagtgttatttactttaagaaggagatgcgataaatttgttactgacaaaacatatgctgagggaggcttcctaactggaataatttttctttttctctgtcgcccgggctggagtgcagtggtgcagtcttggctccctgcaacctccgcctcccgggttcaagcaaatcttctgcctcagcctcccgagtagctgggactacaggcgcatgccgcccgcccggctaattttttgaattttagtagagacggggtttcactgtgttgcctaggctggtctcgaactcctgagctcaggcaatccaccgacctcggccttccaaagtgctaggactacaggcatgagccaccgcacccggccataatttttcttaagtaggctaagtaattcctcttactatcttatttacagcatacatttaattatatccttttctttcttcataatacaaagataaaccttgaagttataatcagattggtactagtttcaagttactaatgattttaatgagctatcattgaactgtcattttaaatgcttttgttgactttgtgtcttttatagagaagaaaactacgcctcagccctgagcaatgtagtaacttttatgtggaaaagtatggaaaaatgtttttccccaacttaacagcttacatgagttctggaccacttgtcgccatgatattagctagacataaagccatctcttattggttagaacttttgggaccaaataatagcttagtagcgaaggagacacatccagacaggtaattttcagggtttgggggatggcagggaatggaatccatctgtgaaaatgaaaaaaaaaaatctgatttcattgtaatgggaattttttttttatttggaagttttccaaaatcaactttttnggggggcagagggtggcagggcctggggggtccattttacattttaaagtgttaaatgtctattttaatactacctaccagaaaaagcaacagagaatgtctgatttatagttgattacccttattctctcaacctttaaactgccactgaagtaggatttttagatggaaaaattggaatggtattttaaaagaataatggtaatacaggaacagaaattcamattttcagcattattgctaatgtatggaaacaagaagatattgagttcttgcacttttgaatgtgcattgcttttttacttctcacaaaacaacaccacgtttttatccagagaactcctattttctcagtgtattcctcctgcagacgtaaatatatttgatccttatctagatagataagcttaaattkaagcttaaatttgacataaattgtgaagctttcatatgtaagaagtggcaatgcttttgtaaaattcttaagtggaatgcatgcatataaagtaaggaatagacgttagattggatggacgtcatctctaacttgtttttagtctgagggcaatttatggcacagatgacctaaggaatgcacttcatgggagtaatgactttgctgctgcggaaagagaaatacgttttatgtttcctgaaggtgagttacagatgactaacttgtcaactgcatctccttattgtttgctttttcttttattttgcggatatagctgggaaggaagataaaataattttttttccagtatattttgttatgttttcaagttgtagttacttaaaaacttgaagccacaaatggaaaacttgacatttccctaacaactaaattgtgccctttagggagtcttttgagaagtgtttaatttttatttatttatctatttttaacattaaaaaaatttaagacagtgtctcactgtcgccgacgctgaagtgcagtggcacaatcttgattcattgcagcctcaaactcctgggctccggtgatcctcccactttagcctcccgggtagctgagactataggtgcatgccaccatgcccagctaattttcttttatcttttggagagatggggtctctccgtattgcccagcatactctcagatgcctgtgctcaagtaatctgcctgccttggcctctcaaagtgctgggattgcaggtgtgagccaccacacccagcttaattcttttttctttcttttctcttgcattagacatattcttctgtgtaacagttctttctagttatcctgaaaggttcagtagagtttgtgacacatgagaaaaatagtctctctaggaaactacatttgatttaccgtcttctgtaacaatttactgtttgcctaacaaagtctcatgcaattgagaaattaataactagtccctttttttgtttccttactgttagagaagttgtaaacctttgagaagtggacatacgaggaagaacactgaagtttttggtttgtttttaatatttttagagcagaaataaaatttggtgatttttgttataaggaaaaaaatgcaaagcattgagcaaaattttggatttttttagtatgttatttttcctgttatgacttatttttccctaagtcatttagatctgttcctcagtattttccactggatattcattcaaataaaacagaaaactgtcttggagatttaaaagttcctgatatattttttttcttttttttggagatttcacatgttttgaataactgatgtgatacaacagtatcactgttgtttgaatttctgaattcaaaataaatacatttcacattttgaatacttgatctgttactttttagtgccaacagggtcggtaacggcctgatgctgacctgacaatgggctgacaacttttctccactggcctttcagtcatcctcccaggggaagacctgcttccctcctttctgtacagtctgaaaagtccctgattcttaaacaaacaaacaaaaacyacttttagaaatatatattttttctcaaagcagtcctcctgcctcagcctccccaaacactgggattacatgagtgagctaccgtgcccagcgagaggtctttttaatatggtagcactttatattagtcttacaagtgaattagacttttgctcgttagyttttattatttatttatctatttgagatggagtctcagtctgtcacccaggctggagtgcagtagcatgatcacgactcatggcagcctcgaccttctgggctcaagtgatcctcccacctcagcctttgagtagctggaaccacaggcgcatatcaccacgcccggctaatttttatattttctatagacatgaaatctcactacgttgcccaggctggtcttgaactcctgggctcaagcaatactgctgcctctacctcccaaaatgttgggattataggcatgaaccatcatgcctgacttctctttagcttttaaataaaacaggataaaatttcattttatcttaaatagaaggtatatttggaagctcttcttactcataggattatattcctaaactgtaattttctttcttttcgctttctttcttttttttttttttttttttttttttgagatagattctcactctgttgcccaggctagagtgcagtggcacaatcacagctcaccgcagccttgaccacgcagactcaagtaatcttcccacctcagcctttggagtaggtggaaccccaggtgtgcaccaccacacctggctagtttttcaagttttttgtagaagcggagttttgccatgtttcccaggccagtctcgaactcttgggctcaagcaatactcccacctgccttccaaagtgttgggattacaggcatgagccactgtgccactgtgcccagccaactgttattttcagttgcctttgattttactcattaaattaatccgctaggcatgagtttagagatatagttagacatttgagaagcagcaagttgtaggataaatataaaatcattaattacttagcacattgtagctcttttgctgtgaagttctttggagcaagtactcagagtttgtggtatgagcgtcctcttacttagcagttgatgaacaactatgtgcaaaactttatacgatgattcactcaagcaagttatcaagatatttaaaggcatgttcttaacccttgaaaaaagtaatgctggctggacgtggtggctcacaactgtgatcacarcactttgggaggctgaagcggatggatcacttgaagttgggagttcaagaccagcctggccagcatggtaaaaccctgtctctactaaaaatacaaaattagccaggcgtggtggcgcacgcttgtaatctcagctactcagaaggctgaggcaggagaattacttgaacctgggaggcagaggttacagtgagccgagattgtaccactgtactccagcctgggtgacagagtgagactgtctgaaagaaaagaaaagaaaaaagtaatgctctcttctttcccttttttctggggggtggtcacagggtctctccatgtcactccagatggaatgcaatggtgcaatcatagctcactacaaccttaaactcttgtcctcaagcaatcctcctacctcagccycttgagtagctgggactacaggtgtgtaccaccatgctcggctaattttttratttttttgtagagatggggtctcactacattacccaggctggtctcttttcccttttaatataaatggctaattcaaagttttgctatattccatttcttcaacaaatttattaagttgcctactatttgccataaatgcaaagctgaataagaagatatccctgctatcaaaatgattatatttgaaaataaatatacagtctgggtgtggtggctcacascygtgattccaacactttgtgaggctgaggcgggagaatcacttgagtccaggagttggagaccagcctgggcaacatagcaagatctcatctctacaaaaaataaaaaattagctgggcatggtggcccatgtctgtagtcccagctactctggaggctaaagtgggaggatcactggagcctaggaggttaaggctgtttgagctgtgatggcaccagagtgctccagcctggacaacagagtgagaccctgtctcaaacaaacaaacaaataaataaataaaacaaggatgagagaaaacttaaaaaacttaaagttcatccatgtaagaaacatgaaaacactctttttattctctcattaatttattcagccctagcctggcatggtggctaacacttgtaatcccaacactttgggaggcagaggcaggaggattgcttgagcccagaagtttgagagcagcctgggcaatatggcaagaccctgtctctaccaaaaatwaaaaaattagctgggggtggtggtgtacacctgtggtcccagctacttgggaggctgaggtgggagattcacttgagcccagcaggtcgaggccgcagtgagctgcatttgcgctgctgtacttcacttgggtgacagagtgagaccctctcaataaataaataaatgaataattcactaatgaaattaagaaaacaattccagggaagaaaatatttgcaaaccatgtatctgataaggggttaatgtctaaaatatataaggaactcttacaaatcaatatccaaaaaacccctaaataacccaattaaaaaatgggcaaaggacttgaatagatatttttctaaagaagacatacaaataaccaacaagtatatgaaaaggtgcttaaggccgggtgtggtggctcacgcctgtaatcccagctctttgggaggccgaggctggcagatcacctgaggtcaggaattcaagaccaacctggtcaacaaagtgaagccctgtctctactaaaaaaaaaatacaaaaaattagccaggtgtggtggcacgtgcctataatcccagctactcgggaggctgaggcaggataaccacttgaacccaggaggtggaggttgcagtgagccaagatcgcgccattgcaccccagcctgggcaacaagaacaagactccatctcaaaaaaaaaaaaaaaaaaaaaaaaaaaaagtgctcaaaatcactaatcatcagggaaatacagatcaaaaccacggtgagatatcacctcacacgttaggatggctattatcaaaagaaaaaaaggtaaatwttggcaagcatatagggaaattggaatgcttgtacacatttggtggagattaaaaatggtgctgccactatggaagacagtatggaagttcctcaagaaactraaaataaaactgttacatgatctaacaatcccactgctggatatatatatctgaaagaattgaatcaggatcttgaagagatacctgcaccaatgaaccacaataatgttcattgtggcattattcacaataaccaagatatggaatcaacctaagtgtccatcagtgggttaatggataaagaaaatgtggtgtatatacacaatgtaatactattcagccttaaaaaggaagagattctgtcatttttgacaacatggatgaacctggaggacattatattaagtgaaataagccaggcacagaaagacagatatcacatgatctcacttatatgtggaatctaaaaaaacttgaactcggagagtagaatggtggccaccaggagcttgcaagagagagtaggggatggaaatgttgatcaaaggatacttattcctgtgatagtaggaataagttcaacatggtgactatagttaataataatgtgttgttgaaaattgctaagacagtagattttaagtgttctcaccacaaaaaaagataagtatttgaggtaatgcatatattaattagcttgatttgtctttccatagtgtttacatatttcaaaacaacatgtacacaataaatgtatacaatatttcttatctattaaaaaatttgttgtgctcacttcagcacatatgctaaaattggaacgatacagagaagattagcttggcccctatgcaaggatgacatgcttttaaaataaaaagaaattttaagtacacttataagttaaaaaaaatttgggggaccaggggtggtggctcatgcctgtaatcccagcactttgggagcctgacatgggcagatcacttgaggtcaggagttcgagaccagactagccaacatagtgaaaccccatctctgctaaaaataaaaaaaaattagcctggcatagtggcatgcatctgtaatcccagctactcaggaggctgaggcaggagaattgcttgaacccaggaggcagaggttgcagtgaaccgagatcgcaccactgcactccagcctgggcaacagagcaagaccatgtctcaaaaaaaaaaaaaattaaaaaaatttttgtttaatgattagtacctgataaattggcataatgaactttatataatatatgaataaaacatttgcccatattgagaaaaaattgtatacattaattgtgtgcaattttgtgtacatgagtaatacttcaataaagctgtaaaaaggaaaattccattcacaatgacattaaaaataatataatatttaggcacaatttttttttttttttttttttttttttagagacagagtttcgctcttgtcacccaggctggagtgcagtggcccgatctcaactcactgcaacctctgcctcctgggttcaagcgattctcctgcttcagcctcccgagtagctgggattacaggcgcccaccaccacgcccagctaattttttgtatttttagtagagacagggtttcgccacgttgggcaggctggtctcaaactcctgacttcaggtgatccacccgccttggcctcccaaagtgctgggattacaggtgtgagccaccacgcccggccatatttaagcataaatttaatgaaagtgcaattcttgtacactgaaaaacaaagaacattgctgagataaattttaaaataaataatagatattccatattaatggattggaagactcaatattgttaagatggcaattctttctaaattaattaacagttttgggttgggtgcagtggctcattcctgtaatctcaacactttgggaggctgaggcagaaggattgcttcagtctaggagtaggagaccagcctgggcaacaaagtgagacctcatctctacaagaaaaaaaaaatttaaagaaaattttaatgtaatccttttaaaagtccatgcatacttttacgtagacattgacaagctgagtttaaaatttagcaaaattgcaaataattcaattttagaaaagaagaacaaagttggaagrcttccactatctgattttgaaacttactgcaaagccacaattataagacggtatgacagtgatataaagatacacatatagattattggaacagaattgaggatctagaagtaaacttttacacttatggtcaattcactttcaacaaaggtgcctagacaattcagtgagaaaaggatggtcttgccaatacagtccccaacttaccatggttcaagttacagttttttgactttactatggtgctttcagctgtgtacattaatggcgagtatccatacaaccattctattttggtttcctttttttttgagacagggtgtctctctgtcacccaggctgaagtgcagtggtgcccactacagcctgacctcctgggctcaagcattctcccaccttagcctcctgagtagctgagactagaggcatagaccaccatgcctggctactttttgaatttttttgttgtagaaaggcagtctcgccatattgcccaggctggtattgaactcctggcctcaagagatcctcccccaaaaatgatatatatatatatcttttttttttaagagacagagtcttgctttgttgcccagatggtctcaaactcatggcttcaggtaatcctactgcctcagcctctcaaggagctaggactacaagtgtgaaccactgtgcccagctcataatatatgtatattatatagaaaatgttatttatataaaatttgctttgtgttagatgattttgcccaactgtaggctaatgtaagtgttctgagcacatttaaagtaggctatgctatgctatgatgttcaataggctaggtgtattaaatgtgtttttgacttactgatactttcaacttatgatgggtttattgggatgtaacccatgtaaattgaggaaagtctgtatatggtgctaggacagcatgatagtcacataaaaacaaaaagaacttagacccttgtttcatagcatacacaaaaattaactcaaaatggatcacagacttcaatgtaaaaacatctaaaagaaaacaagaaaatctttgtaactggagttggacaaagacttcttaaaatgacatcaaaagcaagatccataaaagaaaatattgataaattggactaaatcaaattaaaagcttttgtgcttcaaaggacatcattaagaatgtgaaaagaggctgggcgcggtggctcatgcctgtaatcccagcactttgggaggccgaggcaggcggctcacaaggtcaggatatcaagaccatcctggctaacatggtgaaaccccgtctctactaaaaaatacaaaaaaattagccggactaattagtggcgggcacctgtagtcccagctactcagaaggctgaggcaggagaatggcgtgaacccaggaggcggagcttgcagtgagccaagatcgcggcactgcactccagcctggcgacagagaaagactctgtctcaaaaaaaaaaaaaaaaaaaaaagagctgggagcagtggtttgcacctgtaaatccagctattcaggaggctgaggtgggaggattgcttgaggccaggagtttgagaccagcgtgagtgacaccctgtctctaaacacttaaagaaaaaaaaagctgggtgtggtggcacacacttgcaggcccagctacttggaaggctgaagccagaggatgcttcagcccaggagttcgaggctgcagtgagctgtgctcacaccaccacactccagactgggcaacggagcaagaccctgtgtcaaaaaaaaaaatagaagttaaatttttaaaaatatgaaaagataggtaggcaacagactgggaaaaaatatcaccaaataatataaagaacttgtaactagaatatataaagaactcctatgtctaaataataagagaaacatcccaactgaaaactgaggctggttctactcaggaggctgaggcaggagaattgcttcaacctgggagacggggttgcagtgaactgagattgtgctgctgcactccagcctgggtgacaagagtgaaactctgtctcaaaaaaaaaaaataaagaaaagaaaagaaaaagaaaacaggctggttgcagtggctcatgcctgtaatctcagcactttggcaggctgaggcaggcagattatttgacgttaggagttcaagaccagcctggccaacatggtgaaaccccatctctactaaaaatacagaaattagggccgagcatggtggctcatgcccgcaatcctagcactttgggaggccgagacaggaggattaccttagatcaggagtttgagaccagcctggccgacatggtgaaaccctgcctctactcaacgtacaaaaattagccaggcatggtggcacactcctgtctacttaggaggctgaggcaggagaatcacttgaactcaggagttggaggttgcagtgagctgagattgtgccactgcattccagcctgggcaacaaagcgagactctgtctcaaaaaataaaaataaataaaaatacaaaaattagcagggtgtggtgatgcggacctgtagtcccagctactcggaaggctgaggtgggagaatcacatgaacccaggaggaggttgcagtgatctgagattgcatcattgcactccagcccaggcaacagagtaagactccatctcaaaaaaacatataaaaaaatagagaaaagttctttaaaaagaacctttttaatgattgtatagtatttaatcattatgtttgcatcaatgagaatacatttgtatttgcagtgattgttgagcccattccaattggacaagctgctaaggactatttaaatttacatataatgccaactctgcttgaaggactcacagagctttgtaagcaaaaaccagcagatcctttggtaagaaatatttttattcacacttaagaatattgtcaccaggcgtggtggctcatgcctgtaatcccagcactttgggaggccaaggcgggcggatccgaggtcaggagtttgagaccagcctgactaacatggtgaaaccccgtctctactaaaaatacaaaaattagctgggcgtggtggcatgtgcctgtaatcccagctactcaggaggctgaggcaggagaatcrcttgaacccagaggcagaggttgcagtgagccgagattgtgccactgcactccagcctgggtgacagagcaagactccatctcaaaaaaaaaatttttttttctataaattgtctgtagttttcacgtttaagacattgtgtctttgaaatactgcgaatatagctgggcgcagtggctcacgcctattatcccagcactttgggaggccgaggtgggtggatcactaggtcaggagatcaagaccatcctggctaacacggtgaaaccccatctctactaaaaatataaaaaattagccgggcgtggtggtgggtgcctgtagtcccagctacttgggaggctgaggcaggagaatggcgtgaacccaggaggcggagcttgcagtgagccgagattgtgccactgcactccagcctgggcaacagagcgagactccatctcaaaaaataaataagtaaataaatgaaatactgcaaatattgagaacctttttaaaataaacatttctagaaggtatttcatatacatgttagatatgtataattattgattacttattattttcttgctgtgttttatttatttattattattattttttgagacggagtctcactctgttgcccaggctggaatgcagaggcgcaatctgggctcactgcaacctccgccccccaggttcaagtgattctcctgcctcagcctcctgagtagctgggatttacaggcgaacaccaccacgcccgggtaatttttgtatttttagtagagacagggtttcttcatgttggccaggctggtctcgaactcctgacctcaggtgatccacctgccttggcctcccaaagtgctgggattgcaggtgtgagccaccgcgcccgacctatctttctttttttttgtagccatgctagtagataacacaaaatggtttctcacggtggttttgatctgcatttccctaatggctaatgttgaacatcttttcatgagcttgttggccatttgtataccttctttgaagaaatgtctattcaaattgaagtcctttgcccatttttaaactgggttgtctttttgttgagttaaagttctttgtatttctagatgttaaacccttattagatatatgatttgcaaatattgtcttccattttgtaggttgtcttttcactttcttgataatgtcctttaatgtataaacatttttcatttgatgaaatccaatttatttattttttcttttatttcttgtgcttttgatgtcatgtctaagaatccattgtgaaatccaaatccaaggtcatgaaaatttacccctgtgttttatgttttcttttaagattttttttctttccttttttttttttttttttttttgagacagggtctttgttccccatgctggagtctggtggcgccatctcggctcacttcaacctctgcctcctgagttcaagtgattcttgtgcaccaggctgccaagtagctgggaccacaggagcacactaccacacccagctaatttttaaaattttttgtagagatggggtctccctatgttgcccaggctggtcttgaactcctggtctcaagtgatcttcctacctcggcctccaaaagtattgggatcacaggtgtgagtcactggcctcttttaagatgtttattgtttaagctcttatatttaggtcattggtccattgtgagttcatttttgtatatggtgtggtataggggtccaactttattcatttgcatgtggaaatccaattgtcctagtaccatctgttgaagagactgttctttctccaagtccagtggtaccaatgggcttggtaccattgtcaaaaatttgttgaccatagatgcgtgggtttattcctggattctcattctttttttaaaatatgaaatgcttaataaattgtgcatcatccttgcacaggagccatgctaataatctctctgtatcattccagttttggtatatgtgctgccgaagagagcactggactctcaggtccattctattggtctgcatgtctggcataaggatgtcattaccacactgtgctgactactgtagctttgtagaaggttttgaaattgagagtacaartcagtcctccaactttgttctttttcatgattgttttggctcctcagagccccttgcaatttcatatgaatttgaggattggctttccatttctgcaaaaaaacttgttggacatttggcaagagctgcactgaatctgtagattgctttgggaagtattgacatcttaacaatatcaaatctccgtatccatgaaaaataatgtcttctcatttatttaggtattctttaatttctttcagcaatgttctacagttcttaatgtataagcctttcgcttcttgggttaaatttatcccttggcattttatttgtctttatgctactgtaaatgaaagtgatttaaaatttttttttggactgtcattgctgatgtatagaaatacagttgatttttgtgtattgtaacctacatcttcgctgaatttattagctgtagtggcttccttgtaaattccttagggttttccacatgtaggtttatgccatctgtgaaaagagatagttttacttctttcttkccagtttggatctattcttgacaatcttgcataatgtaaatccaaatgtttccatttttaatggtcattttcttaaagtgattttgaaaactgtttaagtttccaattgatatagtatatattgaaaggaaatatgtaactgtttcttaacttaggttgtttttttttttcccatagatttggctagctgattggctgctgaaaaataatcctaacaaacccaaactttgtcaccatccaattgtagaagaaccttattaaaaaaaaaatcctcgaaagaacaaatcatgaacwatcttattataaaaggctgtacttctactgtttgaaaaaattatttctagggtttaagtaactacmagtaaaataaatttatttcttaaaaataagtgttaaaggaataactattctatgaagcagataacattaaggtaaaatataggcttagagtatgattttaacaatgatgtaacactaggtaatggaaaactcatgtaagatgttgctagatgtttttgtttttcttaagtttgagaagtaagacataaagtttagttatacattttcccaagcacatatcctatatctaaatacataattaatgcacagttgagacagtctagtttaaaaggcttaggtccttttgtagtccataagcatggtgatttggtttcatgctcatgtgtcagatatgcttccctcaaaccttgttacagcatcatcacattacctgtttgatgtaaaaaataaaaaatagaaaggtgtaagtatataagtaattttttggtacaatgaaaatggccagaaccaggggatgatcttaaactaatcacttggataactattaggctggtgcaaaagcaattatggtttttgtcattaaaaaacaatggcaaaaaccacaatcacggccggtcttggtggctcacgcctctaatcccagcactttgggaggccgaggcgggtggatcacgaggtcaggagatcgagaccatcctggctaacacggtgaaaccccgtctctactaaatatacaaacaattagccgggcgtagtggcggcgcctgtattcccagctactcgggaggctgaggcaggagaatggcgtgaacccagggggcggagcttgcagtgagccgagatcgcaccactgccctccagcctgggtgacagagcgagactctgtctcaaaaaaaaaaaaaaaaaaagagagaaaagaaagtataatgtaagaaaatgtgaaaacagaaagattgttagctgaaaaaaagtatgttacaaagcaatatgcacagtgtacgcccatttggttttggtttggttttggttttttttgtttgttttaataagatagggtcccgctatgttgcccaggctggtctcaaactcctgggctcaagcaatcctcctgcttcgccctcccaaagtgttaggtttataggcatgagccattgtgcccagccatgtgttctcatttagattaaaaaatgaataaataaatgtgtatagaataacatgtagaaggatacccactcaagtgtttttatctataatctctggatggtagaaatattttatttttcttcttttgcttagctgtattttaaatttttctacagcatttatgtaactacttttgtgattaaaagaaacattaagattacgaaaaataagccgggcgcggtggctcaagcctgtaatcccagcactttggaaggccaaggcgggcggatcacgaggtcaggagatcgagaccatcctggctaacacggtgaaacccggtctctactaaaaatacaaaaaaaattagctgggcgcggtggcagaggcgcctgtagtcccagctattcgggaggctgaggcaggagaatggcgtgaacccgggaggcagagcttgcagtgagccgagatcgcgccactgcactctagccagggcgacagagcgagactacgtctcaaaaaaaaaaaaaaaaaagattacgaaaaataaatgttgtaacaaatgtcagctttaaagggctggcaacacttccttattaatagactgtgtttaagctgtcagtggctaagatgttttgcaagttctcactgttggtatttttctgaagttttggacatattccttctgagactgtgtgcccactgtatttcaaaacacctttagcatcagtgttgggagaacaaaccaaaatcttaaaaataaagataaataataaattgttatattttttagcaatgaccaaggacatataggaaaaagcaaatcatttttacagtaggattccagtgtgacagctttaggaggtcatttccacattcaaagcctctgtcatggaggaaagaaaaaaaagaaagaaaaaaaaaggcagcactgtgtatagcaaaaaattccaactgggtgtggtggctcacgcctatactcccagcactttgggaggccaaagcaggaggatcacttgaggccaggagttcaagaccagcctgggcaacatagcaaaaccacgtctccacaaaaagtataaaaattagctaggtgtagtggcctgcacttctgttcccagccactttggaagctgaggcgggaggattgcttgagcccaggaggtcaaggctgcggtaagccataatcacaccagtgctctccagcctgtctaaaaatatcaaacaaacaaacaaaaaagatggccgggctcggtggctcacacctgtaatcccagcactttgggaggccaaggcgggtggatcacgaggtcaggagttcgagacgagcctgggcagcatggtgaaaccccgtctctactaaaaatacaaaaaattagctgggcgtggtggcgggtacctgtagtcccagctactcgggaggctgaggcaggagaattgcttgaacccagcaggcggaggttgcagtgatctgagatcacgccactgcactccagcctgggtgacagagtgagactccatctaaaaaaagaaagaaagaaagaaagagagagagagagggagggagggaggaaagagagagagagagaaagagaaagaaagaaagaaagaaagaaagaaaaagaaagaaagaaagagaaaagagagaaaaaatccatgctggtagtcacctccaatcgagacctgccattcgtttttttttgtttgtttgttttattttttttaatggagcaggagctgagtgcggtggctcatgcctgtaattccaacgctttgggagactgaggtgggccaattgcttgagcccagtagtttgagaccagcctgggcaacatggggaaaccacgtctctagtaaaaatacaaaaattagccggacatagtggtgcacacctgtagtcccagctactcgtgaggctaaggcaggaggatcatttaagcctggaaggtcaaggctgcagagagccatgattgtgttactgcactccagcctgggcgacagtgctagaccttgtctcaaaataaataaataaataaaaataaaatggagggggaaaagtggagaaaagcagactaatttaagatatattttagggatcgatagacaaatgcacatgcaaatggaaaataacatagttatcatggaattctttaattttgcacacatttgatttccttacttcatgggccaggaactgggaagtgtagcatagggtgagtaggaaaatgagaagtctgccttcttgtttacttccaaaataactagaagaggagaagtctgtcttccaacataacctgttaggtgttaccaaagtactgtgcatgcatttgtggttgttaagtactggtgccttaatgcatttttatcacactgaatcatagtatggcatccttgttaagcatgatatgtcactttgtttggttcctttctccaggactcgaactaaagagagccaaaaaaggatgcaggcatgcagctctcttacaacttgaaactaaacagaagtttagattcctcttttttttctttagaagtttagatctgggatggcatctagaagccccctcttcccaggtctcttgccaatcttcctgtacttagccagaataaaaggtacatgtctaacctggacattcctacttaagtttctatttgtgtgcatgtgtgtggcatgggcatggggggtgtgggtgtgggattttggagcatgagatagtgcttggaggaaggagcccagggcaataacttgtctgtcctgtgttaagggtgtcatggataagcttgatttgaaacttatgtagtatttgagaagtactctcccagctcggaaatactgccacttctcttatgcagttaactctttataagaactattcagatgatgcttttattatttttttctttttgatatagggtcttattctgtcacccaggctggagtgcagtaacactgtcatagctcactgcagccttgacctcctgggctcaagtggtcctcccacctcaacctcttgagtagctgggactacaggcatgagccaccacacccagctaattaaaaatttttttttgtagagacggggtctcactacgttgcccaggctggtcttttactcctgggctccagctattcttctgctttggcctctcgaagtgttcagattataggcgtgagccactgcacctggtctaagatttgatttttgattcagagatggtccagttcttctcagtttgctatttctgtgacttcaattgcttttcttgggttgtttttgttagtccctttactagtaacattctctatattatctttacacctttcatttgagatccataattatgttccaaaagttaattaaatctcagaaactcccaggcttacgagagaaatttacttaacagagaagttatttctaaagatagagtccaatgatttctggcaattttatatagctttcttccacctcaccaaaggacatgactaaagaaaaaaatctttgtgaagcagtcttgcattagctttctcattaatttaattagagcctctagtacataggagaaagtggagatgactaaataaaatgatacctcttcctttcctgcttccagggtgatccaagaaatttctctctccccatccaaatcaagagttgatgacactgctgtgactgatgccttttgttcccagaccaaattgtttttattgcctaccccctgccggcactttccaaagcaccactgccatcagctccagagggaatcccttcctcaggcgtcctgggcagcagctgcagggtgatggcagggagcacagaatgggaggagaaagcaacttgcagacaaatgggcagctaatcagaccaacagcccaatcactagacccataaaaaaattccattccccacctccactaacctcatctgcatttttttggccaaggtggggagaatgctccttgaaaagttatgcttcataagatctatcaaagcaggctcaaattactgccccccacaccttattctttctcaagccaattgtgcttattcagccgaatagttgtcaaatcactacagaccttacaaatactaaaaggacaattggggaatattatgaacaactttatgccaataaatcgaacaaattagatgaaatagacaaagcctttgaaaaatgcaaactaccaacagtgtgtcaacctgaagcacaatttctgggtcttccttttaaactctttgcaaagtttggatctctctcaattttcaggatttttcattttaaagcagccttactgagcttacttaattagcattctcaactgttctgctaggagctggttacttctcaatacaagttatctaattgtgggatggagagggttaagctattttataagaataagcatctccatcttgagggggaggataacacatcttaatcaggattataaaatcctgatccttctgggcggcctttatgttggggccagaaggacagcctctctgaactttagtgtttctggtccttgccactgtgagaacatttcaaggagtctttaacatatatatgtggttagagtcttcttgtaccataaaatggttagacaaggaccaatataaagcagtcagtctgcaatgaggttggagctttagagataagcacatccttttcagtggtgcttgcttttataatgtgtcatttagcaaatggactgtgaagaattagtcatgccaaactcctaaccatctgatgactggatatggactaaacatctcagatgaaaatgtttagactttaagccttcagtctttcaaagctcaattaaaataaagtactatatctaatttaagttctagtttaacttagcctgtttgcaacttttatagatacaggttcaacatgtaaatggcaaaccattatcaattccttcatgcttctcagggatgatttaagaaaatgtaatatttgaaactgttgtcatctttgtggtgagaaacaaatatgtatcctaaattaaattaaaatgtaatattattagggtattgtccccttggtgaaatcatattattatatctctctgttgctaaaatggaaggtgccaacccgaacacactattgtgtgtaggaagtcagactttgtttagcttcctgtagattctgggtgcccccgtgccctcctccttcaattcttcggtagctacctggctctaaggcctggctttaagttctcctaagccatctgagctggccttttcactggattccctccctttttctcttcatgtagtacttttctcttcttcctctttatagctctattctttttaaag

SEQ ID NO: 95919 - DNA, 20123 bp, Homo sapiens
tggggtgtcatgatgttggtatcttatgttcaaaaaacagtaagttgaaactggggttgcatatattagtgctgttgtactagtcctttcattttctggattttaaatgttttcataatttaaaagttgggggaaaacttaaagaagaccttaataaatggaaagacatcccatgttcatgattggaaggtgtagtaatgttaagatgtcaaattcaacacagtctgcattaaaattccacttggcctgtttgcacaaactgacaaattggccctaaaattcatttggaaattaaagtgactcagaatcttcaaaataattttgaaaaagaaaaagctgtaggactcatgcttcccaatttcaaaacttagtacaaagatactataatcaagacattgccaatcaaaccacaatgagatatcacttcacacactctatgaggggtataacagaaaagacagattaaaagtattgttgaggatgtgtgaagaaattgaaacccttgtgtgctgctgctgagaatgtaaaatgtataaccgctttggaaaacagcttgcagttcctccaaaagttaaacatatatacacatatatataaaatatattattatgtatatataacatattatatatatatgggttagttttgttttgttttttttgttttttttttttttggagacagattcttgctctgtcacccacgctagagtgcagtggtgccatctcggctcactgcaacctccgtctcctggtttcaagcaattctcctgcctcagcctcctgagtaactggaattacaggctggaattacaggcaggcaccaccatgcccagctagtttttgtatttttagtagagacggggtttcgccatgttggccaggctggtctcgaactcctgacctcaggtgatccacccacctcagccttccaaagtgctgggattacaggcatgtgccaccgtgcctggccaacatagaattatattatccagcaattccattcctaggtgtatacccaagacaactgaagacatatgtccagacaaaaacttgtacatgaatgttcatcacagcatggggattcacaatagctgaaaagtagaatcaatgcaaaagtccatcaactggtgaatggataaacagaatgtggtgtatacataaaatggaatataattcagccacaggaagggatgaagtactgttatatgctacaccatgaatgaaccttgacaccattatgttaaatgaaagaagccagtcataaaagctcacatatttcattattaaatttgaatgaaatgtccagaataggcagatacttactgtccacagaggtagaaagtagatgaatggttaccaggggctaggagaagagggaaatggggagtgactgtttaatgggtacagagtttcttttaggggtgatgaaaatgatctagaattagataattgtgatggtgacaaaactttgttaatatactaaaaaccaatgaattggctttaaaccaattgaattttaaagtatattttgaaagagcggatattatggtatgtgaattatacctcataatgaaaatatgattgcattgttcaaaagagtatgaaaggaagcacacaaaaaatatgaaacataaaatatggctctttttattctaaagtgtagaaattgaacattttgtctcaggatataaaacaaaaacaaagaaagctaaaagcccttccatttggccatcttggagtaagacctaccacagtccagtgccttttactcagtcccacagcctagcctattgtttgcgtgaaactctgtagcttccactcctgtttgactgttgggtgtaaagttatgagtgaccacattgggggaagggaggaaaactccccataaaagtatatcctgggggcctgaggacagacgtgggcccagcgacagatgtgggtccaggtatcagaacgtgatatgcctacttgtccctatctcrttgtccacacatagggcttggaagatggccatgttttatatcatgtgacctccaaccaatgagctgattggcttcttcaacaagagcccaggtagagattgctgtctagaagagcccatcagattctagagaatcaggcctctggcagtagggcatggtggctcatgcctgtaatcccagcactttgggaggctgaggtgggcagatcacctgagttcaggagttcgagaccagcctgaccaacatggagaaaccctgtctctactaaaactacaaaaaattagctgggcgtggtgatgcatgcctgtaatcccagctactcgggaggctgaggcaggagaatcgcttcaacctgggaggcagaggtcgcggtaagccgagatcacgccattgccctccagcctgggcaacaagagcgaaactccgtctcaaaaaaaaaaaaaagagagagagaatcagctctttgacagtggaaactcccctgggaagatgtcatagggtcctcagggtcagacacagagagaaggagacattaggacagagagaagaggcaagaaaaaaacataccttgcagtctgtgaggaacagagtggcccccaggggcctccagcccaggttctggatcaaagctcctcaaagtttaaggcgcatttggatcatctgaggatcttatgaaaatacagactctgtctgattcagtaggtctgggtttgggggtgggagcctgttagtatatttctaacaagctcccaggcaaggctgctgctgctgctgatctaatgaccacagtttgaggctggacagagtggctcacacctgtaatcccaacactttgggaggacaaggcaggagggtctcttgaggctagaactttgagaccagcctgggcaacgcagcaggacctcgtctctaaaaaacaagagagaagaagaaaaaggaaacaaaaagaagacctcaactagagtaggaagcagccaggccacatatctcttcaatggagaaaagagtttttttcttgagtaaattggagtgtacccatgttccttgtcaatgacggtaactttaaatgccaagaatgtgagagaggccgaggcggcggatcacatctttataatcctagcactttgggaggctgaggtgggaggatcacttgagcccaggaattcaagaccaccctgggaaacaaagtgtgatgccctctctacaaagtcaaaaaattagccaagcatggtggcatgtgcctgtgatccgaactacacaggagggtgaggcagaaggattgtttgagcccaggaggtcgaggctatagtaagctgagtttgcagcactgcactcactccagcctgggcaacagcaggaccctgtctcaaaaaaaaaaaaaaaaaaaaaaaaaaagaatgtgagagaccatggggaaggtgtggccctggggtaggggctaggagactacagaacaactgctagtggccccatcactgcccagaggagacagtgacctgtccaccctcatgacctctttggactccttggacaggactggctacacatgaaaatgtggggacccttatttttaaattgttaagaatgtcaagacagcaacaacaaagttttaaaccaagtgcatggcccttctgcgttgtaggcccacgaggcaggcagactggtattcacatccttgtatagccccctccccttgagtgtgactggggtctgtgctttattgcttggaagcaaggcttatccctaagccttattttcggggaggtggatttgagagctattatcctacctccttgcttggcacccttgtgaataaatctttagtcttttgcaaaactcatgtcacagtgattaatttactgtgcatgggcagaacggacctggtcctggccagtaacacccacgaggcttcctaggagactacactgccaagagagcactgagcaatggttgggagcattctgtctaaatgacttttctcttctttctaggccgggcacggtggctcacgcctgtaatcccagcactttgagaggccgaggctggcaggtcacttgaggccaggagttcaagaccagcctggccaacatggtgaaaccctgtctctactaaaaatacaattagctgagcatggtggcacatgcctgaaatcccagctacccgggtggctgaggcacgagaatcgcttgaacccaggaggcagaggttgcagtgagcagagattgcaccactgcacttcagcctgagtgacagagaggggcaaagtcaaaaaacaaacaaacgaaccaacccacacactctcacttttatcttgtttctataaattaataaatacagcctttgtgagttggtttatgtgagtcagacccaaagaaaatgatcaatcctgaaacgtggaccaaattagttgttttgttttttagttggagttactctcttgtcgcccagcctggagtgcaatggcgcagtcttggcacacggcaacctctgcctctagagttcaacgattctcctgcctcagcctcctgagtagctggaattacaggtgcatgccaccacgcccagataatttttatatttttagcagagatagggtttcaccaagttggccaggctggtctcaaactcctgaactcaggtgatccgccggcctcagcctcccaaggtgctggggttataggaatgagccaccactcccgccccaaattaggttttgaacttaaaagacaggctgagccttgaaccagaatcctgacagctcctccttgggcctctgactggagttatccagaggtgaggataaggcagccattgccttctctgagtgtctacctcctttcaaaactttaacatggaaatctgaatttctcatctttccttaattttttttccagttaaaaatcattattactggccagttgtagtggctcacatctgtaatcccagcaggtggcagaggtgggaggatcagcctaggcaacatagtgagaccctgcctctacagaaaaaaattttttttaactagctgggcgtctttgtgcgcacctgtagtcccagctacttggggaggctgagatgggaggatggcttgagcccaggagttggagtctgtagtgagctgtgatcatgccactgcattctaccctgggcaagagagtgagactctatctaaataaaataaaacagttgttacttccactttatttgcagaaatgttccttattctctagaaaacattatgcgttggctgacacactttcagtgggattcgttttagaaaatgacatgtgaccctgatactatttgacaggctccatggcagcaaggggcaggcctgggcttacggctcagcagatgaatccaggggggtggacttgcaaggactctggagggctctagcttccctgtcattttaaagatggagaaacacaggcctggagaaaggaagaaataaacccagggaatgcgatagatggcactgtgctggcaggggcaggaagaccaaggctgtgacattccagggagtgcgactgcagtgaagcgagtgaccacaaaacactgaacgtaagccctgaggctttgccacttgctggcaccaaggactctgcagtgttgagccaagaggatggactttggagccagactttctgggtctataatcattcagtgtctgtctcctcctctaaaatgcggacggtgggaaattctgacacacgcttcaacacagatgcaccttgaagacattatgctaagtgaaatgagcgagccaggcacgaaagggatgggactggggcctctctgtgcgtccccctgagagacaacggtctcttggccacccaccctgatcccacaggagccaggcgggcccagccctgagacaggccgcccgccgcccgcaattggactaaagagtgtcccaggcgtccgtgccgcccaatggggcacagcggtcggggtgcgtagccgcaggggcgtggtctgaggtccgagacccgagtcctggcactggagtttgctgactccctctggtttccggtcaggtcggtcggtccccactatgggcctggagctgtacctggacctgctgtcccagccctgccgcgctgtttacatctttrccaagaagaacgacattcccttcgagctgcgcatcgtggatctgattaaaggtaggtccagcctcgggtttggggaaccgaaaagtcaggaaggggacaggtaggcatacatagcttagggaacttctcccagcgccaccttcttcctggggccattgctggtctggtttggagaccgaacagagaaaggtgagccagcagggagatccaagagtcrgggctccccaaaactctgctcggtctcacggaatagaccacggggttcccctgaggccgaataaaggggtggggatcatgaagagaagccagacaggaggacaaaaacgggcgcagctgggtgcaggggcacacgcctgtagtcccagcaactcgagaggctggggtgggaggatcgcttgagcccaggaattccaggccgcagtgcactatcatggtgcccttgaatagccactgcactcccgtcagggcaatctagcgagaccccgtcttaaaaaaaaaaaacaaaaaaaaacaaaatgaaagcaggtgtgacctcggcctagggaaaggtgggatgagagaggtcaagggtgccaagtgtagagactgggacagcgtcaagtcccttctttatggcccagctgctgagattctgcaacagcaaacagctcaggacgtgactttccatccctgccctctgcactcgtccagtctgcattggggtccctctttgtcccttccttcctctgttcctcctgttttgcctctgaccttgtccttgtccttttttttttgagacagagtcttgcttttgctttgttgcagtgcagtggcacggatctcgaatcactgcaaccaccacctcccgggttcaagcaattctcctgcttcagcctcctgagtagctagattacaaatgtgtgccactatgtctggctaatttttttgtatttttaacagagatgggatttcacaattttggtcaggctgttctcgaactcctgacatcaaatgatctgccggcttagcctcccaaagtgctgggattacaggcatgagccactgtgcctggcccaaggcattttgtttatttgtttgtttgtttttgagacggagtctcgctctgtcgcccaggctggagtgcagtggcaggatcacagctcactgcaacctctgccgcccgaaaccttgtcctctgcctcttgttcctgctggggaggtaggttgccccaggctgctgatgctggaagcagcagggggaccctggggcttgatgagccctacaccctgttttgtttctctagcatgcctccaaggcccttgaggactcagctggcaggcccaggcccaggcccagtgcagggtggggtagtaggaggggttggaagcagaatccaggtatggctggtggggcaagtaaggcgactctacttggctaagccttctgcccagggctcccactccatggctggccctctgcctgaaacttctccacataatctcttctgcaaactgcccactgtcctgcgcaaggacttcctctgcagagtgtggagtagaggaaagggaatgggggacaagaggacgtccaagctggttgtcaaatgtagtggtgcagagggaagtgtgttttcccaggagacagaggagggttttcctggtgaaggaacagtctgaagggagggtgaagagagggtagcaggctgggcatggtggctcacacctgtaatcccagcactttgggaggccgaagtaggaagattacttgaggccagtagttcaagaccagcctgggcaacatagtgagaccccaactgtaaggggaataaaagtttggggcacagggggtggtagcaggtatgctacacacagctccacagtgcccagggcagggtgaacaaagggacatggtggggccagtagaagttgcttctaagtaggtagataccagaaaaagaccacttctctgtgtttcatgaccctgccttagaattaatggtggaagggacaaggtagtcagtcccctcaggtgacctatcgtgcagcttggggtgctctgattgtgagttcatgaagctggcaatagtggaaagaggagatgggtagggtgcatgcaaaggtccaggaaccacaccctgcacagtgagctctgttgcagaggggcagcctgtgggaggaggctgtgcctacakgacttagcaaggggtgttgtctattttgtaccagccggtggagtggtctcctcctcctcccgcaggggcccttccagtctttgccaaccaggagtgcagactggtgggaagaagaactgtgaaactggggccagagcattgcagggaggggcacaggccatggcgggctcagcgttctcctcccaccacccaccatgctggactcttcccaggtcagcacttaagcgatgcctttgcccaggtgaaccccctcaagaaggtgccagccttgaaggacggggacttcaccttgacggagaggtaactgggaccctaggactgctgccaggcctgctggaaccatcctgktctaaccctctatttcatagacaaggaaactaaagtcttcagaggcagagagtctctgtgccccgcatcctgcagagagtcagtactggaccccaggcccttgccttcctgctattccagttcaccctgatgattagaaaagcaaatatctactttacttccacaccagtgctttggttgctggtgagtggtgagagtatccttgagacagggtaggccagaggacgatggcagctttgcccaccrtggggcaggcctctggccaagcttgtgtggcgatggctcagtggcatctgggctgcccggtggctccatctctgggctgcagcttcccaggatgggtcttccccatggaagagccaccagatatggacgtcttacatcacagctggtcccaagaagttgaatcctcttcaggaaaagccaatctttccccagttctgccccttttgtcaccagagtcacccttcccctaacaagaacctggagtttgtgctttaaagctcatctctgaaatctcaggatggacgcacctccgatgaattcctctgacattctgccagggcccktcttcctccctggtgccccaggtgtcctgagtccttgtgtcactcagcgttgtgacccccaggtaccagccagagtcaatgtgcaatctctgcctctgtcactactctcaccttcaggtctgtggctcacagagacctgcagccctcctcagaggtggcttgaacaattggctgggagcaaaaggagctcctgggcaccctgcacagacaacggagtcgttaagctgggacacgtgtgtagccccagcttaaaagagaatataggcccgtggcagatacagaggttttctgcccttttggcctgcatgcycaacctttgggaaaccccaagttcctgaaagcttttctgtgtctccaaatggacacatcctgtgtccttccaggtccatgctcatctcatcaccatggcggccctcaaaacccagggaaggaggagagtgccagggggccttgtctgttctgttgttctaggatcctgcagctgcaggagtgcttcctgagtggtactttaggaagccaaactaccccagtcagcttagataggagctgattcttggcagaaagaatgacagaaagaacaaagggacacggaagcctttttgaacagtcaggccatcagaggctggtcggaatcccagcagatgagagtggataccgaatggaaagaactgagcttctttaaagctcagctttgatgccccgttctcctggaagctctctctggttctctgatcagaaactgtctctaaacatttggcaagacattctgttgtgggattttgcctggtggtaggaaaagcttgggtattagcctcagaaagattctcagctctgccattaagagctgtgtgccctagggcaagtctctgcctttctaagcctggttttcttctctggaaaatgaggctaatactttggcaaattgtcagaaaggttaaagaagtgtgctgggcacagtggttcatgcctataatgccagcgctttgggatgccaaggctggaggattgcttgaggataggagtttaagaccagcctggcaatacagtgagatcccatctctacaaaaaagaaaaaaggtagccaggcatggtggtgcactcctataaaaattgaagctgcagtgagctgagactgcaccactgcactccagcctgggtgactgaggaagaccttgtctccaaaaaaaaaaaaaaaaaaaaggccaggtgcggttgcttatacgtgtaatcacagcactttgggaggccgaggcaggcagatcacaaggtcaggagttcgagaccatcctggctaatatggtgaaaccccatctctactaaaactacaaaaaattagccaggcatggtggcacgcacctgtagttccagctacttgggaggctgaggcaggagaatcacttgaacccgggaggtggaggttgcagtgagccaagatcgcaccactgcactccagcctgagcgacagagcgagactccgtatcaaaaaaaaaaaaaagcgactatgtatgaaatacccagcacagtgcccttcccttacccatcatgaccyccacacccacagtgtggccatcctgctctacctgacgcgcaaatataaggtccctgactactggtaccctcaggacctgcaggcccgtgcccgtgtggatgagtacctggcatggcagcacacgactctgcggagaagctgcctccgggccttgtggcataaggtgaggctgggaatgtggggggcggcagcgagagcattccccaaaggtgttcaggcaccagtctcttcttttcagttttggattatttctactgacctgtctttgccttcacagattctttcctctgttgtgccaaattgctattaagcccatccaatacattctttgtttgagatatgtatttttcagctctggaaattccatttggttgttttttagaatttccacttctctgatgaaattcaccatctgttcatccattttatctgtcttttcttgtaaattctttaacatatttatcactgttacctaaaaatctttgtcaactaatttcaacacgtaggtgttctgtgggtctggtttttttgttttgttttgtttttgagatggggtctcactctgtcacccaggctgagtgcaatggtgygatctcagctcactgcaacctccacctcccaggctcaagcgattctcctgcctcagcctcctgcgtagctgggattacaggcacccaccagcacacctggctaacttttgttatttgtagtggagaccrggtttcaccatgttggccaggctggtttcgaactctccacctgaagtgattcgtcctccttggcttcccaaagtgttgggattacaggcatgagccaccatacccagcctacgggtctatttctattgattgttgttttctccctcttgattatgggtcacatttgcctgcttctttgcatgtctcatgatgtattatcattattttttatttttttgagacggactctcactccattgcccaggctggcgtgcaatggcacgatcttggctcactgcaacctccgcctcctgggttcaagcgattctcccacctcagcctcccaagtagctagaattacaggcacctgccatcatgcctggctaatttttgtatttttgtagagacagggtttcaccatgttggccaggctggtcttgaactcctgacctcaggtgatcctcccatctcggcctcccaaagtgctgggattgtaggcatgagccaccatgcccggcctcatgatgtatccttgtgtgccagacattatgataaaagaagagcagagattgaattgcataataaacacccccaagaaagggcttgcacttccctgtgtcaggtagccaggatgtgaggctgttctcttctaagctaatcaggaggtgggctgggttgcaggtttagttggtttcagtttatctttggtttcaaatatcttgaatgtgagatcaggtcactagctcagtctagcatggctttggaatctaatcaccaactacgatgttgcctgtaagatctctctgcttttcatccctgcccccagttcccaaactgctgctcagtcagaaaagcccatgcctgtgacagtctttctcccagcctgcttgggcccaaggaaatgaaattggaatgaaagtagctcatctaggaacggcttatgcctctctggaatttagttcatttagtcaagtgctgtccgatagaagtataaagtgagccacatacgtaattttaaattttctagtaggcacatttaaaaagtaaaaagagtccaggcacagtggctcatgccaataatcctagcactttgggaggccaaggcagtggatcacctgaggtcaggagttcgagaccagcctggtcaacatggggaaaccttgtctctactaaaaccacaaaaattagccaggcttggtggcctgtgcctataatcccagctactcaggatgctgaggcaggagaattgcttgaacccagggggcaaagttggcagtgtgccgagatggtgccacttcactccagcctgggtgacagagctgaacactgtctcaaaagaaaaaaaaaaagtaaaaggaaattgatatattttacttaacccaatgtgttgagaatattatcattttggccaacaagtacaagaaaagatgcttggccgggcgcggtggctcacgcctgtaatcccagcactttgggaggcggaggcaggcagatcacaaggtcaggagattgagaccatcctggctaacacagtgaaaccctgtctctactaaaaataaaaaaaaaattagctgggcgtggtggcgggcacctgtagtcccagctactcgggaggctgaggcaggagaatggcgtgaacccaggaggcggagcttgcagtgagccgagatcaccccactgcactccagcctgggcgagagagcaagactcagtctcaaaaaaaaaaaaaaaagaaaagatgctcagcatcactaatcattagggaaatgcaaatcaaaactaactccctacyccagtaactcccgactttgcctgcccaatccccaggtratgttccctgttttcctgggtgagccagtatctccccagacactggcagccaccctggcagagttgratgtgaccctgcagttgctcgaggacaagttcctccagaacaaggccttccttactggtcctcacatctccttagctgacctcrtagccatcacgragctgatgcatgtgagtgctgtgggcaggtgaacccactaggcagggggccctggctagttgctgaagtcctgcttatgctgccacaccgggctatggcactgtgcttaagtgtgtgtgcaaacacctcctggagatctgtggtccccaaatcagatgctgcccatccctgccctcacaaccatccatccccagtctgtacccttttccccacagcccgtgggtgctggctgccaagtcttcgaaggccgacccaagctggccacatggcggcagcgcgtggaggcagcagtgggggaggacctcttccaggaggcccatgaggtcattctgaaggccaaggacttcccacctgcagaccccaccataaagcagaagctgatgccctgggtgctggccatgatccggtgagctgggaaacctcacccttgcaccgtcctcagcagtccacaaagcattttcatttctaatggcccatgggagccaggcccagaaagcaggaatggcttgcytaagacttgcccaagtcccagagcacctcacctcccgaagccaccatccccaccctgtcttccacagccgcctgaaagccacaatgagaatgatgcacactgaggccttgtgtcctttaatcactgcatttcattttgattttggataataaacctgggctcagcctgagcctctgcttctaactctaatgtgtgatttatttgactttcctctgtcccagacctggtcatggtctctatgcaaaagacaacccccttcccaggccgtgtgggtcagcttccccctgatgtttgccaagagtgaaattaataaatgtggctgaggccgcgtgcggtggctcacgcttgtaatcccagcactttgggaggccggggcagggggatcacgaggtcaggagatcgagaccatcctggctaacacggtgaaaccccgtctctactaaaaatacaaaaaattagccgggcgtggtggtgggtgcctgtagtcccagctactcgggaggctgaggcaggagaatggcatgaacccaggaggcggaccttgcaatgagccgagatcgcgccactgcactccagcctgggcaaccgagcgagactccatctcaaaaaaaaaaaaagtggctgagtgtggtagctcatacttataatcctagtactttgggaggtccaggttggggggattgcttgagtccaggatttcaaaacaaacttttttttttttttttttgagatagtgtcttgctctgttgcccaggctggagtgcaatggcatgatcacagctcactgcaacctccacctcccaggttcaagcgattctcttgcctcagtctccccagaagctgggattataggcacgcactatcacacctggctaatttttgtgtttttagtagaaacagggtttcaccgtgttgtccaggctggtgtcaaactctgtacctcaaatgatctgtgcacctccacctctgaaagtgctgggattaccatgagccactgtgcctggctccccaaaaaaatattttttcagagatggggtctcactctgttgcccagcctggagtgcagtggcacagtcatggctcactgcagccttgacatcccaggctcaagcaatattcccacctcagcctcctaagaagctgggacaacaggtgcaccccaccacgcccagctcatttcttttttatttttgtagagacagggtcttgccatgttgcccaggctagccctgcactcctgtgctcaagagatgctcccacctctacctcccaaagtgctgggattacgggtgccaagacaccacacgcaaccaaaagaaattttttttttaattagtcaggcgtggtgatgcatacctgtagttctagctacttgggaggctgaggtgggaggattgcttgagcccaggagttcgaggctgcagtgagctctgattgagccatagcactccagcctggggcaacagaacaagatcctgtctctaaaaacacacaaagaaacccaaaacaaaacaaaacaaaacatttcctgtagccttctaattatcagagaaagtagtttatctgaccgctcagggcccagcagcatcccacatttcttggctataagcatggtgacctaacagtcggctgagttagcctcccaggacatgacccttactggtttttggattgtgtgtgtgtgtgtttttttttgtttgtttgtttgtttgtttttttgagaaggagttttgctctttttgcccaggctggagttcagtggcaaaatctcagctcaccacaacctccgcctcccgggttaaagtgattctcctgcctcagccttctgagtagctgggattacaggcatgcaccaccacgcccagctaattttgtatttgtagtagagacagggtttctccatgttggtcaggctggtctcgaactcccaaccacaggtgatctgcctgcctcggcctcccaaagtgctggaattacaggcataagccactgcgttgggacgactcttactgtttttgttttgttttcttttgcttgttttttggtatttttttgagacagtctcgctttgtcgccccggctggtgtgcagtagcgcaatttcggctcactgcaagctccgcctcccgggttcacgccattctcctgcctcagcctcccgagtagcggggactacaggcgcccaccacgtccggctagttttttgtatttttagtagagacggagtttcaccgtgttagtcaggatggtctcgatctcctgacctcataatccgcccgcctcggcctcccaaagtgctgggattacaggcgtgagccaccgcgccctgcctgactcttactgttaatcactagttttgcatttctcttgaggaactggtcaggaagagaaaacctagacagcagctctcctggtcaagacccagtcattcagaagcctaaatggcctgcctaggtgtttggctttaaactgttagcaggaatggagtactctgattgtgttttagaataatattccgggcctactacccctgcgcaccggtcctggcccagggctagctccttggtgagaaactcaaagaagtgggcactgtggctgcggttgtcctcggcggtgcccactacgccgatggaggagatggacagctgcgcgcagggctcggtggacccgctcagcgccctggccaggcccggccgtaccgtcacgttcacaagctgaggggaacatgaaaagttttacccgaagctggagccagtcgggctacgtctggggtcccgacccgagcgcgcgaaagccgaaacgcgcagtgttcgcggggacagggatcccagtacaggccgaggtccctgaaggtcacgtccgggtcatgactggggagggcgacaagggaaagacgtgcggagggggagccgcgggatcgtgaagcacggaaagtcagagcttggcctgcggaatggggtggggggtggtccctggggaaagggatcggggtcgctgttgcggaggcagagcagggacaaggccggacccctggcccaccaacttcccctcgcccagtgctgcccggcccacgctcacgtctgcaggtttgcccaagatggaggcagcgacggcgcacagccgtttctccagccccgcgggcactcggttggcggggaaattcgtgtgcagctctaggaacggcatggcgggcagaggaacggaaacagctctggcggaaaaaagctggagatacccaaggctcgcggaccggagaggaggggcgaggcgctaaaacaacctggcttctcattggctggacagagactcagcgctccccgattggctgcctagggtaccttcccacttctgcaaacaaaagtcacgtgtgccggctctgatttccggaaatccggtcgtctcggccctacgtgtagccccacccactacaagtctttaacccggtagtggccccaccctgtctcttccctgaccctcctgcttggcgtctggtggatttccctctcctcaagctttccgcggtgtggttgcctggtttctagccctattaaaggtctgaacacccctaacatacagacacacacacacctgtaggggtcttccccaagttcgaccctaataaccaatgcaaagtgagtttaaaattttttttaatgatttgccaccatttcgaagtcaggcaatttcatgttcagtatggaaatctgcgcttctcttgggcagtcaggagatgtggttacacgttgcggacgcgggtggggctgggcagggaccgttgggttcacgacatttcccgtccccgcctggttcccattgactgcctatgtagccccttgtgccggtggtgagccactgtccactagggggtggcaaaatatgttatttaaaacatggaaatccgttggtgtggcttaaacatgagtctgtggttagtgtggcaaaatcacttgaattgtacattttaaatatgattgaaattgtggtcacgcaaagtggctgacacctgtaatctcagctctttgggaggccaagaagggaggattgcttgagcccaggagttcaagaccaggctaggcaacatagcaagattcccttcgttgttttctacaaaaaaaaagaaaaaaaaaaagaatcccagtgttgtggtgtgcacctgtagttctagctacctgggcggaggcaggaggatcgcttgagcccaggagatctagaatgcagtgagctatgactcatttttttcctgtctcttgtctgatgggtttctcttatttttctttgtttgcttttgagacagtctcgctctaagtggagcttgagtgcagtggtatgatgtcagctcactgcaacctccgcctcccaggttcaagtgattctcctgtctcagtctcctgagtgtgccaccgcacccaactaatttttgtatttttaatatagatggggtttcatcatgttgcccagggtggtctcaaactcctgacctcaagtgatctgcccaccttggcctcccaaaatgctgggattacaggggtgagccaccataccaggcctctcttaagggtttctaagagcatcttaaagaacattacctccttctgacatatcttttatcaagatccttcccggttttttgcttgttttatgtttaatccattttttcttacacaacatgtccttgtatatgtttttttgtttgtttgttttttgagacagagttttgctcttgttgccaaggctggagttcaatggcgtgatctcagctgactgcaatctctgcctcccagattcaagcaattctcctgactcagcctcccgagtagctgggattacaggcatgcgccaccatacccggctaattttgcatttttggtagagacggggtttctccatgttggtcacgctggtctcaaactcccaatctcaggtgatctgcctgcctcggcctcccaaagtgctgggattacaggtgtgctcattacagatgctaccgcagctggcatgtagtggttatttctttgttgagttctcccactgttctgagggttagaaagtcctttcataccgagacatcagacaaacgtttattgaaatgtctcctcacttcttcctagtttgacttttttcacttcatacttctccatctacgaattatgtgtgtagcaaagtgagggtttgtttattttctccccctaaaggcaagattcccaggcaacctggagtatgcaaaagagcataggattaactgctcatagctctggaattaaggcatattaggggaatccttccttggctctggtccttggtttccctcctaggaaacaagttgggtgaattaggcagtctctggcattccaggatttggtctcaggtctaaacaggattttgtaaagtgaaagcagcatcccttggcatcttgggagatgtccctgccctccatggctcgccttctgccacatggcccagcagcagctactctgcagggccatgtgctgccatgacaggtactcatccccacgggcgcgggcctgcaggtcctgggggtaccagtggtcaggtgctttgtacatgcagttcatacacagcaagctagccacactggggggacatggcaggggcagaaaacatgccctgaacactcttcagccattttctggggcattttcactatccccatgatgcagaggagggatgtgaggctcagagaggttaggtaagtgcccagggtcacacagccctacacggggccagactatcatctcaactaagggcagcaagtaagaaacaaaatgtcatgaacttcagcaggggctcagggaaggcttccaggaggaaggggcatccactgtgagtctgaagaacgagagcatgttggatatctccccaacatatccaaagcgtggacagggccaggagcaaggccagcagggagagagccttccaggtgacatggcagcattgctccccaccctgtcccatctcctgttcacctatggtgaagggttgtgcagtctgacccccagagctcatcatgcctctatgggtgttggaccatccagtgatcccaggctctgaatgtgaatccagctccaccaaggaggcactatttggcctcggtaaaggacgccaccatgcagccaccaacctagaggctggttttggctttcatttttcccacccacctccaac

SEQ ID NO: 95920 - DNA, 58321 bp, Homo sapiens
  misc_feature (1)...(58321): n = A,T,C or G
taatgtactttcctcaacagaattagaggttaagacaattgcccaaggtcatagagctggatgtggtggagatacgattcaaactcaagcaatttgattctagtgcccaatcaactatgccacagtgccagagcatatttcttatagatcttcaaatgtgtcatgctctctagcacaccttcagacattcatggtgactagaacactacctacccagttaacttttatgtttttcaaggctcaatctttccagcttcagctgagtgtccctgctttgtttttaacagcaccctttacttccccaaccagggcactcattacatttaacttgcttgtttggttttctcttcctcactaaactttaagttctgtgagaacaggaaacaactgttctgttcactattatatttccagctcctacattggggcagcaggagcaggggcggagacagagggcctaaatacactcataccccacatcaccactttcttccttgaattccagattaaggatgttgttaagtaataatgagtcaataatgtgaattaagaaacattggtacaaattcatgcttttaatttttttaatttttaaaaatataggaatacttttaaattagaatactcctatgaatgtgagaataatttcatgtttgaaggagtatcttctcatatttttttgatgacctaaagaaatttagtgttttccatgaactttgtgaatacttacagcttcctcatctgagactgactttccaaagaatgaaatctcagccattttttattggtatttgtcatttactctggccatctgatttgttgctaaatatacacatttgcatttcataatcttctcttttctcttcctttttccttgtcagtccttaacatcccatcaatatcttttttcttcatctattcagttaatcatgacaagtccttgccaaatcctattggtgctttccccagcataggtttccaggacaagagttcttaatttacataattttgaatcatttctaagatctttaattttttcatttttcatctctttaaatgttaatttgtttctgatcattcctataagtccttaggagtctatgtcagtttagctgtcccttacacatatgttttacagtttttgactctgagcctatattggacaatcttaaaatctgggagtattttaaaaggcttaactaagggtgagtcattacagagaggatccgtatttgttttttccagacagtatggcacattaccaacccgggccaactttatgttaatttcttggcttctggttttttagatcatgtagatatgtaaatttgaaccttgaatgagtgatggcagaccctccagtttcaagttttcaggtggtatctttattcccccacctggagctgtgatgaaaaggaacaaatttctctgtgatctccctttgccaggagggagacatttttctggcccacctatgactgactgtgtagacttttgtgggtcctggctgaatgtggggcaaggtgcttctccaataccatgagttgtacaatttcaagtggaaatacttaaactttattctatgaaaacatcaccccctgaaacacaggtaccatttacctcaactaccatggaatggcacccattgacattgaagcatgtgcctgggaggttacagggatatgaattctatctctctgctttgggtagagagcagcctgtcacctgtccctgattgtgctctacttctgctatcagccaaatgcccccaaaggaaacacactgctagtatactactctagtttcagcctttttattgttgttgtttaactttttagccctggagatttccctgtctttcgtagaagacctgtcatgaatttaatgagctaatgtaatttattcagcatttaggtgtattggtaaaagagattttcaaatattttgtccacctcattgctagtagcaaaacctcctccccctttgttttacatgtctaaatccttctttttcttcaaaagctcaaatgctatcttccacagataactttacctaagccctttgtatgtagaaataagcacccctttctctgagaacacttgactttcacatcttttagagctcattgtctctacagtatgaaaattgaggacggtgtctttagggaataagatccttccacttctctacctaagcatagcagaggaccttacccatagtaatcactcaattatttgttgaatgaacagccaaagcaaaatccttttatttcccaaaactattcatgatttttctatttcagtaaacaacattaccatttttttcaggttatgaggattctaagacttcagaggaatcttaggttctctcttataaagtcctcacatgctgtcaccaagtgatggcaattctatttctacaagtcatttaaaccattcttcttcccagttcacactgtaaccatgtgattctgactttcaattctcttggcctatctgcttttccttccccttcacccattccacctgcattacctaattaacattcctaaagtattcctctgctcaaaactttttttttaataaaattgtgtgaacttcagcaagcttcataacttctctgaaccagtttctcctttgaaaaatggaataatgtgaggctgggtgcggtggctcaggcctgtaatccagcactttgggaggccgaggcaggcggatcacgaggtcaggagttctgagaccagcctggccagcacggtgaaacccagtctctactaaaaatacaaaaattagccaggcatggtggcgtgcgcctgtaattccagctactcgggaggttgaagtaggagaatggaggctgaggtaggagaatcgcttgacccagggaggcagaggttgcaatgagctgagattgtgccactgcactccagcctgggcaacagagcaagactccatctcaaaaacaaaaaaacaaaaaaaaacaaagaaaaatggaataatgttatcaacacagattgtaccatctgctatagcaaccactgctacatgtaactatttaaattaaaatctcgatagattaaaattaaataaaatttttaattcctcagtcacactacccacatttcaaatgctcaaaagccacgtgtcaccatcctggccaacacggtgaaaccccgtttctactagaaatacaaaaaattagccgggggtgatggcaggcgcctgtagtctcagctacttgggaggctgaggcagaagaatcacttgaatctgggaggcggaggttgcagtgagctgagatcgtgccactgcactccagtaaaaatttagaacatttccatgattggccgggcacggtggctcgcgcctgtaatcctagcactttgggaggtcgaggcaggcggatcacgaggtcaggagatcgagaccatcctggctaacacggtgaaaccccgtctctactaaaaatacaaaaaattagccgggcgaggtggtgggcgcctgtagtcccagctactcgggacgctgaggcaggagaatggtgtgaaccccggggggcggagcctgcagtgagccgagatcgcgccactgcactccaacctgggcgacagcgagattccatctcaaaaaaaaaaaaaaaaaaaaaaatttccatgattgtggaaaagttctattggactgtgctgagtagtctttgtacagcttatactgatagcacaagcaaagaacctaacagattgctggtgcataataaatggtagcttttagtattatctgttaaatagtataaaataatacccatttcatagaggtttattcaaggattaaataagatacttattttcagagatgatcagtatgtacttgttcctcttataatgtgaaaaatgaattacctgttttacaacttcacaaaatgttagtcttcagacctgctcatacctgcaccttttgtaaatcctaaaatcgacacaaagaaaataagaagtttttctctcaatccacacaattttaaacatgtacagttttaagtcaacacgccaatattgttcatgggcagaatactaggctacagcattgttaacaggttatttttctttgatgagttgacacttgagttttttacaatgatgttgtaccatctggaattaaataatgttttaattccaggatataaattttcatatgcattctcacatccaacaccttcactatcttaaagaggaaaaaagaaatatcattgcgtcttctcctatagagagacatgaggaaaaaaataatagattattaagcaaaataaagcaattgcaagtccatgtgatgtaaagaacacagctgtgagatgagatatctctaaacacaagtcctacctttactactacccaactctatgatttcaggcaatttacttagcttctgagttacagtactcaaacagttgttccttggagtggagtagaataagcatacaatataataatgatagctgatttattaattatgtagtcataaggccacaggtatggagtacaactttatgtatgatttttttctatgtacgaattatcttggattcgtatctccttaggctttgagagtcccagttgtttaaactgacagtttatagaagcagggcttgaaatggtttaccagtttgcgaatgacaactgaggaatttaaatgcatggactaggtgaggaagactaattgtcaatgtgtttttgcctttgaaacctgaaagcattgctgagtaattgccaaacmaacaaaattagaatttcaatgattcataattcaaaaagcctttcaaaataattgagagtatgcaggaataaatttcacagggcagtaagaatgtttataaaaatgttcttgcaggccgggggcggtggctctcgcctgtaatcccagcactttgggaggcccaggcgggcggatcacgaggtcaggagattgagactatcctggccaacatggtgacaccctgtctctactaaaaatacaaaaattagctgggcgtggtggcgggcgcctgtaatcccagctactcaggagactgaggcaggagaatcacttgaacgcgggaggcggaggttgcagagagccaaggtcgtgccactgcactccagcctggcaacagagcgatactccattaaaaaaaaagaaaagaaaaagtcttgcatctctaacctaacctatcttctctgctctctttgaagttctatgaatcaaaactgtgattacaattttttaacaaatatttaaatacccgtggtaataaaatgaattcctcatgctgtcttcgccaagtggtgaatgctaagaaataagaaaggaaattctggaagttccaagtgaacggtcagaaagccctaagctgcttttagagatgcacagaaccatcaggctcaaatcaaaatataatttaaaaatacttacttttctaaactctaacttggcctcctgacaaacataatattctcctaatggttaaatcctaaagagtctagaaaattaagtttttttataagctgcatcaaatgttacattaagagaaatgaggacaatccgataatgcaatgcaaaatacagagttgcatttggttactgatttataaattaaaatttgggagaactggaaagattatttctacagtgttttgtgtttttcagatgtatcctacttgaaagcacggttgtgaagatacccaggaccagcaatttcctttctgtgtgggacccacccgctgcgatagaattgagtgcagaagactgagcttcgtgtaaacacaaggtcaccagggatcgtaatttcaaactctcccctccccctcgctccctccagccaccaaagtatctgaacccagaactcacaacaggaacgtgtactcaacaggaacgtgtactcaattagcttttgtgggaaagggttgaagattcttggtaactgcttcaacaaaccagaggaattaattagaccgctgattttctccggaagcgcgaagcactaggccgtttgaggatctccgctccgctttgcctgggaccaggaaaagacscgagagacggaactcggcatcaggcactgcttggggcaggaggagagtaggggaaaccaaggaagagaacagaaaggtagggcacggggagctgagcccagctgcactcatccccgcccccggaaacccccgcagctcccgccccaaccagcccccctctggcgcctggcataaggtagcccccggaggcaatgagggccagcaggagtctcgcgcgcctgcgacgcgggtaagggggctccaggctgcgcccacttccccgagctgccagatcccaccctctgacgcacccttctagagggagcgggctgcaagcgctggggcctgtcccttctcccctacttcgacttaccttaccagaccgactagcgctggccgctggcgccgaagcccctatgctaaaaggagacagggctgggccacggggcgcgctcccgagcagaccggccggccccggggcgcgctcacggcaccgaggagcgcgcctgcggcgctgctcgttcaaaccttgttcccctttacggcaatcgcgaaagtgtcgtgaacgtgctgccgccgatcagtcacccagtcggctggagtcggaggcgatatttctaggggtgtacttgttggggtcagggtaaggctgcggagcgcggtcaccggacgtgaaggatttgaagggcgttgtaggggccagtggagagaggactggatgctctggggcgggtcattaggatatagctgtgtatggactcgcgcgaggcgaacgccgtccttcttcctggcgcagggtggcctcgcgcgcggggttgtggggaggcgaggggcgactgcccccttgcccctctgtggagactgcccccttgcccctctgtggagacattggggtggcggagcgccggcgcgggagccggggggctgttgtgtgggagcccaaggtaggggtgggaagaaccgtggagggccagcgctgagcgggccgagggctgggagcgctacccgtgccgaacggaccttgcttgtcaggtccacaccctcctgcccgaatgctggcaagtccacacaccgtgtggcatcctctgccgggtttgtctccccttaggaatgcggtgctgatgtttgtggctgggacgcgcttctggtcagcaacttttctggaaatttcagcctatattgataagctgtgagattgctagctggcgtttatttcagcagcattcttgcaaggagaaataaccaaaagagttgctggtgtttgccagtattcccagaaacactgcatgaacgggatctttagccatgtttaacttgttttctccaattcagtgcttggcattttggtgtcatttttgccattttgcatcattagtattgaatatataattttgcttgaagtcttttaatcagtaaatccatagtatgacagtaggcaaattcatagttgtctttcaacaaatgttagtgtctcgtcttgtatgtggacaaagaataaagatttatttcctactcgaactattaggaatatgtccagtccgtagatgttgagttgaacgacttataacacaagttagactttggtaagggcatttagagcattactaatttagagccattgccattcacataaaattcgagattgaggttctaaaagcatttagtttcctcttcgttttatgctgagaaaaactagttaaggccccctgcacaacttgtctttccaacacatttaagaaataagttagtaaatctaccttatattaacaccaattacattttattgcacaatttctttgttttctaggctttagatttgttttttaagctggttaaaggtgctgatgttctttttgagggtcatgctgtgtttatttttaaggggctagaaaaataacctataaaataccaagcttttgctgatttttatgttgtgtgtgtgtgtttttttaagggggaagaaagtgatttcctcttttaaggagtgcartatttcacttcagcaaaacgctaaatctaagttgtgttacacagccctgtttttgcttccaagtctgctgaaaaggcttttgtttttgtaaacttgctctatgtatcacttgttaaataatgctgaacttaatcctgtgatcctattagttttctttttcttttttttcttcctttctttccttgttctttataatttgcccttcctttctgctagtgtagccatgagtatttttctttaggtagccaattacctgtgaaaagactgtaaacatactgctgaatcagtgcagatcaaaacttggcacccttagacatggcggggatggaaattctggaatttcacacaacaggttgtgtattgtgtaagcttaccttatgcactgctcaggagttagagatttttttttttaatgtgatacttgtcagacattccccatgctaaagtccacacaggaataatgtagcccatatgccattatcctcagctgatataaatgcagccgttttgcatgatagacttttttagtaaaggtattaattaaatatctctgattatactttttctacctttgttggattttccacataaatatttatgcttgcacaaagaaaattctttgtcagaccgtatgtgttttcctagttctcctctggacttacaaaacagtttgttgatagcattcataacttagctgtttctgagaccccaccctcccctttttgagtttcttaaaggtatggaatgttatatttcagcctttctgtttcatcagagtctggaaccactaagtgtttattaaatactagacgaataatatttgttaattgttcagtaagtactgattacctactagcagggtgtggtggcacatgctcgtaatcctagcttctctgtggctgagacacaggaatcgcttgaacccaggaggaggggtttgtagtgaggcaagatctggtactgcctccagcctgtgctacagagcgagatcctgtctcactaaattaaattaaattaaaataagtattgattatctacttagtgctaagtatggtatgagcttgtgggaaaagaatgttaacaagacaggcttggcccatgcacttgtagagtatacacaacagtctgggggaaagaccaaaaaaacacaaacaaacaaaaaaagttcaaagtgtgatgagtgctttaaagggagcagagcactagagccagattttaacagaggaacggagttactgattacaagtgaaaaggctacaatagctataggactgtgacagtattataggactttgacagtattattatgaactgacagcattacagctgatgggaattttatacagtttaaaatattcacttttactattatggtacatgaaaacgtattctcagttaacaaataattttggctgtgttctaaagttacaggtttctttataagcacatcagttgctttccattacatccaagtaaaatgacaactctgcgttaattctccaaacttcattttatcccattcttccatctggtttactcctatccatccatggtgatctctctcgtacctgagcaagacaaactctttactatctcagggcgtgttccattttcttggattattcttcctcctcccctaaaacgtctggctccttcttttcctctgagcttggtatagaagctacttgaagacttcaccctgtttaaaatgtgtaaccccagctattttctagcttagcactttgttttcctcattgtgcctatcacagtgtgtaatytttttatttgcttgtttactagttttwatttcttttcccactggacataggagctgggatcatgtcagcctcattcactgcatttatatgttggctgaatgcattggaaactggtaatctattttcttataactgttaagactggtggctaggtttctaagccagcaataattttaatttcttacttttttttttctttttgktacttgtactgtggtaagaaaaggacattttctgctcatccttttggtcataggcctgattccatataaaaatttcaggtggctacaataacttttgggtttttttgtttgttcctttttgagacatggttttgctctgttgcctgggctggagtacagtggcgtgatcatggctcactgcagcctcaacctcccgggctcaagcaatcctcccaactcagcctcccaagtagctgggamtgcatgacaggccagcatgctaagctaatttttttgtatagatgtggttttgctatgtttcctaggctggtcttaaactcctgagctcaggtgatccacctgcctcagccttccaaagtgctgagattacaggcaatgagccactgttcccaacatagaataattttttaatattctacctcctttctgtattcccaccccacatccatttttcctttctcgccacattgtcctgatcttcctgttgtagccacctaccctatgcggctccattgagatatgcttgcttttcatttgctaaaattcagaagttcctgtcttttctgtaatggttttcatggtcatagcccctggatctcagatatgatggaaggaagagtagagatgaacctgtggtagtgactgcaaactctgtatctatatgaatgtgttgaaagtaaagtagccatctgtaggtcagagactacatgtatctgaatttatatttgcagtgttgttgctaatagcttcacagagacattgttgctgcaatgttggcaaagaaagccttcaaaaactcattgcctcttttcatgtataaatttgtaccgtgggctagatctggaaaggtttgtcaaaatgtagatgtttataaaagagaaatagaaggttaaaaaacaatctaggtcgcagaggggaaaaactgagagggaaagtatcagtttatcaactagtcctgccaaatgctcagacttaaaaccattaggatcagttgcttatagctatttagtgccaaaagcaggctagcactcatctttttttctttacagtaagagaatagaatactgcaacagtaaaatacaaatggaattgactgaatttttaattcccatttcaagtggaattcygtaagagctatcatttaccaaatacgaaaatatatcattgctcgactatagaaaatttggctactatgaagctaagtgtattcgtggttattggtctctcatttgatctaaagtgatctcgtcaccagttatttaatattatataaacattactttaaaacagttttaatcagtacctttgtgatacagttgtgtgaaagaattcctcaaaatgtaagaaattagcttkgatttctctccttgatttgaaatattaattttttttttttttaagacagagtctcgctttgtcactcaggctggaatgcagtggtgcgatctcggctcactgcaaccttcgcctcctggggtcaagcaattctcctgcctcagcctcctcagtagctgggattacagatgcctgccaccacgcccatctaatttttatatttttagtagagacggggtttcaccgtgttggccaggctggtctcgaactcctgacctcaggtgatccgcccgcctcagcctcccaaagtggcgtgagccaccgcgcctggcgaaatattaaatatttttatttcagggcatctcagttggttaaattgtggcactgatgagtctcttgagatttttgaaaatttatttaagggcattaacttgactataatgactattttctaaaccaaatattgagatacgtgattgacagaggttttggatgccaccttaggtcattagtaacattgaaattttggaatttgatatttatagggatataggaaaaaagtcctgttccattgtgttcacatgtccataccaggctgtggggtgagtgtccccctggctggtacctacttgtccatgtggttactcatgagctgagtgcctacatttcatgttttgtggcatgtgaccctgtgctccacttcccagaatgcacatgtggcctgggttcatagtcctctagccatggccgggtctcagttcagtgccttccatcctgggcagcaggagcaccatgttgcagtctaccacagctgcctctgggccttggcctggcttcactgcattccagcgctgcctcccctccaccccagacaggggggaacctgccactctcaggaccaccctgcaaaggcagaataaaccagatcctctcacagcaaaaaaaagttaaaagggacaactgagcatgttttgatagtagatctattgtcgagatgtcctagacctataccatttctgggactttgattctgctttgtggatagtttccaaccagaagatcaaaacatacctatgccactaatcttttttgttctattaagattctttcttttttttttttttttaaatggtctctgttcctcctcctcctcactatggtaagtttctcacaaggttctttattcatttttttctttcaatgcttaatccctttgagaacttttctactttctagtttttaaccagactttagcttttaagttgatgacctgaacttctcactcttaccaaaactccagttttttgattttgtctaaaacatctctacttaaaagtcacatgtatatattccattcctaccctcatccctagttccctttcacccactacaccccaaaagccaaaaaataacaaactgattttcttttccaacttgcccttttgacaacagtaccagtaatctctagctgttgactctttttttcttctgtttcctcacctctcatatctaattcttaagtactttctgctgaatcttccatctaaatagaaattacttatagatttgactgtctttcatattttcatttttaccatcctactataggccctcaccacttcaaaccattgagatcactgtacttactaatttttaattgttctattttctccattctgattcatcttgaaaatactcttgtatttcctcatgctacttgattacttataattgttatctctaatcttttctaaatgaaatacaaatacttcagggattaaactcaaggtcctttrttagcagtcatcacttaacccacttttactttttttccttctacttcctcagttcatcaggacactctgctaatacatatatactgtcttaaagttaatttttttcattgttgtatatctccaccgagaataccgtctatattcgtttttaccaataagaagttttgtcttttggtttaatttaaacagaaaccctgtgtttgtttgaatactacttggtttagtttaaacagaaaacctgtgtttgtttgaatgctacttaccagctgtgtgatttggacaagttaattagcctcactgagccttagtttatttttctgtaaaaatggggataattaatagtccttgccttctagggtggttgtgaggattaaaggagttagtatataaaatgtgcttaagttttgtaatatgaagggcatgcccaataaatgttagctattaccattaaataaaaatctagtttaagactcattgaagtcattcctctgatactaatactaatttgctagccttgggacctcagtttccgtatatgtgtaatgatgagatgatttctaacatttgttgcattatacaactgaaagcagtgtgggatggaaaaagaatatgagcttcaaagtcagacagactatcagataataggaagcatactactattaaagtctcttactattttttgcttaaagttgaggttatacactttcaataagaactagaaccaaaatcaggtccctccttttctggtcctgtttgatacttactactttattgacaatttgattttttgtttcctaatttgttaatattggcataagatgtaaatagtggccaacaagtgtattttttaatttttattttattttattttttaggtaagcaccagccacaaaaacctacaaaagaagggaaattactgtctttaaatattaaaaaaaaacaagatccatgagtgggcatcgatcaacaaggaaaagatgtggagattctcacccggagtccccagtgggcttcgggcatatgagtactacaggatgtgtattaaataaattgtttcagttaccaacaccaccattgtcaagacaccaactaaagcggctagaagaacacagatatcaaagtgctggacggtccctgcttgagcccttaatgcaagggtattgggaatggctcgttagaagagttccctcctggattgccccaaatctcatcaccatcattggactgtcaataaacatctgtacaactattttattagtcttctactgccctacagctacagagcaggtaagagtttcttaacagatctcaacatttgctatataccaaaaacgttgtaattgggatcgtggggtcattttaactaaagataaagtaatctgacagctgtcaactattttaaaatatcacacacactgtgataaagcttgtaagtacagcctacacacttgcttattggaaaccagaagcaaacggtagactgtgatcctagtgcttaaattaatgttagcagggattaacatgtaaaatgttccttttaaagtcactaaatctcaattttttacaaaaaagtttttcatttttttaaatggtagaataaagtcttagcaaaaaaaaaaamaacagtgagaaaactctctggtatttagtatggcatgactgtaaactagccttatcaaaaggttttttttccattctagtgagaagtgttaaatttcccttctctcttcctttaaacatgtatgcctgaagacttcgggtatatggcttattcttctaacaactgtggcaaaggaagtgtaagaaaaagtcaatacaatgtatttcctattctgtatcctgctctggctaccattaagaaaggatgcatgctattgcttacaaagactcacacaggccttctcagatccaagcctctcttctaccgttaccctctattaccctctgtactcattacttgaaaccaaaactagaactctttatcagaatagatacattgatatttatttctttggttttaaaatatccttaccaaaacatgaactaagctagttaggtagatgagagaattacaagcatttgttctgcctaaataagttagactgatcagtttctggtaattcargacagtagaaggtaattctaactaaacatttcagagtgattctgagctaaatgagatggtaatggccacaacattccttaccttgttttaagcttgaagtaattttttttaagtaatcttctcagattatttgtcctttgagataaaattaccaccattcaaccctctattcttttctgttttcatcaatttgtctgtttccataggttaaataaaagccattaaagtgaatggctattgagggtcacctttaccccagaacatgtgatttctgttattttccaggttttcatttcccatcacccttaattcctcttctactattrcaaatacagtccatacagattttatagatgtaaaatctggtttctcctcttttttttttttttgagacagggtctgcctttgtcacccaggctggagtgcaatggcactgtcttggctcactgcaatttccacctccagggtttaagcgattctcctgcctcagcctcccaagtaactgggattacaggcccgcaccatcacgcccggctaatttttgtatttgtagtagagacagggcttcaccttgttggtcaggctgctctggaattcctgacctcaggtgatccaccaaccttggcctcccaaagtgctgggattacagtgagcaactgcgcccagctcccctcctctttttaactctcttcctgttgctcagttaggatacttaaaaaacacaaaccagtacattatttaaatgtgtccttggattctttatcacatatcctttaaattgtttcacttggggcttgtctgagaatttgactgctactcccagaagggtttggtccaaatcacacaaatcattagagatatagtagaacaacagggaggtggattgattccagtggaagacctccagtactaaactagttctaggayggggatcaaggagtgmgagcaggttcaaggatagttcagccactaatagtcatttatggaacaccacagagtatatcaggtaatgtgttcccctgtaatactttttcttggcctctgttcttaagtgatttggaatgtatgaataacccaagaattagttaaatctttagggagacttccagaatggaagctattcttttcactagttgtgatggttcagaatggctgctaggaggaatcagaatatgactgagctgctgcttgttgttctgcaagggaagataatgtcctacaatggagatgcctggatgcatttttagctacgaggtagctatccttattaggctcaaagcagaatgcatttaaataggtcttggttgttttctatgacaagctgttatctctgtgatcttcagtaagataagtaaattttctaagtcaccctctttaaatcttattttgtggtatgatgatcatacattcagggtacctagcatataatgttcaaaatagtagatggttattgtttcattgatcaaaaagattaggtatataatctrttcttccacagcccccttcccattcgtgatttcctctaatgatacataatatttccagttacaaattcatctaagtccttatttcttttatatttttctttatcatcatgttggagtcagagaatttcgtaaattttatcacccagggaaattctccttcattgtatctctgattcttttgggccttatgccagtggatgatcattaagtttcatgtctacatgtatagtattacgaacttcccatatattttttatgttactgattttttaaaaaatgtattagagtttcagacaccaatctttctggtagaaaggaaggtcattattataatagtttaagctcagtttgtttcttttcttagaaaaagcaatcctcctagtagataagaaaataagttagcttttatttttcacattcttagggtagaaatacagacttctctctttttatatggagagccaaaatttccctttgatctgttcattactcagtatttaaacttcattagctagtagctttgattttagtgtcataagttaatttggaatttgtcttgcaacttggtatatgttaatatacttgtgttcaccttgcctccatccacaaaaagagttggactctgtaaaatatttgaagagatttattctgagccaaatatcagtgactatggcctgtgacacagccctcaggaggtcctgagaacacgtgcccaaggtagtcagagcactgcttgtttttttttgtttgtttttttttttttttgagacggagtctcgctctgttgccaggctggagtgcagtggcgcagtctcggttcactgcaacctccacctccctggttcaagcgatttctcctgcctcagcctcccgaatacaggactacaggcgcacgccgccacacccagctaatatttgtatttttagcagagacagggtttcaacatgttggccagaatgatctcaatctcttgttcttgtaatccacccaccttggcctcccagagtgctgggattacaggcgtgtgccaccacacccggccagcttggtattatacattttagagaggcatgagacatcaatcaagtacatttaagaaatacattggtttggtccagaaaggcgggacaactcagagtggaagggcttccaggctgtagttgaatttaaacattttctggataagtttgtctaaagatctgggattgatagaaagggaatgttcaggttaagataaagattgtggagaccaaagttcttttgaagtcttatagtggctgtccttagagacaatagatgacaaacgtttccctttcagatcttagttaatctctttaggattgggacagtctggaagaaaaagatctagctatgttaatagaggttctttacagatgcacattttcccccacaaagaacagctttgcagggccaattcaaaatatgaccaagaaacatgttttggggtaaaatattttgattttcttccttgtcttgtattgttatgccagagtcaggttggaaagtaaaccaagatatatagggttaaataaaacccatctgatgagaatttatgatttgtagggcatgactccccagaccccttagatacgaatttgggcaaggtaaaaatcaacagtttagtcctcatcacgtaagacagaaaaaggaagttggtgttaacctgtattatacccatgaaaaccagaaatgccattatcagaaagagtcgtgtcagatttcaatataactttttgaaatatcatgagttgtttaaacactcatttgtttttgtttttatattgctagttttcatgcttttgattcacctcactaaaaaataacttgttagatttttttttggcatagaaaagtgaaaagaaaattaaaacggcacattgaccataatttcactgcccagttaacttatgttgacattgaaaagtgaaggggaaaaaaattacagagttaaaaaaatgcaaagagtggcataaaacaaaaagtaaaatcttcccttttttatctgcctttccttcctacccctcaccctaacctctctcctcaaatgtaataaagtttaacagtatttttgtctgacaaatcacaccctaaattttattgagtagaaaaagcaacatgtggaacacacagtacaccatttagaaattgtttaaagtatgcaaaataagtctttattgtttaggattgcatatatatgtaatcaagtctaaaggcaaacataggaataataaagactaaattcaggttagtgggtacttttgggggagattgcatgatgaattggagagagctgttcatggaactccaattatgctttttaagctgagaggtttgtcaagggtgttcatcagatttttaaaaactttttgtatgtttgaaatagtaataaaactcatattgtacctgcccatatatatgcccgccaaaatcttaggagtatttttttccttctgattgacacataataattatatatgagatacagtgttatattttaaaacatatatacagtgtataatgatcagatcagggtaattatgtctgtcacctcaaacatttatttctttgtgttaatattccagatcctctcttctagctttttgaaaatatacaatgcattattgttagctatattcagcctacattgctgtagagcactagaacttactcctcctacatagctgtaactttgcttctgttaaacaacctgtccctatcctcccctcctccttacccatcccagcctcttgtaaccacaattcttccctttacttctatgagcattttttttttagctcctgcatatgagtaagaacttgcagtatttatctttctgtgcttgatttatttcacttaacatgatgtcttccaggctcagcacactgcaacctccgcctcccaggttcaagtgatgctcctgcctcaacctcccaagtagctggcattacaggcatacaccgccatacctgggtaattttgtatttttagttgagatggggttggtcagcctgacctcagataatccacctgcctcagcctcccagagtgcttggattacagrtgtgagccaccacgccctgctgtctctactttagtttttcttgcctgtgcttttgagatcttagccataaaatctttgcgtagaccaatgtactgaagcatttcccctgtgttttttctagtagttttatactactaggtctcacatttgtaagtctttaatccatttgagttgattcttgaatatagtgagagataggggtctagtttcatttttctgcatgtggatattcaattttcctagcaccatttatttatcctttccccactctatgttcctggcatctttgtcaaaaatcagttggctgtaaatacatagatttatttctgggttctcatttctttgggtctgtatgtctttttataccaatatcatgctgttttggttactatagctttttagtgtattttgaagtcaggtagtgtgatgcctccagctttgttctttttgctctagagtgctttggttattctgaggtttttgtgattccatacacattttaggattttttttctatttctgtgaagaatgtcattggtattttgatagggattgcattgaatctgtagattgctttgggtagtatggccattttgacaatattaattcatggacatgggatgacttttcattttgtgtgtatgtcctcctcagtttcttttattagtkctttgtagttttcattgtggagatctttcaactccttggttaaatttattcccaagtattttattttattttattttattttattttattttattttatttagctgttgttaatggggttgccttcttgatttttttccagctagtttgttattggtgtatggaaatgctactgatttttgtatgttgattttgtatcttgcatctttactgaatttaacagttctatgagttttttgatgcagtctttaagttttcccatatataagttcatataatctgcaaagagggacagttttgacttcctcttttctaatgtgaatgccctttgtttctttctcttgtttaattactctagctgggacttccagtactatgttgagtgtggaaagtgggcatccttgtctggttctagttcttagaggaaaagctttgaccatttccccattcagtatgatgttagctgttggtatgtcatatatggtccttgttgtgttgaggtatgtttcttgtatgcataatttgtggtgacrttttatcttgaagagatgttgaattttatcaaatgctttttctgagcctattgagatgatcataggatcttagttcttcgttctgttgatgtgatgtgtcacatttattgatttgcatatgttggaccatccttgcatccctgagttaaatcctccttcatcatgttgaataatctttttaatgcgccgttggatttggtttgctagtagtttcttgaggatttttgtatctgtgttcatcagtaatactggcttgtggttttcttcttttattgcatccttatctggttttgatgtcagggtaatgctggtttcgtagaatgaattaggaagaattttctctccagtattttggaatagtttcagaagaattggtgtagttctttaaaagtttggtagaattcagcagtaaaggcatttggtcctgggtttttctttgttggaaaactttttaatatttattcaatcttgttatttgttattagtctgttaaggttttctatttcttttggttcaatctttataggttatacgtgtctaaaagtgtatctacttcgtctaggttttccagtttgttggcatatagttgttcatgacaacctctaatgatcttttatatttctgtggtatcagttgtaatgcctctttttttgtgtctgattttatttatttgggtcttctgtctttttttcttggttattcatagctaatagttggtcaattttatttcttttcaaaaaaccaacttttcattttatcatttgtgtgtgtgtgtgtgtatacacacaacatatatgacacatgccatgtgtgtcatatatgtatatatacatatatatgatatatatattcacttttttgggggttttttttgagatggagttttgcttttattgtccgggctggagtgcaatggcatgatcttggcttactgcaacctccgcctcacctgggaggcgatcctcctgcctcagcctcccgagtagctggaattacaggcatgcgccaccacacccggctaattttgtgtttttagtagagayggggtttcatcacgttgaccatgctggtctcaaactcccgacctcaggtgatctgcccgccttggcctcccaaagtactgggattacaggcgtaagccaccaagcctggccagattttcatgtacatatataacccacacatatgtgtatatgtgtgtgtgtatatgtatatatatattctatttcatttagctctgatctttatttcttctaattttggatttgatttgttcttgcttttctggttctttgaggtgcattattaygttgtttatttgaaatctttctacttttcagatgtgggcatttattttgctttattctttcctcttagtacttcttttgctgtatcttgtaggttttggtattttgtgcttctgtttttatatttttcaaaaaatgatttacttcttaatttcttcatagattcattggtcattcaggagcatgtttgttaattttcatgtatttgtacagtttgcaaagttcctcttgttattgatttctagttttgttccattgtagtctcagaagatacttgaaatgaccccaacgcaaatatttaaaaatttgttgagacttgttttgtagcctcacacatggtttgtcctggagaatgtttcgtgtgctgatgagaagaatgtgtattctgcagctatggaatgaaatgttctgtaaatgtctgttaggtccatttggtctgtagtgcactctaagttcaatgttactttgttggttttctgtttaaatcaggggtgtctaatcttttggcttccctgaaccatgttggaagaagaattgtcttgggccacacataaaacactaacgatagctgatgagcggggaaaaaaaamtcttataatgttttaagaaagtttacaaattgatgttgggctgcattcagagctgtccttggctgcatgcagtgcagcccacgtgccacagcttggacgaacttaatttagatggtctgtccagtgctgaaagtgaggtaacatttaatagtttttctgatgtatcctcccagaaaaagaaaaaaattactcttgtactagcatgtatatatatatttgtatgtatgtaaaatcttcagttctgtttcaaaagtttagtaaaaccatatgtttcttggaattttttacctgagttgactcatataacatctctgcaagattttacaagttggttaattgctacattgtgataagattatttgtttatgtcagttctttcccatamacttatcaggacataatgagttctgaatgatgcatgagttccttcattcattcagtatctcccccagggtcttacggcaactgggatcatatttattcctgaattaggctttcatcttaaaatacctctgagaagtataaaataatgtgcacaaggaagaagtatataaatattagtgtatcattgtgcarattcacaggaagaaaggaaaatccaaagtcaaggaaactttttatgtctgtgattgttattttactatttcctaggattgtgtatatactagttatctttgctccggagcaacattttgccccattaaaatcttaagcttggaccccaagaaacccctagatttcttgtcccctaaagcagaggtattcagcagaattttctatgaagatgggcatgttctakgtctgtgaggtccaatatagtagccatagctacatatggctattgagcattcaaaatctacctagtgtaactgaggaactgaatttttaattttatttaatattaattaatttcaaatagtcacagatgactgatggctgctgtgcaagatagcgcagctctagagagttactggattcctttaggagcaagaagcagtagacccaaagtccagaagacagagttcttagtcatacaggattaattactcagttcagtgtgcttgcatgtaaagtatggttccataatcatatttattgctttcagggtttataactctggcttagtggaggtatgtgctagctcctttggataatctcagtgtcttaaaagacggaactcaaaaaaggtttatgaaaagatccttaccttttaataactggtactaaatagatctctatcagagagaaactcctttgcagtacagaatatactgaatgttatttgcatctctgagtgtttaatattcacagtgtaacttgataaccaatatacagtaaactaccttgtgattataaaaagtattttatagcctgggaaggggaaaataatgaaaagtgatacaatatactcttccacattcttaaggataaatcaaataagacctcttctttttgaatatacatttaaattcaataccaggcygggtgcgttggctcacgcctgtaatcccaacactttgggaggccgaggtgggcggatcacttgaggtgaagagttcgacaccagcctgaccaacatagcaaaaccttgtctctactaaaaaaaataaaataaaataaaaaattagccaggctttgtggcacatgcctataatccagctactagggagggtgaggcaggagaatctcttgaacccaggaggcggaggttgcagtaagccaagactgcaccactgcactcccagcctgggtgacagagcaagactccatctcaaataaataaatwaattaattaattaatttaataccagcagttcaatttctgtttgggaaaagagaagctattccttgaaaacgtgactgtggatttgaaaaatagtattctgaacactctatgcactggatatcatttcctagtgttatttaatggcccrttgaagagatgtttaaaaatgttacaaactcaaataaatttggaaaatggcaggacattatgtccccctcttgaatattcacaggatgtattagcaatattaaggactagaagaagtcctgtagtaaagaaatccatttaacattgtttagtgtttaacccagtgtttcccatatgaggttagcatggaatttttcatgtaatacctgcaaacattttgaaggatatgattttggaaaaaattcaataattgacccttctaatctaaagaatcttatggaagacacctagtccaatctcttgggatttttgtaatctcccttgtaagttgttatctagcatctgcctgaacacctctaaaagcaggaaatttaattcttttacaattctttttttttttttttttttttttttttgagacggagtctcgctctgtcgcccaggctggagtgcagtggcgcaatctcggctcactgcaagctccgcctcccgggttcacgccattctcctgcctcagcctcccaagtagctgggactacaggcgcccgccactacgcccggctaattttttgtatttttagtagagacggggtttcaccgttttttagccgggatggtctcgatctcctgacctcgtgatccgcccgcctcggcctcccaaagtgctgggattacaggcgtgagccaccgcgcccggcattcttttacaattctaattgtttcagtgagttcttcattatgtagcacttggatcttctctcccatagcttccaactagctttccaacctgcaggtaaaaatatgttagtcaaacatggtaactgtgtgtctgaatactcttgcctttcttattttatttcacaggcacctctgtgggcatatattgcttgtgcctgtggccttttcatttaccagtctttggatgctattgatgggaaacaggcaagaagaaccaatagtagttctcctctgggagaactttttgatcatggctgtgattcactatcaacaggtattgttgattttttwaatgttattgattattaacaatggttaaaccagtgtgctaagcagtgttagaatacatgtttagtcatgagaataagtaattttgtattaaattttagtatttctcaaaagactatgaacctagttaatatttgttcattattggtagtgttaggaaatttagaaattactttctgcttgttatttttagccccaaatattgttttggcatcttttgtttttaaaagcttggggcataattgtcaccatcaaaactcttatgaactaaatgagagtacagtggtgggagactagttaggtaatttgtggtcttcatatatttaaatgaatgttatgtagacattcagaattatgttaatggacttggattataactaygtcataagaagctcagagaaagactatgacaaattaggagtatcgttaatattgcattgtgtactggaaatttgctaagagagtacattttagatgcttttaccacaggagaaaaaaggtaactatgggacatgatggataggttaatttgcttaactatagtaatcatttatatatatggcatgttttacacctcatatacaatttttaaaagaaacactaaagtgctagcaataactgagttactctgtttggattataagtgatatctctttatttgcactgttttgcaagtttttaaaatagtagtttattatgtttttagagaggaaaaagacacttaaaatctaaatgacagtttttcagctagtctttctgacaggaactcatccctcccctcttttatttttgttttatttagtttctcaattattttcttgtttgacatggcacttaaaatatttaaaaagaaactaacaaaaaccccttatagttttacctcctgaatccacatttacaggtataggtgcatatcaaaatcattgcttcattgtatcccaacagcagcttatttagtagaggaggagaagcaactaaggtcatataattttttaagagtcaaatcaagaaatactcaaaacttctgttgaataaatggtagttggctgtcttgaaaggcaacaaccagctgactgcaggatggcaggatggcaggcttcctattatttattttaaattgcagtcatttttgcgttgtagtttgaggtctagacttttataggaagtctttttctatgtatgtcacccataacaatatctgtttaaaaaaaaaaagacagttatcaatctgaagcaagtaagtcggtccgtctggggattatatagcccctttgtttttcttttttggctgtctgccttgtaatgatttgctgatcattagtactagtgtctctaagtcaggaaaatactcgaagaaatgttgaagtattttagttgccttcaagaactttgcttccactaagtgatttggtaaaaaaaaaaaaaaaaagagagattgaaattatggggtaagagattatgtaacagattatatcctacttttctgttacaatagataactgagagaagattatgcatttacagcatatctttttgtctcatctaaaatcatttccagctcagttgtttgctattcatattatttggttttcatcgtgrtctttcttctgcagtttttgtggttcttggaacttgtattgcagtgcagctggggacaaaccctgattggatgtttttttgttkttttgcggggacatttatgttctattgtgcgcactggcaaacgtatgtttctggaacattgcgatttggaatgtaagtaatacttaatggtaatttttgttttctctttcacatatggagaatgttgccttataagtatttgagtattagaaattgatcaaatcactaagttagtttaataaattaaaaaatttatgcttcattattatagctatttcctaatagtctctgcatatgtccctstattatacttttttaaaaggagatatcagaacctcccagccagtattttaaaagcaatacaaaaagcagtagcccctcatctttgtctttcccacagaaaaattcactttttttccccaccattatttaccttaattccatttttattttcacatataaaaatgcatttccaggaaaaagaagatggtttctgagagcagcgccctaatccaatattaatttttagtgtttctactattttcaaaaatggcagaatttataatatctggatttcacatagtttatgtttygttggttattatctcacagttcactttcaatacctattttgaaagcttatttatctgtcagccctaatgtattctctttccctttcaaataatacatcaccaaccatatggtgtgggaactgaaggaaggaaagaaaattaaccatggatgtaggagaagagtaaatagtgtttttagaagtgatttgatatcacagctttctgtcttccagtctttgaatttccctcatgatgttgtcctgtgatgaagtatgtatttagagaactgtaaacaactccatatggttggatgataagatgcctgcctgtagggagtggcaggagataaggctggagaagatccagaaaatcaaggtcctgtgctctgccaagaaatatgagcttttaccctgaatctgcagggaacttttgcaggacstaaagcagggaaatgacaaaagtgccttttagaaagatcagtctggcagtaaggcagagggtaaattgtagtaggctgtgacagaagcaaggagacccgttagaggaagcatcagcataattaatstgaatgatgaagcatgcactaacacaatggcagtgctattgcagagcaaggaataaattggagagagacttttgaggtagaaactataggacacaatgtgtgtttggatgtggggaatgaatgagagggcagagactgaaatgactcctagttcccttccttgggtggctggatgaaggtagagaaaggcactacaggaagaggaacctatttaaagagagcagtctacccagaaacatatgtgagggattttagacatccaaataaaatgagaacaggagaaaacttagagaacaagcttagaaagaagcccatgaaatttattgaacagccagagtagtaggaggcgtactggaatataaagccagaaggatgcatttcacaaaagaacattgctaaatcctgccaagactcaaaatgaggacagaaaagtgtacattgaatttggcagtgtgaactattcatagtaatttctgtgtaatggtgagacagaagccagactgtaggggataagaagtgaatggaacaaataagtagactactatttattacacattatatatcgttacttataaaatgtgtgactgtgatgtgaaggagagaagcattggttagaggagagaatatgggctcaaaggaaggagggtcttgtatttttatgagaaaattttgagcattcagaagaaatctgctagagaagagattgaagatactgaataaaaagagggaatgatttatagaacaatagctaaagatataggaacaaaggagttctagggtaaaaggcagaggcattaaacaggaggaaactctgccactgacactagagtgcttgcaaggcttggggttgggggcggggggaaacactagatatattaagattagtttgaatttaatatatgaacttgaattttagtattacaagggattagttttaatttgggaaattgtatccaattttcagaaattctacatttgcattaaagcagcaccaaatttgttttttaaattaaaagcaggctataatgttcatagaaatgtgctatggccaggcacagtggcttatgcctttaattccagcattctgggagcccgaggaaagaggatcacttgagcccaggatttcaagaccagcctgagcaatatagacctggtctctacaaaaaaattttttaaaaattagccaagcacggtggcgcatgcctgtaggaggatcacttgcgccctggaaatagaggttgcagtgagctgagatagcaccactgtactccatccagcctggcaacagagcaagaacatgtctcaaaaaaaaaaaagaaatgcaggctaagtgctctacactagggagccatttatcaaaataacaatgtaatggaggcatatagaataaatagagatatacatatagatacatagaatctatagaatacatatagatatccctaaagacttattgcagtttgtatgcatggaggagaaagtcaaaatttattttgcttaataaggagggaacaaggtcagctctgaaatgtagtttgagtaaagaaattttttaaaatcacttgcattttcttactgttttctagaaaaaagtgaaagcagatttaagtaccttaggaatcttatttttaaacatgcttatttatttgaattgttttattttgatgtttacatacataagtgaaaataatgagaatttcttttttatttataatttaggttgttatacttttaataacttcataaaatagaatgtttgccagataagaattttttgttccttagcctctttattattactgtttttaattgctattaagtttgcttatagtatcttgaacaaaaatagtcacaggattttaattcatctgtaactaaataattctcattaaagtctagccttttgagaaagcagatgtgctttggatacatcttccctgaaattatgagctacgtcttccagcagtttgctctgatcacagctaaaagctaccttgcacagagaatatgagtgcctgtcatgtctagacagactcctgttctcacagtgccgctggattgagcaagtagagatctgacagagatgactagcctggataggaaagactggggaggaaaatggggttagaggctagaatttcatgggaggattgggttgtagaagataaatatgaattgaagctcatctttgcaaaatactctttaagatatttatatcttaaattatactgaatatctcccattatactgaatgggagagttcacattttctcccttaagacctaaactatctatattaggatttttttggattgttttgttttgttttgttttgtttttgagatggactcttgctctgtttcccaggctggagtgtagtggcacaacctcggctcactgcaacctccgcctcccgggttcaagcaattctgcctcagcctcccgagtagctaggactacaggtgcgtgctgccaccatgcccagctagttttttgcatttttagtagagatggggtttcaccgtgttagccaggatggtctcgatctcctgacctcgtgatctgcccaccttggcctcccaaagtgctgggattaggtgtgagccaccgcacccggcctatattaggttatttttaattctataacttgtagacatatatatatagaatcatttctataagttaaatgcttagaaatcctaatcaatctttaataaaactatacttacataaaacatcggtctttttttttttttttttttttttgagacggagtctcactgtgtcgcccaggctagagtgcagtggtgcgatctcgactcactgcaacctccgcctcctgggttcatgccattctcctgcctcagcctctgagtagctgggactacaggcacccgccaccatgcccggctaattttttgtatttttagtagagacagggtttcaccgtgttagccaggatggtctccatctcctgacctcgtgatctgcccgccttggcctcccaaagtgctgggattacaggcgtgagccactgcgcccggcctaaaacatcggtcttaaaaaaaaaaaaatctatgctgtaaaggcagaactcacttaaattatttcaggagcaaaatactcttcaattattttttccaagacaaaaaataataaattgaacttgggccaatatatgttggctcaaatgttaatctctaagttatcttttttatatatcagcttgggcaaggctcgtaactttcatgggcctcatttcctaatttgtaaaataagctttagatgatctataaggttctttctgtttataaagtctgtgagtctactaattctacacagatattattacaagtgtacttatttataattacagtaggcagagtattaatttttgcttttattacatttttcaattcatgcttctaaagtttcacatttatattagctaaaaaccctgtcaccaaatgtttatttctatgtaagtaagtagcttcccactctttcttttctatagttaaatgaaaaaagttaataggctatgtattccactaggtagtctgacaaatttagttcatctttttgtccaggtgatttttaaagaataattatttgaagacctcttgataataaaaaactgttgtttgttaatgtataatccactttctatggattcagaattgggaaactttctaatccctgcgtagaatctatttatctttaaatgtctaatacttatcacatgaattattaaataccagaggttttcctttcagtttccaacttccctgtgtagctttttttcagcaatgatttgttcatttgggcctcagctccgttcgtttaattttatcagttgccatagatgatgtcctaaaacaaccatttgtattaatgtaaaacctagattgcagtttggcctctcagatcaccaggtaaaatcatggacatctatctatctcattagcattcctcagttcttaatttttatttaagtagtttttatttgaagcctagtctatactgctactgttttgtgtgttatctgtgtttccaaactttttaagtgattgaactggatgttttacttacttttatcactagtaaactaatccaatgtagtagagtattataatgctggtgtggaattagggaagagaaagaggaaaaaggaaaacttctggactaragattatcaggaaataggataaggagatggccaatttgatttttgctctaaccatatccaaatagaagttactcttgattagattctttcccacttaccctttccacatatatgctagtttttttgagatagcagaggtaggagtgtggtgaggcttgggacagggaaggagcgtaagatggattagtgttttttcaaaatgtacattgggacttctaagaagaattcctatctacagggaagtctagatcagttctggtgctaaagggatttatgtcatagtgtaattatttggcaagtaatattcaccactactaggtaattagagttgattctgtgattttagtattagtgtttccagctgcctacttaaaagtcattttttcagtatattacagttttaatttttttaacttctatcttgatttggataagaactatgtatgtatgtataaggatagtatagtactgtataaattgtatcattccatctttaggtgtctttgcaagaagaatgctactttttaaatctatttttgttacctgtgttagtagggctctttagcaaaagttctgagtaaagttattttgaaatgtttgtttccttatgcatagattcgatgttacagagtcccagatcataattataatatgccagcttctcacaggaaccctggggccttggttctggaacttcacggtaactgctagaatattcatgctatctgatgtacaatggtgtgaattcaataaagacagcacctttgtcatgcacagaataattaaaacatgaaaaatcaaaagtcttcctgttggtatgtcacaaacaggttattagaaaacataattttaatatattagggcaataaaaatccaccctattaaataaaatttttaaaaagtggtatttctggtgatttgatgctaaagtcaattctcctgtttgcctattgtgcctattatttttattctatgtactattttttaaaacaaatacctttccaccagtaaatagaattttttttatatttctattttgaaaacagaataaagcaagcagagtttttcttaggtaaggaagttgagatgattctatattaatgtaggaaagattctgcttattctgttaacttctttagcatatactttaagcagtctagtactagttctgcttgagtttacagcagtcttggtgttgtataatatttatgctggaagctattctcatttctgtttgttttgcttaatgtttttcactcttagttgtgcttttgaaactaaatatccttagcttttcatgttactatagtcattctttgaatactttccttttttgttttgttttcttttcagtaaatacatatttctctaatgtactgctaaaagtaatgtatctttttccttttttttttttttaattgagatagagtctcattttgtcacccaggcaggaatgcagtggcacagtcatagstcactgcagccttgaaactcctgaactgaagtgctcctctcacctcacctttctgcactgtcacacctggctaattttaaawtttttttttgtagagacaggtcttgctgtgttgcctaggatggtcttgaacttctggcctcaagtagtcctcccgcctcagccttccaaagcactggaactacaggcatgagccactgcattcacccttctttcttataactgcagttttgaccttatgacttttaaaaacattgttaggaaatgttttcccagtaagatagtccagaatcattcacactttagcataagaaaaaatagsgcttagattcagtttatttggcagttcagagaatgttggagaactgttcaaatgaaaacctgacagatcattatatcaatgcaagggtttattaagtttcctacattaggtcgcctgccctgaaaaaaaaaaagaattgtaaacattttaatattgcttcaataatacagaaatagtgaattccttgttggccaagttctttggttctttttttttttttgaggcggagtctcactctgtcacccaggctggagtgcggtggagctatctcagctcactgcaagctccgcctcccaggttcacgccattctcctgcctcagcctcccaagtagctgtcactacaggcgcccaccaccatgcccagctaattttttgtatttttagtagagacggggtttcaccatgttagccaggatggtctcgatctcctgacctcgtgatctgcccacctggctgagttctttctgaaaagtatatttcagtgttgtaaatccagttattcagtggcagtaatgatggctttgaggacaaattcatagggagggatattctgcatcttttttcaaaataaccttggaatgtggaaaatacagttgtccctccatatctgtgaggaattggttccacaatctgcaaataccagaatgcagggatactcaggttcctgatataaggtggtgtagtatttgcatagaacctatacacagcctcctgtatactttaagtcattctacgttacttatacctcacacaatgtaaatgccaagtaaatagttgttatactataatgtttagggaataatgacaaggaaaaaagtctgtacgtgttcagtacagacacaacttttaatatttttgacctgtggttggtgtaattcctggatgcagaacccacagatagagagggccgactgtactaagaagtgtatcgttagcctccctttacccttacactgtcttctggtactttctccaaagacctgtagctttatgctcattgcagttgcctagatttatagatttataatttttgatagccccttttttattgttgattatacttagcaaaggtcttttccaccaatgttcttaatgaaattaacagtcagaatattgactgtatctactttcaccttgtttgtctatgataacaaagtacccgatatctactttcaccttgtttgtctatgataacaaagtaccctatatttatagagccctttctattaaaatgtttctaaaaactaatgcattttaacatcataaaaaaagttttgaaaatactttgttttctctgtatatactgtattttcttttaccagttgctaacttgcagagattttcttttgcttttaatacttattgcttaaactgatttgataattaaaatgagattgtcaaatatactttttttatgaagtttcgaaaaaaacttcagaaagaattgtccttaataatttgtttctaagtgaatttgatttattagcatgtaaactatctataagctatttcctgttgtattctagcatttttggtgaaattgtattagaatacaaagagttttagcactacagaggaaaaacactccggtttctcttcaaggttattttctttataaccttggaaaagtcacttgacctttctaaatgttctcatctacaaaatggtgatatttcctacctcctagggtggttgtcgtgattaaaagggtgaagaatgtaatgtgcttactgtagtgctaaggatataataagtcttcattattgctatattaagacctgttttagctgactccccagtggttggcaaattttgtattgtgccagttagagaggaagaataagttcatgatccctttatttaactcagagattgtgagaggattctcctttygggtcttattgttttcaaaggtgataaagatagactgccctttaaatttaagacctatactctacttctttttatattagagggcttgttctattctagcctttggctatatttttctcttcttactcagagttattcaatgggctttttctttttagtcttctcagaaagtctgaagatccatatagtcattcatgtggtaggtaatgtgtttttaataattaagcttaatttcaaaaatagacttgtcttgctgtctgttttcccaatttataacacttgaattaaaaatactccaagttatctctcagttgtatggttaatgttatttaatactaagattaccatgtccagtttgtcccttatcaagggtagaaagtaaaatattcaaagtcagtatattgaatttctaggctaatctttatttcagtccaccaacagttcaccccacccatggtatttctggtagaatctataatgaatgtcatgctctggttatccataagttacctagagcttcaaatccctttacagataattataaacctggagttaatagctatctaatccttgagtaagaatctagacgtcttcaaatagatgatttttttaaacaaaatccttctctttaacaatagctcacaggtcaaattgtacaaattggggattctttgacattgtgaatttatccctagtgcatatcctatgttaaccaaactaatataaacaattgtgttgccaaactacaacacaattaaatttactatttatagtttaacaaaaatacttacaaaataactgcaagtgtatctttgaaatgcatatgtcacatgtagaagaacaatagattgtttctgattttagaggggraagacattaaaaatttgtgggagagatgattaatgtgcttagctttcatagaatgccatttaaatcccttcacatccctcaattaaaactgagttctggtattcaaaccaaatgcatttgtcaggcgtctctctgaacactgataaacaaaaatggaaactttcaaaatagaaatttttctcatagttagctaacttactttgcagttgttctaccccattttaaaagctattttgcacttctgatgtaataactgccttgatcagggagttttctaagctttttgtagtgacgaagacctcctgagatagtcactccaactaaagagatgctctgttcccttgtttaaaagtttaaattattcatattcatttagtacactttattctcttaatcagttgaccattagggtgttgtaaggaatgattggcctaaagtttattacgggcgttgaaggttattttgacctcagactgtcaaatttatagcttccacatcagatgaatggtttgcttctttttatttattttttgtgacagccatcaaaacagtgtttgtttctggcttgtcatagtaatttaagtgtatcctgatgagaatattcattatgggttatccccagtaactgggagaattcttttttgtcttttgacgacctatattaaaatgaagtagaaataggaaattatttatttatttatttttgagacagagttttgctcttgttrcccaggctggagtgcaatggcacagtctcagctcaccacaacctctgcctacctggttcaagtgattctcccgcctcagcctcctgagtagttggaattacaggcatgcgccaccacacctgttaattttgtattgttagtagagacggggtttctccatgttggtcaggctggtctcaaactccctacctcaggtgatccgcctgcctcggcctccccaaagtgctgggattacaggcgtgagccaccacgcccagccaggagattattttaaagcagcaccagtcaagatgttcatgtaccttcatagatatagaaaattgtggttagtatcatttaattttctccctctacaactttaggctgtagaaatctaatgcgacacataagaaatttgttttcccatatgttttgttaaaaaatcactggcatttgggtcctctttgaccacataccccatgtgtcttgaagggttttttggttttgttttttgttgtttttttcttggtgtggtagtagtggtcagtttctttgttttggttttgaggaatagtcccaacacttgggaatattaccactgacgattctccatttttaaaataataataacaataaaaaggaagtgattacagacatgccaaatccctgcccttatataatattctgtcctctaaataactgtatttcctgtatgatcaaaaagattaaaatgagcctctttgtagtatgtgttacagtaaattgagcccatactgagacttcttagtggaaaggtggaagaatggattgtcatgtaactagctgtcttctaaacaaaatcataaactcttgtttatcatttctaccacctgtccctcttagcttgctttagttcccattcctgggaatgactttgcactgcatgcaccctttttcattgacagtaaagattagaaccacacttccaggagtgatgataggcagttctcatgattcagagcagaagattctcatcctggagttcagaatattcttctaaatcagataagcaaataaaaaatattcttaactaactaccaactggtaagtaagttttcctggccctctctccataacagtaagacattattcatctaatacaatgtcagtattagaatggttaagaaaattctgtcaaaagtttcaaatgactattctataaaacttgccctaagaatcccaatttgagactttgtaaagatcttttatgtttcctgttctcttttatattcatccatggtacaaagattaattgcatgaggttccctccatttttattttgtaattctatacttctggcccttccccttccaaaaggctacttcatatatccagcaaaatgttctaagatgtctaccctcctccacccaagacagaatcgatcatctttgacacctacctgcttagtctcctgaatctgctactgagtgtaattccccttattggcaacaccactcaccaggtcagctctacagattctttttagcctaattcagtccattttttttttcaatgtgtatatcaagataactacatcactgtatgtttgcagctaaataagcttctgtttaaaaaacattcttgggcaaacaaagacccatttttttttagttgcaagacattagtttcaacccagttatttatcacagcatgacagcttatgtatcttaaactcacattacagattatctgctttacatatttttagaaatggaggctctgttctgttctgggaattgaatccctttgctgttgttacctacttttagactaattacttttaatagataaattattcactttgttgaaaaactagcattataaaaaggtatacagtgaaaagtctcctcattcttatttcccagctccccagtttctatactatactccccaataggtagccaccactcttagtttgtaatgtgtctttccagaaatttgttatgcaattactggcaaaaataaaagtagaatattatttgtctctttttttacacaaaaaatagcctgtacacattctgcaacttattttcacttactatatctttgctactttttatatcagtatatagagagctgccctactctttttaaaagctgtaaaatattctattttatggaagtaccataatttatataactattccctctgagggaatttttttaaattatgctattataaatttataattccatagtgaataaccttgtacaaacatcattttgtgcaagtatatctgtagggtaagttctcaaaatagaaggcatttgaatccagtaatctaagaatgataatctcaaaattgtagaaggtgctaagtttacaagaggaaaggaaaaacagcatatgttttgcttctcaatctttttgcccatgttcttttttttcacactttcaggcttctaatttctgctgccctgttgtgcatgaggtttgtctcttcttgactgtaaaattattttcagcaaccccaaagctaattcttggctgctttcagtatcttctttgcagaagtctcagagtagttaacctagtaagaataggaatttgagaactggaggagttttttttttcacacctatacaatggcagacattaaatgaatatatctaaagaacagtaagttttacagagtcttagtgatttatgttaactttaattaaagcacaccatttatttcatctgatactacaaagcacttatttcaagatttcatattttataacagtgcaatgtaatcctctgcttgatactcaaaatttaatacctcctcaattttttttttttttggtgggaaaggttaacctatggtttcagcccaacttcaatgagtcagaaatttcctttggaaaggaggggtttttattgctctttgaaattcatcaaattaaattaaaaggctttggattttatatgattttgctcataacaaatttttgatgcctccttttcccctttcctcaatatttgagattttttttttctattgtgcatgatagaggaatgctgctaagcttgcaagtaattaacttgaaattgttgtgactaattctgctcttttggctttttgtacctaatcagaattgatgtgactgaagtgcaaatcttcataataatcatgcatttgctggcagtgattggaggaccacctttttggcaatctatggtaactttgttcacattgtgtatcccatgtaatgcatgttgtcttttgcttgtgttttctaatatgggataatccagttaaagggtaatgtgtgaaattcttttatttttttccaaacagtagaacacaacttctctttagaggatggtgaattttactacttgaagttatgtagaacgttaggactattccagggctattatttttgaaggccattgagaatctgaattagtattgttatcccattttacagatgaggaaacagcagacagtataacaagttaaccagtgacaagattaaattagaccttttattctctttcttaactacatgagtctactagtttttctgtcatatacttaaagctgaataacaaatttgagattgtaagttaactctggttccaaaacaggataaatacctgttgaatgaaatcagtgccatgggattgtttgaacgagcttggaccttgatttccaggtctacctgaaatatagtcactcttacaaacacagattcttttccacaaacctctgaggtagggagtaaaatatggaggccaagaacacaagctctggaaccagactgtgtgcgtttgacccaggttccatggcctactgtgtgaacttaatctgttgcgtaactctctctggcttagtttcctcctctgtaacatgaggtcattagtagtacctgtctcataaagttattttatgcattaaaggagttaatatattgtgtaaagcacttagaatagtgcctgtcaaataataagcactcaataaaagttgttgctgctcttatagttttaatgtattctttcagatttgggttgtcatggtatgtactcccctggtcatcagttaattgccgatttctaccatcaccccttcagaatacagtatttatcattcatttggtgaaatcttaacaaagaaaagatttactagacctaaattaatgcaattcttaaaaatcagattaattttaaagtataagggaaatttactgagcaacatttttcccttacctaactcactttatgatggaaaattaggtgcttgaggaagtgtaattgatacactacccacagtatttattgccagaaatgaattgttaagtatcttttgttgggaagatgaatctgtgaagggggaggagatgaaggaataaaaataatccacagtcaactgggaaaattctgaaactattcagttatgtacataatatcattcagttatgtatcttagatttcactatagagaccctattggcttttgagactaatgtgtaggaaatacgaattttattacttttgctcttcagtagactagttcttttttttaataacagttttgccttatgggaaggaaataatagtttttgttttcctgaaagcagatcataaagcctaaagcttacccccattcctaaagtttttatatcccttgactatggtgattattawttttataagccttgtataccaaagttttccccccaaaattatttgtaatatgttgtacataaagtttcagcataccaatatccaaaaagtgggatttctggcttgattattggaaaacaagtcagtgtttggtttatacaggttaagtatcccttgtctgtaattattgggaccagtatttcagatttcagatgttttcaagttctacaatatttgcatatacatgatgagatatcttggtatcttgagataccaagtccaaatatgaaatttattttcatatwcaccttatacacattgcccaaaggtaattttatacaatatttttaataattttgtggatgaaacaaagtgtgtgtattgaaccatcagaaagcaaaagtgttactatcttagccacccatgtggataatctgtggtttggcatcagtgttactcctgactctgaatttacatactactgttaagcaatcattttctaacacttatttacacgtagatatatttagcaaaaaataagacatatcagtgaaaagataatgtattcagggtagtggagcagcacaatagcatcaccagaatacctgtatgttatcactattaaccaaaaaagtatctgcagtcctttttgacattttcaacaatatctttataccacacagcagagaataagcaaaaaacaaaaacaaaattgaaaagcagtaatgcacttagttcttggccccatgtcgggcattggggagaacctgttgttggaatgtccagcctgcacaatgccattttattaccctttgtgggtgtacttacgtgacaggatatgggtctgtgcacaaagatatattgcagctatgaagggggctgggagggtcgtttttcccttggggatgctgaataaacttttgtgcacctacgttttgacctcgacctgtcacataagctcaagtgtggaattttccacttgtggcatcacattggcactcaagaagttttgggatttgtagcattttagattttggattttctgattagggatgctcaacctgtgtgcctaattatttgttataaatatggaaatgcataaaacattgtaaatgaagttgtctgtgcacgttatatacatatccttatttcttaggtgatgcctggtagtaaattccttcaggtatactttttacctttttccattatgatttatacatataatctacacatgtacatagtagatataattttttcttttataaagatcaaatgttttgtcctgtcttgtaattaatataaacatcctttttaaattatrtgttttatctgaggaactctcagattcacatctgaaatggagttcccagacccagtaaactagcaatctaatttcaggattcatgaggtgaggttgcaacgggaaaacmkmytctccccctgccccttcatcctattgttagcactttggtcctactgttagcatcattaaaccaaaagggaacaacccgacttctctggtgatatatttsgagacttagtgaaatattctgttttttcttttttaacaactcccaatacggattcccataattgaccccagatcactatattatttttttctttttacttagcattaagggttcattactgaatatgctgttttgaattgcattctgttaatacaggaacaaatactacatattgagctctcacatttttgtgtgccaaatggagaaaakatatttacttagggttcaggtatgaaatttacatctcttctgagattgaggccataaaatggaaattgccttccaaatcctcattaagttagaaggcttttactgacatttagaaagcaagtttatggtcagaacaaataaaaacagtgcagatgtcttcataaggctgattccagaagatcagctgttttgtaaaggtaagtgatttgcatctattacatatggattacccattctttcccaaattttttccccaaagagatgaatttttaccaaagattatagttrttgttgttgttgtggttttccttttttttttttccaaaggaaagcagttgtcttcatgcataaaagtcagtgcttgttttatacattgcaagaaacaaaaagcatattttttgtttgttgcttccccaaaagacattccttttagaatgccttggaactatgttctatcatatcactctttaaaaaaaacaaagaagaatatattcttatttggaagagacttaatataatcaactcatggttacttttactgatgcttgagtyttttaaatgtagtaattgatcaaattktattaagccataagggactttctggaattcagttaaggcaactaggtgagtgttactactgcaggtgaggtttcaggattcatttggtcagactgaagacgttctatgtagtataaattgattatatctcattcttgaactacaagactttaaaatgcctttacacttaaataattctgatagggtgattttcctttgtagacactgtaattatgttaacatttgctgtattttggtggaattcatttacattaaaatgatttacaaacaggcattcccacattctttggaggaaagtgtctaatctcaaaatggtactttttatttctgctctgatgtacaaagcctgtaaggacattttatcatgcttataagaaaactagtcaaaatttactaactgatattagtctgcattaatacaaactattgaaccaaaaaacatgacctttgtaatctggtaaagatactgataatttaagattttctttttctatgtctaacctttttaaaagtgaatttcattacattgttattatttggatgcataccttcatggtatgagtctggagagttttcacctggctgtaggacagacaccatggtccaaaggaattcttactcttcccaactcttaaagacttgaaacttcaagcagacctgacataaagatgtctttggtatagctctttggctatttctaaagagtggatgcactttggccacctttgataagttccaagatgatgacagaaagaaaaagattgggaaagacagaatgtgcctgttctttttgacttgagggagagagagaatgtgccaccctccttgatcttaagcgtggggtgagaatggcaacactttgtgttttttataagtagtgccaatttttaaaggatcacctggtgagacttgggattcctttgactcgagcttttccttcactttgcctcatattttcttggtagctcactttctttttcattgctaatgtgggggctagatgtttcttcatactctcccaaaacaggagttctacatagaaaggaagagaaagggagattttaatcttcatttaacaaatgtgtattgagccacctacaataaccagggctctagagagtgtacaaaatcaattcaaacaaaatccaacactcaggagcttatgttttggtgtatatagctaacatatatgacaaaagtgatgaaaaccttaagaatctatgatactttgcgcctaggtcaatagcttgcttccttactttgtggtccaagccatgtactaattttcctggcttttctaatgtttgtgtttattcttctttcaaagggcaacaatttttatgatcccaaagcaatttcaccaaattttaaatacagttatgactctcattcagttcatttatgacacagatgactattatacagagatggtactcatttagtaccctggccctaatacagggctgtccctgtaatagaataatgctttgcttcttttggaatctgagggaagtatagtattttcccttttgccagagagatcttttgtctctatggagtcaaaagtgggaggggtgggaagagaggttgggaaccaggaaactagccacagtattgagtttcagccaggtgcatcagattgagaatgtaatgtccctagtttattgaacaagagcagaaaaatctcttggagttcaaagcaaccatggtgttgattttctcctttcttgaaaacaagttttgaacttagactgtagaggttggagatttagggggagaagataaccatttaggataatccataaagtttaggacttgacttagttgacctagttaattttagaactaggttgacctagttaattttagaaaatttaacactgctacagtacaatttaaacttgaacatttgatttcaattttttttagagctgcatttttkcaagaggtaacagagttatctcaacaaagtgagttcttgagagttttgaagaaataaagtatccaaccattaagatttatgtcttccagtcttaactgaggttttctatatagtaggaagtgccacatttgctatttgattttaaaagtgtagatagatgttagccatacaaagtgtaaacagccctaattaaaatgctttcattgtgaccgggcatggtggctcacacctgtaatcccagcactttgggaggctgaggctggcagatcacttgacgtcaagagttcgagaccagcccggccaacatggtgaaaccccatctctactaaaaatacaaaaattagctgggcgcagtggcacatgcctgtaatcccagctactcaaaaggctgaggcagtagaatcacttcaacccgggaagcgggggttgcagtaaaccaggatcacaccgctgtactccagcctgggtgacagagcaagactctgtctcaattaaaaaaaaaattttttttttcattgtaagaactcatggcttattaaaccactgggggcttttggaatcttgtttctataatcatttgtttctattactagactacgtcatttattttactgttgctttcttttcaatccatattggacaaaatttgagaccaaaatttaaagggaggggtgcgaaaaagaagagactcttaaatgatttttaaaattcagtacaagtgtatttcattttaaatgatagatattgtgtttgcaaaaatgcatgacatcaatccactctgtcccccatacttcaggtaaataaacacattttcagtatactttatgaatatattattcacttttctgaaaagtacatttaaacttcaaaattttgtatgcacaatagtagaatctgtttgaatgtacttgacctgttttttcttctgcattgtgaatgccttcttaattgccttctgcttttactagctgcctgtatcctaacaatttggagttgggaactcttctgaatagaaattttatcttccattctctatactctgcagatttttatatctagtcgcaacatttctattatgattcatacttcctcacaacaattatgaatgttctacagatttagaggtagaattcaaaaacatatacaaggaaaaaggcagggtgcactccttttattaaaaggccagaacacatcctggttcactgttgcaagaccactgggatgcattaggtgaatctaacttagcttgtgacacaagttaataaagttgaatctggtttttttgttttttttaaggttgatggctgaagtgagattaatttctaaatagtctcaactcttgagacttgctatattgcttataatgaagaggaaaaggacactttcattactttacgtatttatgtaattggagggaatggaaagtttttgggaatatgaatcaaatattagactgttttcttattttagtttgtatatgttttaattgttttctctctctacccattaaagattccagtgctgaatattcaaatgaaaatttttcctgcactttgtactgtagcagggaccatattttcctgtacaaattacttccgtgtaatcttcacaggtggtgttggcaaaaatggatcaacaatagcagtaagtataccttaagattttcaacacttgtttacactaggacttggttttgttgtcattttgttttttatttcaaatgtataaaatcatttgttaatttataatttatacttagcctttaaagaaactaatgttcaaaacttcaattttatatatacttacccacatttatatgctttatatattcatacttttatgcatacacacacacaaacacacttattcacatgttttttaaagtatgagctgctttgtaaaaataagcctggtctcttaagtgaaatcctcagtttgtgcctaatgaatttatgctgctacttttcattagctcttctagtttgtgatttatagaaattgctgcctatcaggcaccatgaggttcctgaaagtttgagttgaactgtgaactgttctgcagcagatccatgtagtatctgatgagtactgaatactattaactcttctcttcactctgtacagggaacaagtgtcctttctccttttctccatattggatcagtgattacattagctgcaatgatctacaagaaatctgcagttcagctttttgaaaagcatccctgtctttatatactgacatttggttttgtgtctgctaaaatcactaataagcttgtggtaagcacctgagtttttatttgctgtgtttttcactttcatcttattttggatttatggctatagttctcattctgtagcttcataaatggtcctagagtttgccctcttctaatcagaatctcttgatatcaacatgggaactatttttactcttttgtgaagctacaatttgaagttactggaagttcttggaaaacatacaactttttacccttttatccactgtttaatttggttattcagtttatttacattctcagtctcaatctggacactcaaattaaggcttcttgtgaaaagcatcttttgtagggttagttgacatgatacatccctttctttctcagacgcatttcatattgttgggtttttagttttgggaattcaacagctattcctaaataattattggaagttgatatctgagcacaatatgatttactrtgtagttcacaattgtcctcttatgaaaatgcctacgttattctgttttattcataggttgcacacatgacgaaaagtgaaatgcatttgcatgacacagcattcataggtccggcacttttgtttctggaccagtattttaacagctttattgatgaatatattgtactttggattgccctggtangtattgtactaagtcttatttcatggtttgagggtttgaaggttgcttgttttcttattttgatgacccagtcakgaaagatcgttcatrtaattgtaatgatttggaatgtcagaaatccacataaatggggctgtgtgagagttctrtggctttatatttgagccttttattttttgcattaatcttactagtcctgcctacatcgggcagggctcataaattgcaaatttctgactgagtagaaaagcatgaatcagcatactacaccctgtgggcccatagcctgttttggtaaatacagttttattggaacacagctatggccactcatttatatattgtctgtggctggtttcatggtacaatggcagagttaagcaactgtgacaaagacaataaggcccataaagcttaaaatatttgccatctgtctctctaacaaagagtttgtatgtgaaggaaagattgcaaggaaattgaattattttatggaatggaaggtgaatctgtagagagaacagagtccagtcctctttactttcaggaagcttagggagagcctaaacgggtgctgagaatgtctcttttctttccaggttttctctttctttgatttgatccgctactgtgtcagtgtttgcaatcagattgcrtctcacctgcacatacatgtcttcagaatcaaggtctctacagctcattctaatcatcattaatgatgtaattggtatataggaacatcatgttttctgcaggaaagaaagtaacatattaaggagaatgggggtggataagaacaaatataatttataataatcaatgttgtataacttttattctttattattggtaacacgccctaactatcctgtgtgagaatgggaatttcaagtcccatcttgtaaattgtmtatgttgtcatgcagggtttgggccaagaaagcatgcagaaaaaaatgccatgtgattgtaattatcctggattcagaataatactgtgatggggagccagatccgcagtggtggagagttctaatgttgactgtttgcaggccaaaagatgattgctttataattttaacaaatcattgtcttttagtaacatccttgtttagtgtcttctcaagctttctttactgaggaattcagcttgtgacacagatacatcccactagcttgtgaggtggaactagtaataaagaccttgaatttggattgaaaagtttcctatctttacattgttgaggaagtccttttttttttttttttttttttaattgctcaagaaatgattctctcacaggcttgggaaatcctgttagcatgcagaataatgtggtaactttgtcaatttcccattttatttttttaaataaatatatgatctaaaagccaactttttctcagttttactcagtggaaagataaactaagttttaatgttatttttttaaatttaagcaaaatttatttctgttctttaataaataagaaaatgtggtccactgcattgttgtgatgtgtcttgtgacatttctattttgtagaaactttaaaaaggagaactatgttcatttttcctgtcaatggtttttttgtgttgtagttgtcacctgtgtgattatcaatcatttagaaatctcatacccttcccctaaattttcagcaagtgcctgggcctctctaagaggtcactttgtactctccttttctggcagtctcctctttggtatctgtactatcgtttgaaatgggaaccagatatgtttccattttatacagataattcagttgcttgaagaagagggacacaggagaaaagatttaaactattggctaaaatgaggtgtcttattattgattttcatctatatcttgtcccataatcaggaataaacagtagctacactgccttgtatggcagccagagcgctgcttgcttgcacttttaatgattccatcaataccatgtagattgaattagcaaggagaagtaaacctttcatttctttgccagactatattgggaaatgaaaatccgtcattacttttccttgctagcaattgtycgaatatctgggataaagaaatacatacaggaaaatgttagggcagaccaagtattaaaagctaggacagagcaggacaaaggaggaaggataattctacttgtttggcaaagttacatcagttgtcttactgacacatcaggtactatctatagtggaaattgaggcccggagaggttaaatggcatgccagtgtcacttgctatttttcagaacaaaaattagaatccagatctgaatcctggtgcagtgttctctcctatgccctactgggctttagtgggctaaagttctgaagcaagatgttaagggctaattgaaatgtgtttattctcctagattctttttcagcatagatggaatctgaaaagcactcagatatttagtgtgtgcttccttcagccctaaatacagcattagcatcaaatcaagggtacatttgtaataaacctcagcaaaccttacctgaagaaccttttaagaaagtacagatttccaggtcctatcactagagatgatttggtgtatttgtgatgaggcataagaggatattttcacaagattctcaggattccagttcctgttctgaaacctttggaggtacaactatatttaggcaccactgccataaactaccaaaaaaaaatgtaattcctagaagctgtgaagaatagtagtgtagctaagcacggtgtgtggacagtgggacatctgccacctgcagtaggtctctgcactcccaaaagcaaattacattggcttgaacttcagtatgcccggttccaccctccagaaacttttgtgttctttgtatagaatttaggaacttctgagggccacaaatacacacattaaaaaaggtagaatttttgaagataagattcttctaaaaaagcttcccaatgcttgagtagaaagtatcagtagaggtatcaagggaggagagactaggtgaccactaaactccttcagactcttaaaattacgattcttttctcaaaggggaagaacgtcagtgcagcgatcccttcacctttagytaaagaattggactgtgctgctcaaaataaagatcagttggaggtaggatgtccaagactgaaggtaaaggactagtgcaaactgaaagtgatggggaaacagacctacgtatggaagccatgtagtgttcttcacaggctgctgttgactgaaattcctatcctcaaattactctagactgaagctgcttcccttcagtgagcagcctctcctcccaggattctggaaagcacacctgactccaaaccaaggacttagatgccctgtgtccagtgctgctgctgcttttaccagtatctcttacccttccggttagaagaagtagagctgctgccccccatgattctatcactccaaacatatccccatggccaggtcttccacttgtagtccacttgattgtcatattcattgccttattttccacgaggaaaatacttttacccatagtaaaagccaaagacacatataaaaataagattttcctctttactctcgtccttacatgtccacagacttcatgtagagaggctgagcctttcgaccacaaagtgtgttctgtgttgaagatgttataatgatgggagagggcagttgcagcagcttctaaccaagtgtctacaacacatgtactactgtttcctacctgtgtcacctctgcaaaaaatggagctctgagcccagttctgtgagcatggtgtcagagccctccaaagtcctgagaaatcaataccagggatccaaatctcagacaccagtttgaagcaatacctggataccaagactcagagtgaggatatggattttgggagctgacagttttgctgatcctgccacactggcaggggctgaagtccagaaatggtgtgtagctctagtcattcttattcaccacagctcttatttcacagttttttcccttggtttcttctgtttcttctgttcctcatattcaagtattttctgttggaaatagcctgtgggttcaaatacaggtgttagaggcatctgatctggtcaggcagattataatgagctcaggaataaggatcagaaatatcctgtctgctccccatactgccatccctgccaggatgtctctggcctcacaggttctggagatccagacattcagttttgtccaaaaaggagcccataaacagaggatacttagcaggaattagctctagactaaaacagaggaaagggctcagtcctgttcactaatgggtaaaccaacttccacaaaatggcagcccattagacattttcttaggtttcaggttatgtcatttcaactccactaataaaagtctacctacagctattttgtgggtttctaaagagaagtattctttctttcccctcctctttattctagaggtaaccctctatgggcttagactgatggggactgttactgtacctgcaggaggattcttgctcttctcggcttcctggatgaaaagtgagaagagctgtgtcttcacaaacttcttcacaaatcggcggttggtcttggaggtcagagccttacagaaggatctttcttggaagtggccttgcccatttgcytcccgcttgatataggaagcataatggcccacaatcttgacaaagaactgcacaaaggggcctgaaacatgctcgttgatttgttctgcagctgcaggagatataaaggccatctcagagggtagcagaaggatgaaattacccaaactcaccttcaagaatggctttcttgcaggcggaaagctcctggggaaagccatagggtagggttcataattactgactgagatgggaatctgggtatgagttctctgccattgcttaggaagaatacaatcccaaattcagacttgccctaggttctaggcctctagggctggtctaggactactgaatgagttcattttagttctggaagggaatgattgagaagcatgcccttgcactgcctggagagacccaaaataagagtaaggwcttactctttaactcattgatcccctgaccaagagagtctaagatgtcatcctgaagcttcggtggcaggatgtctttttcatcaccaacctagaagaggacagagctccgaggtcaagcaggaaggaagtgtggagtgaaggtggttggcagaaaagcataaggagggcatgaattctacacccccactccacccgcaaatagccacataggacagaaacaacagaagctgtttcttggcctttagtttgactctagacattagcaagggatcctctccatcccggtggtacttgatttatatcccttgcttaaaaggcactatcactgattgtcttatagtgaagtcatctgtgtttatgtccatgggctccttgagagagatgtggtctttttagcacagattctcactcaacaaagaacttaaatgtttgtttaaataagtggaacatggatgaaactagagtggtagagttgttgataggcctgcaggggatctgaacccagacacttaccgacattaagaaggttccttcacaaagattgaccagcaggacctgaaataaacatagactggctttctctggtcctctttcttcatagacccccagaggatttaccgtcttgatttctgcctgtggctgtatctttcagcccaggtagcaacaaaatcaatatcttcagttctcatttcctatctagcattctcctttctcaccattcccctctggagatctcagttccattcctgaggaaagggtgtgggtgtttgtaggaagggagtaggagaaagagctaaggtagaagggaaatacaagatggagaaatcacagccagtcactcccttaataaaacattgactgcagaaattgcttctacatggagcatttagtacattgttcacataagtgctttacacgtttgatctcaagcaacagtcccgtgaggcagatacaatctccattttgaagatgaggaaacagacccaaagaagctgcccgaggtcatactatgctgctaataagagaaccaatttttttccaagcctagactgatattcttgagattgcattcctctctctacaattccccttcaactccctgctctctagaacagagaccaacatctttttatttttttcatgcttgcaacatcttatgtacaattttctattagaaaaactcctgcctctcgtggtggctcacgcctgtaatcccagcactttgggaggccgaggcgggtggatcacgaggtcaggagatcgagaccatcctggctaacacggtgaaaccctgtctctactaaaaacgcaaaaaatcagccgggtgtggtggcgggcgcctgtagtcccagctactccagaggctgaggcaggagaatggcgtgaacccgggaggcggagcttgcggtgagccgagatcgcgccactgcactccagcctgggcgacacagcgagactctgtctcaaaaaaaaaaaaaaaaaaaaactacctcacagctttgggccttccagcaggaaacagcaaaggaagaaaatgagcccagggtcaacaggaagaggaaaggaaaggaagtgaggagaccatgtgtctacagtcctcaagtgagataagcactgggctggaacttgggggacctgagttttagcactggccccatcactgcccagggagccttcagtctagaccagagattacaaataggcatcctgctggctgattccaaccagcagatctgtttctttgatcttcacagtatttttaagtaattgatttggtttccaatatttaaactggactatctcacataaagtttggatttggggcttctcctgaaaagtcaggagatctaacactgggtccacatttctaaaggacaacactcagatggaactgagtagcagttgcctgctttaggcagggcatgttcccaccagtttaccgtaacttcccaaatcatgtattggtcatttaaatgcccgctgggcctctcttttccatttgtgacccttggtcttgatagagagaatgatccctccattgtcccttcttccaaatacaaggagagagtggaaagtatgccaaaaaatagagcatgcactgtaattatctgtcatcaggggagaaaagttgaactagtccaggcctgaaaccacttgtatacataggctcagatgccttcatgaagggaagactgttcctttgagggattggggggagagagtgtgtataaataatttgtttttcaagattgttcccagaaatctttccagtatttgggcatattattgtctgtggagtaatcccttaccaaaagccagagtctgactggccatcaggagaggagccacggcttccagggagctggagctgcagagtcaagaagtttcataatttctggggttggaacatttaaatgtttattgctaaacatggggctaatactctgtcccagttagtcacaaggctaaagctggttcaaagggcatgtgtactcagcagtcctaaggaaggatgagggggccggtggagcaaagaagggaaacacagccttcttctttactttgcagcaatggtttctataggagaggatttggttttatctgtgctaggttccactgttgtctatgtggccttggataagtctctggagctcagttatctcttggagtgagtcaatggttatggccagggcagacattcccaagtccctcttctggcttgagatacagtaacatactatcttttgaaagtccctatactgacaactctaaagcacatgttttgagttatttttccaacagtggggatagatttacgcttttaatgcccattttcacaactgagttctctggtgtgtctggtgcactgccaagatgtaagaagctaacaaaatcaaagaggattcagacctatatcctcattagccaccttagctctgagctactcagaaagatgacttgctgcaaaaatctgcatttttaagactcatagtttgccagagggccatgttagctcaattccaaggaattcaaatacattccagtggggtgtgtgttgtatagaccagctgtgtcatacatttggatgagatgggacaccccgaagactgctcattagggccagctggcacagaacagtctgctcacccctgaataagctatccactgccccttatgcctaaaggggaatccttcagaagggaacctgcatttattgagcatcacctgtgtgtcgggtgccaggttaggagctctaggcaggtggtttccccc

SEQ ID NO: 95921 - DNA, 26851 bp, Homo sapiens
  misc_feature (1)...(26851): n = A,T,C or G
tttaccccttgaaatttataagcccccagtgacatgttaggcacattggtgtttccagtctctgagaatcagtgtaaatttagagacagtatctaatgcccctgcatagtctaggcatttctttttcccagtgtgaagtcatgcagcccacactatctctggggaaagcttgggtgaaaattcagaatgcatacctatagctacattgcaggatcccttctcagaaggacccagcttcctcatagttaagtggctccaggattgtgaactagtttagatctgggaactgggtaaaaagctatgaatatgaatcccttctatagtaatctgggttcggtttctgtcttgtagacctagaaattttccacctatgtatgtctagctgcaccttagtaggctgctcatttatttcatttcttggaaccttaccatcaattagtcatcactacaaattcttataggtcaaaacaccatgattatcatttctttatatttagtttaattaacttatttatttgagacagaatcttgccgtcacccaggctggaatgcagtggcacaatcacagctcactgcagccttgaactgctgggctcaagtgattctcccacctcagcctcccaaatagttgggaccacagacatgccaacatacccagctaattttttaaaaaactctttgtagagacgaaggtctctctatgttgttcaggctgatcttgaactcctgggctcaagtggtccttccacctcgtcctcccaaagtgctgggattacaggtgtgagccctgcgtctggcccatgactatcatttctttcttatggggtttattgtggtcactgcctagcttgtatctgattgatcagggaactgattcccttgcatctattcctaccattatctccagcatacagaggacagccaccatagagctgcacctttttgaattgggaatcagtcatcatgagcaaaggcacagcactgggaaggtgggaaaagataaactcaagatggtttggcaccctgcccccttcctgccatccagtgggtctctgctccattccttcttttacttgtctataagcatcttcctagaatatccttttgattgtttccctttcctgcccagataccttccatggtaaagaagtttctaaaccatgttcttcccaaacagtacatcctgcatgttttcttaatcatacttatacaaaatataagtaaataggaaaaagtaactatagtaacagttgctattggaattcctctttggatttattagagaaagtaccctaatatctgccttgggtatagatagtgaaagcccaagcattttgggtctggttagaactaaactgtagcaaacaagggaggagtttttcagggactctggaatgggagagaacactgggataactgagaggagccaggagttggtgaagtctttgcattaggggatgtgacacttcacaggcacccctctcccctatgtttttactaaaaactaccaagaacttgatgtgtaaggatttcttatagaggccagtaaaaaggttaagtcatgcaacaggaagctttgcagaaaaacagtctatacccaaggatgcaggagcacagaagtagagaacataaggaggaattcttgagaatttgctggattatcggggacacttcgggctgacacagggagtggggctgggattataggcagagtgtaatcagaccactgaggggcagagagtctctaacatctaagttacatacttatattttaaatttttgtgattttagtttttgcttgctccattagagtagaaaataagtatttgttgaataagttagaaaaatgaatgaatgaatgaattgctttcaggactatgccacagaatgttagagtaggaaaggaccttaaggatctattagttaaacctgttgagcaattagttcaatgttgttaggtattgatctcactccaaagataataaccattagcagcaataacaacagtcactgctatgagtgcctaccatgaatcagacagtttacatttataatctctatttttttaaacctttcaagaaaagtgtcattattgctacttttcaaatatgttgtccaaagtttctcaattagtaacccaaatctgcctgtttctaagccggggtgtgcccacctttttggctatgctttttctcaggtcattccaaagacagaccatttaaccactggatctggggcaacaaaggtggatcaatcgtgaatccttcactaaaaagcttgctttgtaatagatgaaacagtttaatttttaaatctagtgttataagggtttaagtagtagcacactgtcaaacttctgttggaatgaaaagaataagaactgacgaccacaaaaaagcaattctgcttaaaccagtgtctctcacccttggcactattaaattatcagtacaggcggtccgtgacttctgatggttcaacctacgatttttcaactctacaacagtgcaaaaacaaaaacaaaaaacaaaacaacaacaacaaaaaaagtgttgtcagtttgttcatcgacttatgatggagttacatcctgataaaatagtggttagttgaaaacattaatattttttattttactttaagttctgggatatatgtacagaacatgcaggtatgatgcatagatatacatgtgccatggtggtttgctgcacctgtcaacctgtcatctaggttttaagccccacatgcattaggtatttgtcctaatgctctccctccccttgcccccaacccgccgacaggccccagtttgtgatgttcccctccctgtgtccatgggttctcataaacattaatattttcaacttacaatgggtttatcgagatgtaatcccatcataagtcaaggaccctctgcactgaatatacttcattgtggagggctgtcttgtgcatcaaaggagggttagcagcatccctggcttctacccattaggtgctgtggcataccttcttccactgttgtgacaaccaaagtgtctccagacattgctagatcgggcaaaattgtgcccagttgagaatcactggcttaaaaggaaaaaggccattgcatggatgtgcaataacacctttagccatttcctaatgatgtcatttaatcagttaggatttttgttttgtttttagtattttgctgttacaaataaagctgcaatgaacattgtttctttgcgtacttgggcatgatacatttctaaaagtgaaattgctaggttacaagattttatatttaggattgcgatattggctatatgacctgtaaagacattaaacaaatagcactacctttactattttattacaaatattcttttttgaatttcctcaatttttaaacttaaataagatccatgaaagtatgggattatatgataatattcattttcctactatacattaaaataaacacattaaatatttttaaaaatccctcatgcacaaccaaaaatcatcttttacaccaaatattggaacactcccttcactttaaagatgtggtaactgactagaaaagagtcttcccttcaagtttacagtgatctgtagtcaatattctttggatttttttttaattattcaaccaactgattttgtttaagtcatacttctctaattcattcacatgggtatcatgaaatatttcgccaaatgctctgttaaaacgaaagcacttcacgtctttgatcttgccttcatcttgataattgttgtaaaatgtgagaggtgtcacactgctgcagggatttcttcagttactcagtaaaggacatttgcaaatggtcatttctaactccatgagaacaggctaagcactagggagggatattgtgtaagtatctgggtggttgggtaaaaataaaaagcaatggttgtaatttttttttgacagcaagaactgaaggaaaaggattgagaacacacagagcgacacgacacactgattttcaacataatccccattcagcattttactattcatcatctctgaacatataggggcatagttgccagctctttggcayggtcatccctgcattatgcagaggtcattcctgggcatccattgttatatcttggcattctgagcatcatcagtcatttttgcaaggaacagaggggtcaggtctgagatctagccatgctcaatgcagcagaataggaatccagaggatgactcaagtgcagatgaattaagttcaaattggcaggccaatttggcttctgtgttaggtacagcattagcagctagtgcccctattaggagtttcggtggaaggtcacagcctagtgggcaatctcagtgatgtgaaatcttgaggggcaggggatactgtgggaggaggctcagaagtggaggaaagtaggcattccacatcaaagaggtcttaaaagacaggaggcctttaggctgtaggatatgaggaacctagcaagacagagtcagaagacccaggccctaggacccaactgtggtgccagcagtttgtagaacaggaagagaagtcaaagcagggaccagacccagttacaagaatgagggcacaagggctaggaatgggggaacaagagcatggttgttgtagccagaaaacgtaccaggggtagtctaaccaatggtacaagttgttgccaagcatgatccagtgttggtctcaggaggcctaattatctcctaattcaggttaatattagtccaaggaatggatggtggcattgagcatgcaagtgggacccaagttgcctcagtgatggtacagagtgggaattgaatctgaaatcattttggcaacaaaactcatgttttcctcactgcactcatcatgctacttctccaagaaagagacacataccctagctctagggatacgatcaatctgttcactaaatcataagctccttgaaagcagaaaatgtttcaagtgccgagcagggcatggcacatgctcagtgataatttgttgaatacataaagaaaggcaaagatggatgaagaaaaggagacatagtctgggttgggtggggtattccatcaggctttcccagagtttcagtgaaatactccaaacattctatacaatttgttgcttttattccatcatatccaagcaaactgctgatttaaaacaatgactcctggtttcttcatactggaaatgaaggatagatgttatatgaatttgaccactagtcattatttccctgtgttgtggattatattgacatctggttaatacctcgtgagtagttcatgtggattagatgagcagcatcagtctctgtgaaggtgggcataaggtccaagaccctctgtagcagagaaagaaaactgatgaatcataaaagcatctggcttgcagtctggtaataaaaacggtatatatatatatattttatctttcatactcctgttgttgcatttttaaaaaactggctcttagatgtccagaattgtatccatcatattcttgaggttcatgacacatcctcacaattggctcatatactgactcaaatattgttgactcataaaaattcaggttttgccttctcctgagaaactgaaggatccagcaacactgggtctgtttccctgcagggaaaccattagcagctgctcagagtgctgtccctctttatactgatctctgttgtctcctgaccaagaggcttcatgtcagttgatgtacatcattgggcatgaactgttacttttctaataaaatagagatagctgttttattgcatctacaccatccatttacattacctgcctggcaagcgtcatctgagtttgagaactctgctctgctgggcaacccttttgacatccctaataatagctaccattcactgagcccttattatatgcgagcacgaaactaacaatttttgacccattatctctttgatctctataaagctctatgaggtaagtctgagctgtcatctccattttacaagcatggaaactgacctcacagaggcaggtaatttgtgcaagattacaaaacttctaagtggtgacactgagattcaaactttgaattcaaaccttggattcaaagcctaaatccaaagctatggtttaaacttttttwaaaaattacrctrcttcccagccaataatcttttaataatagaattgctgctaccatatggggtttctcccccatattcagtccctgtggtactgaataccaggaagaccctcttcctggtattcagtgccaacctggtgctgttgctttgttggagagggaggccaggtcgttctggggtcactgtgactctcataaattactgatcctggcactggggtgtgtgtgtgtgtgtgtgtgtgtgtgtgtgtgtgtgtgtgtgtgtgtgkatgtgtagctgggctgtcccagcgctatccacagggaagctcctataaarggctgcatctctggactcacagctatcagaccattgagatgtggaagctgttgctgtgggttggtgagtgtggcaggtcccagcagtgtcactcagtccaggaagtgccaggctttatgagttcgtcatctctctggtgcctgagagagcagcctgagactcagggaagcctagattaggtagagatgggatgggccatagttaatggtcagaggtcagagggacccagggagaagtggtcagagcagtggttctcaaacctggtggcccattagaaattttaaatgcctgagttccaccttggaccagttctgttagaatctctgcatgaccagccaggatatcagtacttcttaatttgcagccagggttcagaaccactggcctcgagctttttctgggacttctaacacttgtcattgtccctgggcaaagcatgagcatatacacatgtttatcaaaaagaaaaggaacttatatctagctccactggtccaactttagaaactaggaaacgagtaaatggtgtgtgtgtccccatttgtgtgtctgcatctgcataaggtggtgtgttggtgggcacccttgctaatcagagggtgtgctgtgccataccactctggtgagggtatgaatctctgtgtgactccttcctttgtttcycacagggctggttcttgtgctgaaacaccacgatggtaaggaaactgtgttttcccttccagagccagggagagtctctggctgagaagtcctccacattgagtgtcccctgcagcccaccttgccctggcttctctgacagggattattgatccaacacagtttctcagaggatttttkgtcacctgctgtttgtgtcgctgactgtgtgccttggtccagacttgagaatctgttctgaccaggatttcacarggcattgttttcttcctgagacctcagcagtsggggaggaatagaacctcagtgtagttctgaggtgtacttcagggccagrgagagaggatgtgaaaatgtggcctggtctcttgggctgcgttcacattgctttctggaagctgagctccatccsctcccttggtttntgccaactaatgtgtgctctcccttaccaggtgctgcccataaactcgtgtgttatttcaccaactgggcacacagtcggccaggccctgcctcgatcttgccccatgacctggacccctttctctgcacccacctgatatttgcctttgcctcaatgaacaacaatcagattgttgctaaggatctccaggatgagaaaattctctacccagagttcaacaaactaaaggagaggtgtgttcatattggatgtgggggttgtattttcagatttcacaggtataagataacagtctatttctcctgttactcttcaactttcttctatttcttccagtcctaccttcctctcaaataggggtccagagcacccccaacttgagaactccttgtcacagacaccttgagctctttcctgcctccttacttttgtagttgctgttgtctctgcctggaatgtgcttctctctcttctctgcctggcaaaacccaactcagcctttgaacctagttgtgaggattttagttattaatgctgttaaagtgggcytacacatcccaaatgctcaacaaatgctcatgyttttattaccgtttgttaccggtgagctactccagggaaggggcagtgtctgctgtgttgttgtatccccagtggctaggtcagtgtctcacacagggttggtgctcagtaagtgtttgcttacattttcctctctccggaactcctgggatctctctgtgcccaaaggaaggcttgttactgcattaatggttatagatgggcagagtaaaagttctatgcyactagattataaactccctgaaagtggggagcttatctgtgttgttctttgttctaaagtgcctaaagcagtaaatggcacatagacattgctcaataaatatttgttgaataggaaaaagagaaacattttagactgctctttttttggaagcatcatrgggacatgcgygagtttggcagactttgtgcagccttggagttgttgggctgtgatggcccttgggttgattgttctctctgtctttcctcctctctcctgtgctcatcatctctctccttctatcaccttcccccttttcctttccttacctcccatctctcctgtttcctgttttcttccaatgagcaaaataaaagaatgtgncagcasctgcccaccggagtgaagaacccagctcatcaaccctctctctcacatcataggaacagagagctgaaaacactactgtccatcggcgggtggaactttggcacctcaaggtgagactttgctgttwttctcttctccctgggagggtggagcaggctggttagacgtgaagacagagggggaaggcagcttggccatgcggacagcaaagctagcgcaaatacttccccaactcatgaatcttagacccctgcactcaagggatatcctggcctcttctccatggtgggtcaggggagacaaggaagttctagcaggtggtgagaaagaggctgggggaaaattagggacaaaatgaggcactcataattgtttcctcaacctttcataagaggcaagggttttgtctccaaggggaggaatcaggtgcaggatgagaataactcccaaacctcacaggtttcttcactttattagtggatccagggatatcaacctcaaagggttggaacagaggaaaggaaataacaaaatgctaagcttagtgctgggacatagtacatgttcagtatgtagcagctgctcttgttagcacttcaatctccatgagacaacgtggagattacaaactgccttcrtattttctgaagaaacatttcccctatttcatggctgaggcctgggttagaggccgtacttgccttgttgccttaaaggcatgagatacacgagagggaggcctggtgggctgggagtgtgtgaggatgcactttacaagatggaggaaagattcagggcaggggggtgagaactagctctgcccagcccaggattcacctcttcccatctctgaacactccctgtgctccagatgctgggctagggctgtacacgcattatcccgtgaacacttgsaggaagctttacaaagtggttgtattcaaaattggtagagcagaaagcacaagtcacagttattaaggaacttgccagatttgtcacaggtattcctcagagattgcccagcaaggaggtgggaaactgaccatggaacccagatctatttatgagtctggttaattttttaatcatggctcatctcaggattaccccagagttgcttaaagttcaggtccaataagttagaatttttccaaagtgtcatcactacggaagagaaaacaagtaaaatagaaaaatatcaaacaaaaaacgaacaaaagaacacaggatcaggatcccgttatcagaacacaggcctcttgtgccaagttatacagcccaggcccagattaactcatagatgtttctggacatgctggcccttgactcatgttctctcccctaatccagtcaggtagaaaatgtcagtgctaggacaggttgtgggaattgagtagttacctatgaggagacagcacagagaggggcagtgccttgccagtgggcataccatgttttgggggcagagctggactgagccatttctccacaccccaggctgcatgcttggttctgtgcctgctgttccctgtgcygtctggccttggggcagtacatggttttcaacttcttttagctgcctgaattccctactcctgggtattgagctcctggtgctgggagaggcatataagaaggtgggagagttttggaaatctgccttcctttcctccagccacatctgccaggyccaccacagggaaccaagcttgcaaggggccttgtaggaggttgtgattctgtggatagagttctttgccttacccctggtctccctayagattcaccactatgttgtccacatttgccaaccgtgaaaartttattgcttcagttatatcccttctgaggacacatgactttgatggtcttgaccttttcttcttatatcctggactaagaggcagccccatgcatgaccggtggacttttctcttcttaattgaagtaagtctggtctagaagcrccagaatccagaaatgattctacttttatatatctaggcttatggcaggagaagagcataagtccagggccaggggcagaagagggtgacagaatgttcttttactgtgaacccctggagggtaatacctgtaactccctgaggttgctcttttcgctgcacctggggcttgctccagtcctccagcctaagggatgccttctctctgcagctccctgcactcccttaggcagtgtctgtctgaattctgtgcttctgagcctgcttgccacccctcaattgattaaatcattaaccacatcagccctcatctgcctgtctcatgagcctgtggcatggcccatgtccaactcaccttygtgtcccagagcctggctcaggagctcagtaaatgcttcctagatgacactccccccaggccccgcctctctgtttgtccagttctctgtgtctttctgtctttccwcttaggagctcctgtttgccttccggaaggaggcactgctcaccatgcgcccgaggctgctgctgtctgctgctgtttctggggtcccacacatcgtccaaacatcctatgatgtgcgctttctaggaaggtgagtggatattgctttggtggggcaggacattggtgggaagcaggtgtcttgagctcagaaccccagagcttcccaagcactgtttttgagctcaccgtgtgcctgccctgacgtcagtgcaagtttggggctggactgaggagcatgggtggggagaagggctagttccattataccctgagggtttctttagacctcagagggaggtgatgtaatatctgcccacaacaatgttagcacgggtagagtcttctgcacagcctattgctgggtctcacgaggagagattcccaggggcctgtcctctttctacccagagtatatctgtagacatacactatgcagcggatgctggcatcagagacagatgaattaataatcactgtcacaaaaacaaaaacaggaatgcccagtcacatccagtattcagagcagttcttcatgcaaaagttaaaaagctagacaaagagcagcacataaatctttttggacatgtcatctctaggtatattttctagaattttgagaatcaagtatttacagaagaggaaactgaggcagatgcagaccaaaacagaaatgggatgttcctgtgtatgagtgtgctagagaattgtttcaatgtgggaggagggtgagagacacaggggacatggagtgtgttagtgttgatcttttagccagacaggattgagagagtcctgccttcacccaactgggcaacattaggcaaattagttaacctatctgagtttcaatttcttcaactttaaaatggagatagttacactacttagggaattagccagattaaaattaaattagataatcagtgtaaacccttatccctgtgacctggtaatgatgaacgctttctagaggaggtgggtttcaatggctcctggaattgtagaaagacaagctatggaacagactgcttttactcatgaccatttgtgcagatgcctgttagcatttatatcaggcctgagtgtattttctctcatctaactcctgcctacctccacaggtactctcaggatgcatagctcctcatatacagctgttcctaaccagctgtttgttccagtggcaggtggatagcacagcctgggcaggccccacaggcagaaggagcagggaagctctggtgaccaatgtctagctagttagctagacagtgctgtgatgctctgacttgaaaatctggctagcccagtctttatatctcttcctcctgccccttacagactcctggatttcatcaatgtcttgtcttatgayttacatggaagttgggaaaggttcacaggacataatagccccctcttctctctgcctgaagaccccaaatcttcggtaaggaaaggaaagatctcaggtggtccagacatctgccccsctgagctcaggccattggctcttagtaacaaggaggagtctggattcttcttacctgcaggcatatgctatgaattattggagaaagcttggggcaccctcagagaagctcatcatggggatccccacctatggacgtacctttcgcctcctcaaagcctctaagaatgggttgcaggccagagcgatcggaccagcatctccagggaagtacaccaagcaagaaggcttcttggcttattttgaggtgatgggaatatcagtctctgtctagcagttaggactctcccacccccagctggagcaaaggccaggacaaggggcaatggcaagggtgagagctgtagacagggcaaagaggtggtctattagtacaagagaaacccactctctgggatattttctttttctttgaggtaagttatttgagtcctttgtaagggacgaaggacttggtggaatctggatggaagggtttcattgcaccccaaaaatgatcttatatgctatacaggtaaaccctgactttctgtatggcctaaataaaaatcattaatatttgcaatatatataatttcaaacatatgcaaaattaaaagaatagtatagcctctgtacctcccccacatactactcactcagcttcaatcattaataattcatggccaattttgtctcatctctgctggctccctccctccctactactagatgattttgaagcaattccaagacattatctactacaggttctttctctccactccagctctaccctcttcatcttcrtctcaaccaagcttgctattgggtggcggaaagagacatgtttccaagggaatgtaaccaccagaggtggcaatacgagccacataastgtgtggctgtagtgacctggaaagrtcttatggagcaggtagagtttgagcagagtttgaagcacaggaaaatcctgatggacaggaatgactagacgggaaggacttcccaggtagaggacagcaggtacagagggacagggtgagtactttaggcagtagtggaggtgctgcaagtctctccaatctctgctctgcgctggatggatgagggtgtttttctaacccaatgaagcatttttatgagtgctggcatagttgaaacaatgttcttgaagggcaaagaagctttgatagacagaccctttgaagcaccaaaggaraaaaggaatggcttagacattaacttctgcagcacagcttgcgtacctctacttttttgcagcatatagtttttagcacaatgctgggcactcagtggacactcaaatgcttaattatttrtagcaacctagttctccctgccttcaagaactttaaatctactagaagttcaggtgctagtttgagaaccacctatatggggcagtctgtgctgggatctaatgaacaggagagacttgtttatgaaaacactttgaatgagatacagatttggtcaaggatcatgtatgttactcttactattttggtactggcattatacccctggcttggtttcttaaggatgtcatccactctttggttcccttttttccatcatggacagtagagagaggaaagggtaacagtaggaatttattcaaaatagagaggaactcatttgtgagtggcctctccattctctctttggtttaccttcttctcattcrctggttagggattcttggattctttatccttgggcaaggaacaactgtctcttkgtgcttatctccatggcacttcccagaactaacctggtggtcctcttggcagatttgttcctttgtctggggagcgaagaagcactggattgattaccagtatgtcccgtatgccaacaaggggaaagagtgggttggctatgamaatgccatcagcttcagttacaaggtgagaccctggctctttcatgytccagcacatggtttcctaccggtttctatggggtccttatttgtacaatgcatgtntgtgtattgggtggagagtgaaaggtgaggatgattagaccaggggtttcaggcatgcctacattttagttctaactggggctttataatcccatctgttccaagtctctattctgaagagaaagaatctaggttctgagggaataaatagttccctcagttcttacagcttttcgatgatctttttggtctcttcctttccatttggaccagctaatttcataacagataaataccaacacaaagtagatcatggtaagtgctctgtaaatattactgacatgtagcagaaatgaggaagtctgggagggcttcctgagggaggtgagcaggagtaggagaagattatgacattggggaaaggctcagtggtgtagaaagcttatagcaggttcaaagaagaatttgggtgaagcagaggctttttataaagggacttgaatgctggtaaaggtgttcagtcttcatcctgtgggcattttaaggcaaaaacaggtttctacaggtggatgacctttaattttcaaacttttagagccaaactatgaccaccaccctcccttcatgtaagtggtattttatgaagttgaatctggcaggtttttatagtgaactaaaagagaactgacatgctccagtagttcctaaacctgcctctgttttggaatcacctgagagactggatacatgtagaaatcatggttccactcctcaatattcagtaggtcttagaaaaactttggaaactattttagaatgcctccatatatgatccttccaaatgctaagttggcattttgggagctctgggcgtggacacagaggtgtccaagcatgagataatgagggtctggactagggtagttggaaggagcagcagtttaaaggtgagaaattgtcggaatgtggcaactgcttggatattgagacttaaatagagagaattcacagttctcctgttaacggtgatgcagaaatggcaggtgtcggctgttttttgggggaagtttgtgtgggaagcaccagagaggaaggcactcatgaagattcactgcgtagctcctctgtgcattaacactgggtgaggcctgctggggcggagagagataaaaaagcatggcttctcccctctgggatcttgctctgtggtttgggaatgggaagacacaaacaggaaagattaatgactcaatggatttacccaattggatggagttaagtctatgacccataggacatcagagaggggattgatcccttgtgttgggtgaggccctgggatgagcagcagagggtggtcttgctttgaggtgcagttactgtaacttgcagaactaggtgaggrgacatgaagccaggttggggatggttaagggattttgacatagaatatcagagctaaaagagaccttggggattattgttgggagataattataccctggatttctcagagttcctgcacagtttgaggattctgggcaaaggaagcagacaagctttactaaaaatagagagctgctttcctctttcccccagagccatttgtttaccttcaatgattgtgaaagtccccttcccagggaggacttgtttacattccaggttctctcctctctctggaagggaggagggccacatatgtcaaccattctatataagctctgagtctcataatttcagagttcttctctgtagcgcagaccccactgcatatgcaggtgaattgaacatctgaccttcatcacattgtccttgggacatggaaactgactcaaggtgctattctggctattttgttttgttttttttctgtgagtaataaatattctgtcctctgatccagaggtctggggtgttggggtatgtgagtatgtgtgtgtgtgtgcatgtgtgtgtgtgtgtgtatacacacaaaactggcagactaatttcttagcttgtaagtagcataaaagtctcagaaacttcacagtttcagacttaatgattggattcctccttcctcttattttacatttggggaaagtcaactcctgaaaggagccaattgacttggctaaggcacacagctatttggacctgatagattctgtcttttccatcagacttgacagagagcactggcaaggtaataataaaacctggacttgaatctaagctctgccrtttagttgtagtggaggttttaaaaagtgtggatgaaagcctttattttctcatctgtgagaagcatataatattttgtgctctactgtattttatagcatcacggtgagataaggaaatgaattttaaacagtagagcaatatctacagtttaataggataataatggtgattaatgaggtggggaacccagagggttagtagctaacttttattgaagattcactatgtgccaggtattgatccaaatatcttatgcatgggaactctttaggaaaacttatgtagcattcctatgtaacataaaacataagatttaccattttaaccattttaaagtctgaaattcagttgcattaaatacattcatgttgttgtgcaattatcaccaccatccatctccagaactttttcatcttctcgaatggaaaccctgtgcccattaaacagtaacttccccttcctccttcccacgtcccctggcaaccaccattctattttctgtttctgtgaatttgactactctaggtaccacacataaatggagtcatacagtgtttcttattttgtgcctggcttatttcacttagcatagtgtcttcacgcttcatccatatcgtatgtaatatgtgcatgtaagaatcttttgggtctaaacatgttggacatgttattatcctcttttttttttttcacaaatgaggcagttaagacacataagggttacataacttcttcaggatcccatagctaataaacagtaaaagctagattcaaatgctggctacactcctaaccacccagctacattgcttcctgagggactatcttcagttttttgccattgtacccagtctagagactgacaagtacagcaggttgactgactgttacttttacaggcatggtttataaggcgagagcattttgggggggccatggtgtggacattggacatggatgacgtcaggggcacgttctgtggcactggccctttcccccttgtctacgtattgaatgatatcctggtgcgggctggtaagtagctgtgacctagaagctggggttggaagttgcataaccaagcactgggtaagkcccttctgctagatctaaatgccttggtgaggcaacawgacattgaggggagagaaaaagctttgccaggccaatatgttttccagtctttgttgggatacttggcccttatttgacctctttgagcttcctttgttctatttaaaatgggaataatctgtatactcatgacattattataagaactaagtgagctatggaatgaaaattctcatagttagcactcaatatatgttatttatttctctctttctcttactctcatgggcaagggctgagggaattaggtttcttttgatatctctttttgatagtagaggctaccctggcaattaggaaatggaagctagcatgcaagaggtgaagcatccttacggatggtttataatcttcattttatgggtaatgcgactggagctcagtcaggtcaagtctttaggtgggccccagtcccattgttcacagcatgctgtccctagcctccttgcctctggctttgttcctggtgcctcctacaacatagagacataagaagcttctccttgagcattcatcaagtaattatttagaattaggcctcgaggcaaggttttgctgatgatgcaatcagagatgtcaaagtgagggcttaagcacaaggaatgggtgggctcctttctgaggtcattcatggaaaatgtagcaaatccactgagtgcctgtgggtgtctgggacctgtgaacatggcggggtctggagcaaggcttctatgtggtgggatttcatctatgtcctcaagtasgtatagtatgaaatcttacacttctgaatttttggagcaggtacttcagccctggattggttctagttctgccagtaattaataggatgagaatgaagtggtaggaatctcattcttttctgttgattttctctagagttcagttcaacttctttaccacaattttggctgtcatctgctgtgaattcttcaagcactgaccctgaaaggctggctgtgaccayggcatggaccactgatagtaagattttgcccccaggaggagaggctggggtcactgagatccacggaaagtgtgaaaatatgactataacccctagaggtacaactgtgacccctacaaaggaaactgtatcccttggaaagcacactgtagctctaggagagaagactgagatcactggggcaaygaccrtgacttctgtgggtcatcagtccatgacccctggagagaaggccctgacccctgtgggtcatcaatctgtgaccactggacagaagaccctgaccyctgtgggtyatcagtctgtgacccctggggaaaagaccctgaccyctgtgggtcatcagtctgtgascyctgtgrgtyatcagtctgtgasccctggaggaacgactatgacccctgtccattttcagactgagacccttagacagaatacagtggcccctagaaggaaggctgtggcccgtgaaaaggtgactgtcccctccagaaacatatcagtcacccctgaagggcagactatgcctttaagaggggagaatttgacttctgaggtgggcactcascccaggatgggtaacttgggtcttcagatggaagcygaaaacaggatgatgctgtcctccagcccygtcatccagctcccggaacaaactcctctrgcttttgacaaccgctttgttcccatctatggaaaccattcctctgtcaactcagtaacccctcaaacaagtcctctttctctaaaaaaagaaatcccagaaaactctgctgtggatsaagaagcctaagcccctctggtgtcagaaaccagggaaaacccttgtcttttcttctaagtgacatgttggaagccttctcatcccggggcaaagcaggcatcaaaaccagaataggccaatctcttttccattaaataaactgtaaacacaagaacccaccgagttctctgagattcttttcttgaattgaactctgcaactcagttgtcagcttcttcctttcaaggtcattttccccactgctatttttggaaagagggagtttgtgtctagtctacaatgatgctatcctgtgtggattatgtgcttccttctttgctgtgagcaactgctcacttcactgttggttggagccagaatctcttctagaacagtttccaccatcctcaaggggagctgagatggggagggggaagttgagtcttccaattacattctctccttggtaaaatccttgttttccctgaaaaaacaaccccatctattctctcctcaagaagtgtttgaggaaaaggtataaaaaaggtactttaaaaattattttcttatagtattaccttcacacttctgctaggtctcctctagaaacaccagttctcacacattaaaactttaatccacycagggaacattttcctaggcatgactgtccctcataagttgctatagacaccagatcaatttctagccctccaattctaggagctagtgctacacagagtgggtgccatacctattattatgttactttttcttttggaagtgtagcctccaagkctttaagccagagtctgaaattaaaatgtccataggaccaggcacctgccataaagattgaagcacgtgaaagcacatggccatttgcttaacagaacctaggtcacatatraaacccttttgccttgacaaaaaaattagctgggcatgatggctcacgcctgtagtctcagctacttgggaggctaaagtgggaggatcacctgagccctggagattgaggctgcattgagccacgatggtgccactgcactccagcctgggtgacaaagcaagaccctgtctcaaaataaataaataaawaaatatttttgatgaatctgagttgtttttctgtcccatcttctgcatgcactttattcaagggcaacttgccttccagtttctaatttatctatttttttttcttatttataagcttccttgaacttatctcttaggtatacaatgattgggtcttctgtctttatcatcgaatccaaagcatagatcaatgggttgtcaagattcttgcctctatttatgacagctgttagttgcagataatggaatccactaaagctaatttaagaaaaaagacattagatggtattagagtttctgggagggtcaggaaaccaggatgggatactacacatctggaaacaacatgtccaggagatatggatgactcactttttaagacatactgttaaaggtctcagcttttaccctacttgcaacctaacaacctagccttttgccgtgtgtgtatgcacactacaaaaaaacaagacctgtgggtcagagacaagggaatgtattaataatagcaaaagccagatcaaaatcttttgccagttccacaagctacaagggagatggaatgaggaccaaactgtgcctgcacattcagtgggtgcatttcaagagagaaacccaaaattaggaaactatgatgttatatataaggctgctgatgaccagcccatttttcccctcttcttcttcgtccagagatagagatttatctgcagttttcaaggctatttcctatttgaatatccttgaaaagatagtccaagatgtgcagaaaggccagatccatggagaataccttgggactattctagcggtaatcccactgctgtcactgcctgcagctcagcatccgtgatgttggagactagatactagaatctctacctcagcttttccagaagagctggtctcccctatacattaattacctttattctgtaattcacctaaatttcctataggcacatttgcttagcagaacctaagtcacaaatgaaatctttacttcagggaatctgggaattctaggtttagcttgctagcctatatcacaggaaagcacactggagggggttagaatgagtactgagttaggcaatgttacagctgtaaggatcactctgggggtatgcaacatacatacatacatacatattaattattcttctcatacttgagtatcctaacaacaattgcaaaaagcgctcttacctaatataatgcaaaaattcatcctctcaatgaaaatgtggtagtgatgggggcaactaaaaatggaatacgaacagtaacaaatgaattctacttaacaacaacaatgtaactgcactgaagaggctaggaaagaaaagtactaaccttgataattttaactttggaaaataggattttgaatttatatggaaaggctaaagacaaaaagaactatacacaaatactgtactctagttagtaaatttatttcttaccggtgtacacattagcaattctttaaaaaaaaaaaaaaacctttattttaggttcatgggcaggtatgaaggtttgttacacaaggtaaacttgtgtcacaagtgtttgttgtacagattatttcatcagccaggtattaagcccagtacctaacagttacctttttcccctcctcccacttctcccaccctccaccctcaagaaaacctcagtttctgttgtttccttctttgtgtttatgagtgctcatcatttagctcccacttataagtgagaacatgtggtatttctttatctgttcctgcattagttagctaaggataatcgcctccagctccatccatgctcccacaaaatacatgatcttggttttttttgttttttttttttttgttttttttttttgagacagagtctagctctgtcgcccaggctggagtgcagtggcgcgatctcggctcactgcaagctccgcctcccgggttcacgccattctcctgcctcagcctcccaagtagctgggactacaggcacgtgccaccaagcccggctaattttttgtattttttagtagagacggggtttcaccatgttagccaggacggtctcgatctcctgacctcttgatccacccacctcggcctcccaaagtgctgggattactggtgtgagccaccccgcccagccgatcttgttttttttatggctgcataatattccatggtgtgtatataccacttttctttatccagtttgtcactgatgcgcatttaggttgattccatgtctttgctattgtgaatagtgttgcaatgaacattcacctgcatgtgtgctgtatcctttttttttttttgtctgaggcagggtgtcactctgtcacccaggctggagtgcagtggcacgatcatggctaactgcagccttgacctccccaggctcaggtgatcgtcccatctcagcttccttggtaggtgggaccacaggcatgcaccaccacacctgactaatttttgtatttttggtagagacagggattggccatgttgcccaggctgatctcaaagtgctgggattatggctgagagccgctgtacctggccacatgtgtctttatggcagagtgatttctattcctctgggtatatacccagtaatgggattgctgggttaaatggtagttctgcttttagctctttgaggaatagccatactgttttccacattggttgaactaatttacactcccatcaacagtgtataagtgtgttcccttttctctgcaacctcgccagcatctgttatttgttgacagatactgactgtcaacaaatagccattctgactggtgtgagatggtatctcattctggttttgatttgcatttctctgataaccagtgatgttgagtttttttttcatatgcttatcggccacatgtatgtgttcttttgaaaagtgtctgttcatgtcctttgcccgctttttgatggggtcgtttttctcttgtaaatttgtttaagttccttatagatgctggctcttagatctttgtcagatgcatagtttgtaaatattttctcccattctgtaagttgtctgtttactctgttgatagtttcctttgctgtgcagaagctcttaagtttaattagatcccacttgtcaacttttccttttgttgtgattgtttttggcaactttgtcatgaaatctttgcccgttcctatgtccaggatgatattgcctaggtgtcttccagagtttttatagtttttggttttacatttaagtctttaatccattttgagttgatttttgtatatggtgtaaggaaggggtccagtttcaatcttctgcatatggctagccagttctcccagcaccttttattgaataggggagtcatttctcctttgtttttatcagctttgttgaagatcaactggtcataggtgtgcattcttatttctgggctctctactctgttccattggtctatgtacctgtttctgtaccagtacaatgctgtttggttactgtagtcctgtagtatagtttaaagttgggtgatgtctctagctttgttctttctgctgaggtttgccttggctattcgggctctgttttggttccatatgaattttaaaatagttttttctagttctacgaagaatgttgttcgtagtttgataggaatagcattgaatctgtaaattgctttgggcagtatggccattttaatgatattgattcttcctatccacgagcatgggatattattccatttgtttgtgtctwctctgatatctttgagcagtgttttgtaattctcattgtagagatctttcaccttcctggttagctgtatccctaagtattctaacctttttgtggcaattgtaattcccaaattagaaagggattgcctttctaatttggctcttggcttggctgttggtgtataggaatgctagttatttttgtacattgattttgtattctgaaattttgctgaagttgtttatcagctgaaggagcttttaggctgagactatgggtttttttagctatagtatcatgtggtctgcaaacagagatagtttgactttctctcttcctatttacatgtcattttttttctttctcttacctgattactctggctaggaacaattcttaaactacctcatgtatcttccaaaagtaagcaagtaaataaatgtcctgtagataatgagagctgtgtttctcactgtcagagaaataagttataaatagggaaagagaagaggctagaatgaaccctttggtattggaattgaaggtatttcagtatttaattaaggttttatttaaatatatatttaaaatatatattacaataatatattttaaaatatatttaaaaccatgattatatatccatacagaaattgatataaaatatgtataacatatatttcccagctttaactgctgagaggcccttgaaacaattacaatattataataatatatttataaatatgtatttaaaaatatatttaaaaccatgattacatatccatacagaaattgatataaaatatgtaaacataaatgtatttcctagctttaactgctgagaggcccttgaagcaattatattccagtagcaataagtatatatagtgcccagatatcggtttttaaattccattcttcaataaaaaggaaccaggagtccctgaagaaatggctgattcttgggctgaggcagggaaagtagaagaaaagactgtaacatcttatggttacagagagtagtaaagaagtgctaaaaaagatgattgagccatgtcaaaaggatacaagatccaccttgaaggagttcccaatggccaatcaaatctgggacaatttgagcaacaaaataaatgataaatataataataaaatgaattatagttcacagaataaagtaaatatcaggagtctatactgttgtcaataaatattgaataaatatataattagggaagaaagggcagttcttccttacaatagaatgccagttaataaatgtaaaagtggtagaaacagaaaatcatgatttggcaaacactacatagtaataattgttagagacaagaaatatcatgggatgttaaaattattgtataaaaatatgataagaaacaggatatttgcacagtctgaaaatattctgctacaagatattaattataaagggaaaatagtaacttcataatgaatgaagcaaggcagacacaatttaaaccaaatgatcaaagttgacattactttctcatcaacaatgagacatgtcaacattatgtaacacccaatgtactgagaaagacacaatatcagttctgtgatattcttttcaaaaatacgtaacttgaattcaaacatagaaaaacatcagacatacctaaattgagaaacattctagaaagataactggccagtcctcttcaaatgtgtgcaggccactaaagacaggaattgttccaagttggaggagactaaggagatacaacatctaaatgcaatatagggtcatggattgcattctggaacaaagaagatgtttccttcaagatagggttagtattgaacaaatcttaccatgtccattgctacactggcctgagacacctctcacctgggttactaagatagccttcttggcttctctgctttaaaccttgtcccctgtgctctattcccaacccagcagccaaactttagtctcataatgttcctttgcaatggcccctgctttcactcagggtgaaagacagtgttaaaaayggcctaggagactctcccggatcaggcctctctcctcacaccatgctgcagttctgcccatctccttgttttcttgaacacccagacacggttctgcctcaggacctttgcatgaactgttctcctggcccagaacactcttttcccagacgttccatagctcattacctccattctgtcttttatttaataattcctttttcaacaaggc

SEQ ID NO: 95922 - DNA, 31664 bp, Homo sapiens
agcatcagttttctcttttgcaaagtaggaataataagtcactggatcattgtgaaaattaagttaatgaacgaagcagttattattttaaccacaaactatgtcaccatatacacagcctcatgaccacgatagcgctacacctacccacagtaggacagaattcgctatatagcaatccacttgctttgtggatcactgacttatagccatgcccagaatacagaagctggatcaatcaatcaaaaatcaaatccactgggaaaataatcatgttctccaaaactacactaaaactacgttggcatcaccccacctccccaccctcaattcataattcatctagtgtccatgagggctaagactgagcaacaagggccttgtgtgttgtggagtcagctctttctttttcctcctcccctttcccagagtcaatatgaagtctgacacgctgccttaccaaagacaaagacttcactttgctgaggatgccaagccagcgaggtaggaaggtagccaggcgcactgcagcctgcaaaggagagacgagggtctggaccaaaactcagagtacagaagaagcagtttctcaaatgatatcactctaaatcctgggagcacctttatttgatttcccaaaccctgctaaggcagcagtgtcctcatccttgagcctcataaccatttatcccagcagcctcctgccctttctggacacgagtcacaggcaagtttcaggcacgaatcatgacgataacaattctggcccctttgtcctaccatctaataaagtaaatcacccacccaggaactggcccttcctcttggtattcattgcacagaatggggttagcagagcctcactggaaaagaaggagattatgtcactcatgtcacagtaactacactgggcatctagcaactatgctttgacactggccaaagacagtctcttctatcagggttccaagtactattctcccaccaatgaatctcagactcaccaatctgtgatgctggcttgggacagcgggtatcccagagtaaaattctattgtcctagaggaaggtggaacagaaaaaggatttcataatccaaaggagcagttgcaggccagaaagtctccccactagagactttggcctatggatggctggagtgtgtttagggaagaaggagctatctcttacctcgctgcatgaaagaaacacagagtccttgtgaggagaggcagcaacacaagtgacctgagcagcatgagctataaaggagagagaaagagaaatatgatagaaaacaagctgaagcattactagagggccagcccaggaataatcaaggggcaggagggagggagggctggtctcatgatgcaatttaacaaattttgtgggagattatggattagacaaaagctaagaggagaagtttatagacttataaaacctaaaaagccttgtaaaaaaaaaacgtattagtgaagataatgaatgagaaattaggggcttagtaagaataacaaaggaatttccagtttaggcatcctagacgtgagggctaaataattctagaatagcagtcttcatactggagtacacacacctccaagtagtatacaaaaacttttgagggagttctgggcgctaatagtattaagagagccaatttctctaatgttctctttcttaaaattgaactgcctctgttttcaatcactcttctcccacttcatagaaagaacacatacctgtcattcatcccagatctttccacgctacaatgctcaggggtataaaaatataagggttctaaactaagggacaaaaggggcttttccataagaaccaaagagcaaaaagaaagagcatctaggtaaaattcaatgaagggggctgatcttgtttcagtcacaccacaaacacaagtatggctctgtgacttaactctgtttctgtctaataatgagaactaaaaaatatgatagatcattgtgataaggacatattcaacaactttatctgaatttaaaaacaaagtcagactttttctgacagaaaatttagtctatcttggtccactggctttacaatgcagactggcttttgccagttaggctgtttggtagacattcatgcaaactaagtagcgttaacctgcgaatctaaaattttgacaaatatatgcttgaaataagcacacaataaattatatgccagaaattaccttctctgcaactacttaaataagcatttttaggtatcagtttaaaaatgtatgagggggcacagattttcaaaactgttttaggaggtctacatgtaaaaaactttaaagtcactgctacatgttaattagaagctgtggaaaccttttctacagtcattttaccagactttcccaggtagtctgaatgtggcccttccctgaggcagaaggatggaattaaaccagtttccatagttctttcctagccctagaattcatagaaagccaacaggataagaagtaagaaaaggaatttattgctcacttgaaaaaagcaaagctctgggacaagcaccatggtggtgtacaaaagatgaatacatggttcctctaccctcaaaggttttggggcagggtgcagtggctcatgcctgtatctctcagcactttgggaggccaaggcaggagaccacttgagcccaggaatttgagaccagcctgggcaacatagcaagactctgtctctacaaaaaatagaaaaataataaaggatttggaattcagcagggggaataagacacaaacacaaagaactaacaaaaaggctgcatggcagaaatgctgaaaaagagttagcattaaccaggaaagcacatcatatgtctaagaaataaaaagcaaatataatagacatagaacattgactttttttttttccctgagacagtttcactctgttgcccaggctggagtgcagtggcgtgatctcgactcactgcaacctccgcctccagggttcaagcacttctcgggcctcagcctcccaagtagctgggattacagatgtgcaccactacgcctggctaatttttgtactttttggtagagtcaaggtttcggcatgttggccagactagtctctgactcctagacttcatatgatccacccgcctcagcctcccaaagtgctgggattacaggcgttaagccactgcgcacagctgggcattcaacattattgtaaaactatttccaagtgaccctgagggtccaggatactggaccttggatatgagtcagtgatttctctggcctataacttagtcatgtactttgaagttagaaatggcagggaaaggcacttagccattgagagaaccacagtgatcccccagcatctaaaccttggaaccatgtacacattaaggctctagacattatcttcacaaagaatggctcccaagataaagttaactactagtgctgttaatgaaagtgagcagaaagaggggcattaaaaaagtaatggttctcaccagaaaacagacattttatgaaggtaaatactcaaaagttcaagatttaaaagtctcaagatttatccctcaagaatgtcaaggatctagtaagcttgaagagaggaaatggagtaaaagggcttcaatgccatgacaagaaaatgggattttaatccacaggccacaagaaactaataaaagaccaaaagagctagattgctagtggagagatgagtgccactgcctgtgtaaggtaaagcctgaaagtgaatacgggcatagaaatggacaggaaggtgactgaccagtggaaaagactaaaaagaacttagtggccaaccgatggtgggaaaacagaagaggtggaaaaggaccgagtttgagccctgtgttgccaaggtggtgaggccatcaatagaaacagggaaactggctggtctgaaggtagtgagttatctcagttgattgttcagtcagttacagattaaactccttgttctattctttcctcccttttcactactgcacttgactagtcgaattaaaaaaaaagaaagaaagaaacaaggaaattgagaaaaggacaaggagtagataccggagcctgactattgttttacaagaaaactatcagaacatggaattgctgctcctaacatcaaagcaaagttcaaaaagtccaaaaacacaacagctaacaccagggctaaaaatgaaagaatactcacctcggtatgaactcagtaccacctgctgagcaaggtcccaaaccttgatgctaagaagcaaaagcaaacagacatttaatcttgacctacactatcaacataaaaacgtgttcaaacaagaacttcctgtaatcaacattccccaagtctttgcctcttggactgctgctatggtctacttacgatggactgcaaaatccctaaggaaaccttatagacatgctaaaataagtcactggattcttagaataagcccaaaatgttacctaatgaggttaacaggataggaaaggcacccacaggaggcttagagacaggagcaatgagaacagggacccaccagatgtctttgctaccactgacagcttgtgtgccagagctcaagacactgactgtagacacaatgtcatcatgctcatacttgcagaacttgctgacaataagtgtctcattctcatctagttcccacaattcaacagcacctgttgggggtagggtaaggaaaacatgagcttggattataccaaggcagtaattcacttctaggattcaaagagccattgtcactaaattaacaaagtaagttagttattcctgtaaaagcaaagtccacatcattggagagttcagctaatttctgagtctttgactttattctgcgttactgttttcctaatgacagcccagacaagtaggtgcagaaagcttccagaaaaagacaaagatggaacagtctgtaaaattcattatctgcttttagtgagagaatatggaaaatgagctgcaaggggacaaggatgaagtttccacaactgtttaagcagcacactatccagtgatgttaacacttccccaatatttggacactagtaagtatttgctgaactagttgaataaatgtcttgcagagtctttaaaaatatgttgaataattgaacgtcttgcacagtgactggttaagtatagagaatccgccaaaagttgtcttgattatgtagtgttcaagctcaactgtcagagaggttaaatctatcaaaaactgggactttaaacttccatgcaatgccggccaacttccaaattctgattttaaaaaaaaaaaaagccaaagcctgcatcgctaagcctaacagtcaacaaaaagaaagcagaatgaagacaagaaagcggtaagaaatgggaagagacatgtagcacagattggcttcaatgtcatcttaaaatcaagattatgcttggtctgggctgtgggggttaaggggcaggttacacagaagaaaaatggttccaatccgttgcttaattttgttacggatttttctaggaaatctcaccagacaatttagaattttagaaaaggtatttcccacctacacaagagtttgcattcggggccaacactctcaggctcctccaagcactgagtataggacgttagatattgagctcaaccctacggtaccccaagtctccattctaccgttccacccgggggtgggggtggataatgggatagtgactcacctgaatcggaggccactagaatacctctctccccaacccaagtgaggtcagccactccagcctccgtttggactccggcggagcagaagccttcgttgggggcggcacaggggtccttaaaaagccagagggagccggcccagcagcgcccactcaggctggaggccccgaggagaagcgccccatctacggggggtacaagctgtcagcgcgtgaagggtagaagggttcgcctccatggagaccgcacagaacagcgttccggccgggtctggatctgagctcaggaacgcggggcagggctggggacagctcggtgacgcgacccagggtcaggataacatgcagggcggggatgggctgggagggtcagtctccggggaggggcgccctgggccggggtaagggagctcccaggcccgggatctcggctcaccggaccggtaccgcgcagcctccaactgccgttccatgcaggcgggcgcatttgggggaagattccactcccgggccgccgggggcactagggggggtggggtttccttccgcatctccacggttccaactccaacctagactcaaactggacgccggccggagactcmgctccggcagcaaaccccacgtggtgcacctctgagcctccgcccctctcccgagggaaccgcaactctacttctcgcgagaattgcttctatggctccatcctgctttccggctgtcgccctcatgcrataggctctcagcgttacttgactcttctcgcgataatttttttwaaaaatctcccaaggaaagttgaaggaagagtacaaaattttcatctcgcgagacttgtgagcggccatcttggtyctgccctgacagattctcctatcggggtcacagggacgctaagattgstacctggactttcgttgaccatgctgtcccgggtggtactttccgccgccgccacagcgggtaaggggyatagaccctgctctggactatcagagtgattggaaagaagygaatctaggggtgacagggaggggagaagggcgcagcgacacgggcctgagmggcgagtggtcagtgcagttcggaagggagcgtggggtcttgagggacgggaaagaggggtacataggcttagtgatagagcctggcgggggtaaggaaagggcaaaccagatttcatttgactttgctgaccttcgccttgtctatctgcagccccctctctgaagaatgcagccttcctaggtccagggtaagtgtgaggataatgctycctttcgtctttgttttcactaccttttatttcccgattcctgcccccacccccttagctttaggtcagaaatttctttccgataattttgggacacttaaaccctctttcagacaagacacttgttcctgtaactgccaggaacgctctcatgtcacctaatgaccaagattttagcaggataagtaacgtattctaactaaactagaaattggttttgctgtcttctatacccgccctactcctttgtgaccttcccttgggaccttatgacatgtagcttccacagcctgaatccgagtagatkacatacccaagaataaattttgttcaataaaacagtaaagcatgttgtttacagtcggtttcccagatacctagtttttgctgccatatgataacaatcagagaaatcattcattgattcagtaaatatttatgttgcctaaaaacataaccaaggatacaagaatgagtatggctaattacctgccctcatggagctcacagtctaggaatgggaggcaccttaagagtattggtttagagtgagggctccacagccagtacagggtccctggcccctccacttactggctgtgtgacctcaatttcctcatctataaaatggcgataatagtgcattgtggcttttgagaattaagagacaattgctgtgaaactcaaaaacagttcttggtacatagygtgtgcttagtaaatttagcagctgttaccgttaaaattgttccataagacatgtccattttcctagagatttctctttttacttccaaacttagttctaaagcttgcaaaatacggtaactcaaattgaaaaaaaatggacttgaaraagtggtcttatctataattaagtctcatgtatgcaaaaagtaaggctataattgactgcttccaacttagaagaaaaaggaccccatacagactggtaaacaaataattgtaataccaggtagtaaataacttatacttacaagatacaaggaatatccttggttttctttcacactccatgtccagtacctcagcaaggctcttcctctagaaatttggactctgactgctgcttccactaccgctaaagtaggaaccactataaaytttcacctaggtattttagtagtctcttaattagtcttgcatctctattcttgtcccattacagcccattctcataatagccaggaggattatgtcaatcccccaccaaggccttccagagctccccatcccacttgaataaaatccaaacttagcataacccagaaggtccaacatgaattgattccatcctatctcttgacaccatctccttgtggtctctttttagctcattctccaaccttggtgttcctctgaaaactaccaagcgcattcttgcctcaatatctttctacttgctcttctctcttttccccagatsattgggtcaaatgtcatctgactccctaccaaaaaactcttccccattttgttgctccctatccscttaccttgctcagtttttctccatagcacttagagctgcctgaaattttgtatggagatacacactcacccttcccatacccccactagaatgttgaaggctggagctttgttcattgccatgttaccggtgcctagcattagtagaaagtcagtaaatgttttttttaattgattaaaagaatgaatgttagcccaaaatggggggagggctttacaaatctggaggctaattggtcttggtagtcattgctcctgattggtcttgatagtcattgctataaagtcatggtatgaagggcatacaaggcagaaggagcagcataaggcaatttttttgtggtgtttctttgtttgtttttgagagctgttaagtaattccaggagagtaagagaatgaaggaagataaggttataaaatttggcaggaccaggcacagtggtggttcatgcctataatcccgaggccaaggcaggaggatcactggagcccaggagttcaagactagcctgggcaacatagacaaaaacaaaacaacaaaaatttttaaaaattttttaaattagctgggcattgtggtgtacacctgtactcccagctattgggaaggctgaggtgggaggatggcttgagcccaggaggtggaggctgcgagtgagcagtgatggcaccactgcactccagcctgggtgacacagtgagactttgtctcaaaaaaaaaaaaaaatgacaggtactagattatgtatgttatattaagtagttttctgtaggcaggagagagcctgttgagttttcaagtcagattttcattttagaaacattggcagtaatgtgagtgggctaggtttaagttggggtatttaataagaagcagaggccaggtatagtgtctcacgcctgtaatttcagcactttgggaggccgagacggcagatcacagtagtttgagaccagcctggccaacatggcaaaaccccgtctctcctaaaaataaaaaaaaaaatagctgggtgtggtggcacacgcctgtaatcccagctactcagctactcgggagactgaggcacaagaatcacttgagcctgggaggtggaggttgcagtgagctgagatcatgccactgtgctcccgcctgggtgatagggcaagattctgtctcaaaaaaataaataaaataagcagagagaccaggttttgtattgttaaactaagcaagaggtgataaggacttgaactaaggtagctagttagggagacttgtcagcctaagcataccatttagtgctatgatttaaatcagtgcttcttagcctggggtggtttgcctgcaggtgacatttagcaatgtctggagatatttttcagtgttaccataggatgggtcggggagggaggggctactggtacctattgtataaaggccacaaagatactgccagacattctacaatgcacagaacaacctcttacaacaaagaaatatccagttcaaacgtcggtagtgctgaattgagaaaccttgatgtaaatgaagraatctcaagcatgattctcagatttcaaaacctggtggggtagctaatatatttggaggcagaaataatattcaaaagataagcattgtaccaaaataaatgaaataatgtaaattcttatattacaaggagatagaagttgagagattggaggaatggagggtaggaagtgggacagaaatacactgaaaacttgaaggagactaaatgacagcagatataaagggactagattttatttcatcagaagcttaaggagacatcagtatgctgtaactgttaaaagtgtagtcttaagctgctttaatacaagaatagtttccaaatccactgttgataatagttcaattgttcaagctcagtactggcaatagtaagttctcaataagtatttgtaggatgaataaattggccagactatacttaaagtattatattcagttctgtatacctcattaaaaaaaaaaaaaaaagataaaaccagagaagtccttacgggcaatcaggattgtgagggaacagatgtttgacccaggtacatgtgtgttatcttacatagaaaagcaaaattagaactaagaatggattgaggttccaagaatgtatgtatcatctcaattcaaagatgaacataattagagctacccagtactgaaaaagtctgttacatatagtgtttagcactctcatcaaagagagtattcaaaaaggtccaggagcttacaacatatcaggcatataatagctaaccacttacgtagaacttttccatgtgccaggcatcattctaagcacgtcacatatattaactcaattaatcctctcaacaaccatataaggtattatcttctatttccattttactgagagaaatctgagattacaaaagcttaagttctttactcaaagtcaaggagcaggtctaggatttgaactcaagatgcctatctgaccgccacgtccacattcttacatatttcagtgctaatgatagacatacaaagtgctagacagatgatctgcaaggctgatagaagggattccagtattgggtagaaggttaaatgtctgtgattaattctttgctgttgtcacagctgattactggaccctaaccttcccattcccagtccattctctttccattatgagagttagaaaactgcctcaattatcaaccctatttattgtttctgctcattattcatacactgtattctccttaaagaaacaggctttacatttgtacaattactacctgtagggtattgcaggcaacaaggacctttcatacagggcagccacaccttgtccctgtaccacctcttcctgaatacggaggaaaagttcgttatggactgatccctgaggaattcttccagtttctttatcctaaaactggtgtaacaggtgagcatttttgcctagtctctggtaatatgttttgatggcaccactaaaatcaagttaggtgggttttcttctttggtttttgttgttgttgttgttgttgttgttkttkttttttgagacagggtattactctatcacccaggatggagtgatagatcacagctcactgcagcctccacctccccaggctcaggtcatcctcccacctcagcctcccgagtagctgggacttggcgtgcacccggctcatttttctatttttttgtagagacrggctttcaccrtgtagcccaggctggtctccaactcctgggcttgtgggatccacccatcttggcctcccaaagtgctgggattacaggcttgagccacccgcctgcagccgcaagtcagctatttttaaaaggaaattgtaacaattgatttgattgctccaacttgtctttggtataaatttatttgggattttaacttaattttacagcattatctctgtttgttagtagatcaaattttttgatgcctgctttatgccaggcactgttgcagtcatacagtgttgaacagtgttaagtgcctgctgtcctggaacatacattctgttgtaggatgacaataaagaaatgagtaactgtataatatactgttaggtaatgaaaagggtacgaataaaaatgaagccatgtaaggcaagagtcccctgattaagtttatgattctctctactacatgtactgcctttcttggcccatacccaagtattgctatgactggaacattggaaaccgaagattgttttttttttagccctggagtcacctaaagtagcattttcctaactgaaattgctagaaacattagtctcctcagacgtccataggtgataacaatgttacatatgatagatgtttcttgcaaattcatatttaaaatttgtatattaaaggcagttaaaaaaaactgttggaactttgtatgggaaaccaggtaaaatgtatttgagtttgtaaccctgttgttcttatgatacatcctgccatcctatgattctcagaaatactgtaaaatgctttcctaaaagcctgctctgggcctcccttacatcctgtgaggcgcggaggaaagactaaataaatgtaaatcatggtttgcatcctttcagaacacatggcctggttaaagaaaaagccatatttgaagcattgtaattaggtgctacaggaattgagaatcctaatatttattcatccttttatatacatatcactttgtagttgttttttgcttgtttcttgtgtaaattttatccggtctagtgtcccattcgataaatagtatattttgctggacaaattacttcagaaagttatctgacatctttgtagaatagtttaatttactgtgcggggtattgtgcttaacattatttctcaaatttatcagactgaagaaggtactgtccccattttacaaataaggaactaaattcagagattatttagattgctcagtttctttaaaattgtagagtcagtatacagatttccctgagtccatatctttgttctttcaactctaccatactgcttcccaatccagtgttttgtctttgaatctaattaagtcattactttgccttcagctaatcaaatatagaagtacctttctatcttccctcttttaggcatagcatatccmttcataaaataactctttcttcttttaggaccctatrtactyggaactgggcttatcttgtacgctttatccaaagaaatatatgtgattagcgcagagaccttcactgccctatcagtactaggtgtaatggtctatggaattaaaaaatatggtccctttgttgcagactttgctgataaactcaatgaggtaagaaccataaactttatttcctattttagactagcagaawcatgaaggtcatctagtgatatttttgatatgagtgttaggggagcaacatatagaaatgaatctaatgcttcaaataagtgttaacgttagttactaatttgagataatttttttatatctactaaacactttagcttttctatagtttaatcattcaaaagatattctatagttattatgggcaattctttttaaggatttgtgcgtttctttctatgtttctttgtgggtgtttttacaaatgagatatacaactttgaagaagcatgaaatgaatctcctttttttaccctttgtgctttcactgatctttgttgttgctatcacaattgtagcaaaaacttgcccaactagaagaggcgaagcaggcttccatccaacacatccagaatgcaattgatayggagaagtcacaacaggcactggttcagaagcgccattacctttttgatgtgcaaagggtrggtttcagaagtttctaggaagaatgaagttacttgttgtgtgcatttttttaattcagaattttttatgaagaatggttaaatagattgaacgtattttatttagaaaagagaagatttgtgtaggagttggcattcacggctattcaaacatttaagaactgtcaagtggaaaaatagttcaaattattataaaattagaawctatagaagctattaaaaaaaattttggatccacacaaaatgaaatagtcattaagttaaagctgatttaaaaatggcatgcactgtgtaaggaagactaggtaaaatacatcctgtgtatttcatacacacttgctgcaagaacatcttaacatctttgctgtaaggaaatctgatactgtacattctaaatccacaaagcaggcagggcacagtggctcacacctgtaatcctaggacttgaggagggtgaggcagcaggactgcttgcacccaggaggtcaaggctggagttagctgtgatcccaccactgcacttcagcctaggcaacagagcaagactctctcaaacacacacacacacacacacacacacacaaacaacaaattcagatagcagtagagctttttatcatggtcagaacatgattagattctaaaatatgcagcttccaaaacaatctttaggaatatgttcaagtattttgttattactgtttttattttgagccttgtactttatggctaatatttaaaagtgaggtgctgttatgttgaagttttatattaaaatgaaatgaaaaatgagatgctaaggtagagtaagcatctgaaatagttaggatcttggccaatatttctcaatattggccaagatactaagcatctgaaatgtttaggatcttggccaatgtggtcttggtaccacatggattagagttatctttggtgttaatttttttgtccctttccaagacttatggaatcagaacctttcttaggggctatccagaatctgtattattttaaacaagatccctaaagactcttaagcacatggatatttgaaaatctcagaaaatgttaattccatgtatatttaggttacaaagggagaatgcttcctgcttcttgcatagtatatacacacacgtgaatgcatgcatacatatattttggcttttttaaaaaaccatattggaaaatgtagctttttcctaagagtcaaatgatagtaatttaggtttttatttatttacatttacttgatagatatttattgagttcttcctgtgtagatattctgatcaaggcagagtgctgaaaatatagtggagaacaaaaagcttctgccttcatggagtcttattttctagccagcctttgggagaagcacagaaaataaataattgaacagatgcaaatgtcaacaggtaataaatgccagatagaaaaataaactagtattaaaaagattgcaggccaggcgcattggctcatgcctataatctcagcactttgggaggccaaggcgggaggatcacttgagcccaggaatttgagaccagcctgggcaacatagaccccctttctacaaaattgcaggaggagggagtcactgtttttatagggcattcaagaaatgtctctaatatgatatttgagcagasacctgaaagaactaatagtgcaaagtatgtggatttttggggaaataagttccaggctgagggaagaacagttgcaaatgccctaaacctggaagtttgcttgatacagtcaaggaaaagtaagaaggcccatacagctgaagtagaattggtcgggggagaataaaaggagatagagggaggcctgggactgtgatatataaagaccttaggctcctataagaactttgacttggactctgaatgagagaaagtcattgaaggatcattctgattgccttgttgccaatagccttcagtttggtatgcattggtttgtgatgcctatgggttagccaagtagagatatgtaagagcttggccttatgtagccttactgcctgtatgctgatcttggcttcacagtttattagctctgtaaccttgggcaagtttcctaatttctgcctcagtttcctcactgcaaaatggatacaattataataactatgccatggtttggttacaaggtttaattgaatctaaacacaagagtgtttagagygtagtcagtactctacaaatgttaactattatttgatccagcaagtattatgacataaacacaaagacaaatctacaatgtatgcaccattatttgtagtaccaaaaaatgaattatagaataccagtatagtggaatccagtgtaacttaaaattgaggtaggtttgtgtgtcataattaataaaagtgatgtgtatatgcctatattttgatgggtatacctatatttttattaaatatttctgggagggaatacaagaaatacaggaagttaatggcctatgggggaggctgaaggagacttatttcatacagcatcacttttaaatatgtttttgccatatgctgttataatttctaggtacatattacctattaaataaaagaatttcacgtaaaatacaaaagaagtgggcattctcactggcagaatcttcagagtagaagtattccttcaagtatacaaacaatatttatcatttcttaattttgccycagaataacattgctatggctttggaagttacttaccgggaacgactgtatagagtatataaggaagtaaagaatcgcctggactatcatatatctgtgcagaacatgatgcgtcgaaaggaacaagaacayatgataaattgggtggagaagcacgtggtgcaaagcatctccacacagcaggtacacaacatttttgtaggttctgatgttgtactggtatctcttaacaagtatctgctgatgttttgttaaggtaggaatagctggcaaggagtctttagcctagaagtagcagtgtaaycccggtttgtttttctggatagtgataagcaggaagatgctgcatacctgtcaggatggcttttctctttccttaaatttgggtaacattaactgatatatttaatttctctataaaatagactgggctgggcacggtggctcacacctgtaatcccaacactttggaagggcgaggcaggaggatcacttgaggccaggagttcaagaccaacctgggcaacatagcgagatcctgtctctacaaaaaatttaaaaagtagctgggtgcggtgacaaacgcctgtagttcagctactcaggaggctgaggtgacaggatctcttgagcccaggaagcataggctgtagtgagctgtgattgcagtattgcactccagcctgggtgagagagcgagaccctgcctcaaaaaataaataaaagactgaacaaggctatttctaagccccttccattttctaattccatgacattccatttcttcttttcacctgcataacttgtctgttttgaacggaaatgttttctatttgcttaaactgaattaattttttttcatttatatttttgctttaatatgacttgattttttttttctttctcgagtttataacatttaagtatttctggttgttttcagcataacctatacaggattagaaaaacagtgtctatcaaagttttttttttttttttgataaacttttacataaaagtaatatatatgcttacttaagaaacttagaaaatacaaaagaagtctagaaaagagattaaaaattattttcattcttaacatttatatattactaatatttgttgaattggtctttttcaagcaactgttggttgtacaagccaacatcagtggcagatggttacaggaatatctggcctcaaattctatacaggtttcacccataaaggctgtgagccagggaattttaactaaccccctggatttgcttaaaataaattrtatctcctctgtgttaattaattttacttctaaacctgtctagtagctgtatagtgttaagccagtaatcatcttgaggttctggtctggtaggaggtgtcttttagaataatggtgtttatactctatacttttctatgttttggaaaggtctaaccagatttctctttccttatcacaggaaaaggagacaattgccaagtgcattgcggacctaaagctgctggcaaagaaggctcaagcacagccagttatgtaaatgtatctatcccaattgagacagctagaaacagttgactgactaaatggaaactagtctatttgacaaagtctttctgtgttggtgtctactgaagttatagtttacccttcctaaaaatgaaaagtttgtttcatatagtgagagaacgaaatctctatcggccagtcagatgtttctcatccttcttgctctgcctttgagttgttccgtgatcacttctgaataagcagtttgcctttataaaaacttgctgcctgactaaagattaacaggttatagtttaaatttgtaattaattctaccatcttgcaataaagtgacaattgaatgaaacagggtttttcaagttgtataattctctgaaatactcagcttttgtcatatgggtaaaaattaaagatgtcattgaactactgtcttgtttatgagaccattcagtggtgaactgtttctggctgataggttatgagatatgtaaagctttctagtactcttaaaataactaaatggagtattatatatcaattcatatcattgactttattattttagtagtatgcctatagaaaatattatggactcagagtgtcataaaatcactcttaagaatccatgcagcaggccaggcacagtggctcacacctgtaatgcctgcactttggaaggccgagacaggcggatcacttgaggtcaggagtttgaaaccagccaggccaacacagtgaaaccctgtctctactaaaaatacaaaaggttagccgggcatggtggcaggcgcctgtaatcccagctactcaggaggctgaggcaggagaattgcttgaacgcaggaggcaaaggttgcagtgagctgagatcacgccactgcactccagcctgggcaacagacctcgactccatctagaaaaaaaaaaaaaaaaatccagcagacacctatcaggaacatagaaaataacaagtgttggcaaggaagtggagaagttggaacacttgtgcactgttcgtagaaatatgaaatggtacagccattatggaaaagtgtggtgattcctcataaaattaaaatggaaataccatgatccagcaatcccagtcgacatatatactcaaaaaaattaaaagcagggtcttgaagagatacttgtgttccatggtgatagcagccattgttcacaatagctaaaacatagaagcagcccaatcggccatcagtagatgaatggataagcaaaatgtagtatatccatgcaatggaatattattccacttcaaggaagaaaattctgacactggctacagcatgaatgaaccttgaggacgttatgcagttttacaggatgagttatggagctggatagtggtgatggtggcacattaaggatgtatttaatactgttcttaaatggtacacttaaaaatggtaaattttatgtgtattttacaatctttttttaaattgaagaaaaatcctgtagataaattagaaaattcttcccttcataggtttatctgcatttgattctcccatacttgtacaaggatttatttgtattcaaatggacaaattacgcaataggaaatatttgaaaatatttatcatgggtaattgctattttcattgacttcctaagattttatgtaataatcatttgagtcaatattggtagctaatgtactaatctaatattgaaatcagattgatatctttgttacttaaagataatttgattggatcagcagttatttcaaattgattaaacaaaaaattataaaacacctagtttgtgctaagcaacgtaatgcagtgatcatacagagataaaagtccttacctcggagttaaatatctactaggaagacagcaagaatatgtgataatacaaacttgakcacagggtgctctgagagtgtggcaagcaccattttaggtagtctcaccagcctcttgtttccctcatatacatcatccaggtcaaggttcagtcagagaagcagaatatatgtttatatataaggaatttgactacgctgttgtgggagctaaacaatctgtaaagctgttagtgttctttctgatgctggagcttagagtccacacggcagtcagttaagggaagacgggtgtaaaatgggaggcagttaagaacaagtggaagtaacaagcacagacaaacccatgtccgtttttatcatctctggccttgatagtggttgtcctgtgtaaccccatatccaacacaaacatgtggtttagagaaacctggttagagaaatgagtgatccagggaagggatgggaagttgtccagctgcagcttgtgagctaacacatgtatgagctataaaacagctgctgcttcacatttatcctccaaattttgctcaagacttgtggcttaccctaaccagaacattgagggaagataattctggaaaatgtagttctgcctaaccaagctgacattacaaaccaccacaataactatcctatcaataattgttaacctgaatgaataatgcttaaaaatttcagccccaggagatcaagtaaaacagagagagagagggaaagtgacaggttcgaaaacaaatggtgtctgagctggcatttggaagttagccaagagggtgtctcagggattagatagagtccaggaagatggaacagcatagatgtaggagagtgtgacattttaaaaactcttaagtttgagtgaaatataaatatttaataaattatattaatgggtttttttggtttgttttttttttctttgagatggagtctcgctctgttgcccaggctggagtgcagtggtgccatctctgctcactgcaagctcctcctcccgggttcacgccattctcctgcctcagcctcccaagtagctgggactacaggtgcctgccaccatgcctggctaattttttgtgtttttagtagagatggggtttcatcatgtttgccaggatggtctcaatcacctgacctcgtgatccgcccacctcagcttcccaaagggttttttgggtttttttgtttttgtttggttgaatggtagggacagaagaagattacatggggttaaaaggattgaacagcaatgaagaaattgacttaaatatagaataatttccagaacatttctcaccccagtaactagagggaaccaaaggttggctcaggggaatgttgttttaagataagaggcttgaatgaagaaaaagtcaatggaagaagaggatgaaaagaaaacagtgaaggaggatacacatagtaaaatccctaagtgagagaataatattcagatgacaggaattaacagaaggtaaacatcttccattgaaactagaaagataaagatggaccttgaaagaatgaagtttttcagtggtggaacaggaagctcattcaacaatcgtttatataaaaaaaagataccatgtgtcatgcttactgctagaaattaagataagacaatatgtcatctcatctccacagactttacagtctagcaatctagacatagagtagtataagggttgccattgttaaaactgtagggtgataggggcatatataagtaaacttaatctagtgtaggagattatgaaagcccttctggagcaagtaatatttaaattggtatctgtagaaaagagagatcatcaaacagaggaaatattaataccttgtgcaaagcgcctgagataggaaagaacatggcaccttgaaaaccctagaaatgaatgactggagcacaggggaagggagggtgtgggagataatgctggagaagtggatcatccagattatgcatgtttatggcctttttgaccatattaaagaattctatgttgttttttttttaaataatggaaagccagttttttttttaagagactttatgcaaggtaagtatggataatgtattaaaagagttgccagcaaacttttcctctttagggccagattgtaatggttcagactctgagggccacatacagtctgtgctacataattgtctttatgttttgttgtgttttctttttacaactgtttgacccctgtaaaactgtagaaaatagtaagagtagatggcgggagcatctaggaagctatcagagtagtctaaggaggacctgatatggcttgggagagaatggccataatgagaaagaagagacttgccataagattttagagttgaattgacaaagcttgcttctagataggaggagaggaggatgtgagattgaggaaagcatgtaaattgcctcgtaggattctggctgtgtggtactgttaattaagatacaaaacagaggagaagaagcaggttttaagggggaagctactgcattcagttttattgttgaatataagttgacaattagatggttctttggcaacatgaggaaatgagcttcagatctggtaaaagtaatggccaaaaaaataaagtagggcatcgttagcatatagatagtaagtccagggaatggctgaggtaacataggaaaattgtatggagtaagaagagagggctgtctcagccagattggatggaggaaatcaagcaggcaaaggagactggtgagaaagggccaatttcaattatcatttttttgacctatgatttacttaaaagtatgtttttgaaatttctaaacatatttgctcttttagttctttttattgttgatttctaacttaattacaggctggtcagagaatgtggtccgtatgatatcaacttgaaatgattgagagtcactttcagcctgaaacaggtgtcagcaaactataacctgtgagctaaatctggcctgccacctagttttgtacagcctggaagctaagcatgatttttacattttaaatattatacataaaaattatacaaaattcaaatttcagtgttcataaataaagttttattagaacatagctacctacactcattcatttacatattgtctgcggcttctttgttaccatgttggcagagctgagtactagcaacagagaccatatgctccacaaagcccaaaatatttactatctgcccttcacagaaaaagtttacctgcccctggcttccaacgtgttcaatttttaatgttttaggtgttcttgaaaaaaatctgtactctccagataacatatgcagggttttatatatgtttattagattaatcttactgactgtattacacaaatttatatacttataacattttgtctgcttaatctaccaaatactgagaaatgtaaactaaatttcctactttggcagtggatctgttaagtttgtattttttgtttgtttgttttggggctttttttatagttctgtcaattttactttataaattcatagtttaggtaactagaagcaaataagtttagaattgttatctcttctcactgagttaagcttttatcagcatgtaatgatgatctctttttttaacgaatagtgtctaygttaaggtatattttgcctgatatgaatataccagctatcttgttaacattttcctggtgtaacttttcatccttctttcaacctttatggctgtttaagttctagatacatattttcaaacagtatatagcagattttttattcaatctggcaatctttgacttttaactaaagagwatagtccattttcatttattgtaattagcaattgctgttctattctgattcattcccactaatatattttatattttctgttttgtggcctattctggtttttgctattcattgttttggattgactaatttaattccaattgtttttttctctaatagtttgagttactctatttctgttataatgatcactctagaaattttaatattttaatctctcttytatgttttatattgttgtctgtgttatatttcttgtccactatttttctcttcaaatgttttaaacttgttatttatccccactattgaatttctatcttagtccatttatgcttctatgacagagtacctgagactggataatttataaagaaaatacaattaatttttcacaattctgggagctggaaagtccaagatcaaggtggcagccagattggtatctggcgaggactgctytctgcttctgagatggcaccttgcttctataccttctgctgggaaggcatactgtgtcctcacgtggcagaagggacagaagggcaagagaggactcttttcaaccttgagccattttgtaaggatgctaaatccattcagggggcaaggtcctcatgacttaatcatctaccaaaaggctttccctctcaaaaccatcatagtgcgattaagtttcaacatgaattttgaaggggacacatccaaacacagcaatttctaatttcaatgataggtttaatatctttacattctacttatttcttttcaaatttgcctgattattttagtacttttttattccttcattacactttcaatatccactttatttacttaaaaatattaagcatacttttattttggatctgatcattcttatacctacagcctttgcaggtctctgtctctaacatttgtggtttgttatttctgctgtctctttcatgatggcttgattactttttgtgtttttgtgatttgtcttgttgttagctcatatttattggaaatgtgtctgtggaagtctttgacacctggtcgaagaggcattcttctacagataacttgcattttcttctcccagcgtccaacttaaacaaccaatttaaacttggaattttgaggtccacagacagtacaaagtctggcctaaaacctcctaaagttaggtttgtggttaggaatgtccaagggaagcgtattttgttttgtttttctttttgtccccttctatccagagccaagcttgagataagcaagtatgacaggcagaattctacaatgccccatgatctctgctcccttgtgttactgcaagtataatcctccctcccctgaatgtgggtggaatctatgacttgcatctaatcaacagaatatggcaaaggtgacaggctgtcacttccatcatgacattatgttatatacaactttgtcttaacaggctggagagactcttctgtggcattcaaactgccatgttgtgaactgcctgtggagagaaccacaaagcagggaactgtagacagcctctaggacctgcaaacaggctccagctgacaaccagtaagaagccagggccctcagtcatgtaagtcacaaggaaatgagttcatccaacaaccagagggaatttggaagtatatcttctcctagtcaagcctctgataagaacacaaccccagccaatacctggattacagcctggtgagaccttgaagcagagaaccttgataaaacatgtccaagcttttaacccatagaaackataagataaatgtgtattgttttaagcctctaaatgtgtgatatgttaggcagcaatagaaaactaatacagcaaaggtctccaccatctctatctgtggcatggattttttttcctcattcacccaccaggggtcccttttcagagggtacaatccaaatcgccacctttgtgcaggctctagacttggtttcctaaccttgcacacatggcctttaaacccaaccttcaggtcaccaaaaattggtagctatatccagagcaaacacccatttcaggtctcaatcaactttcttatttcccacatctactttagccatgtgcttctaaattatggtgtttaaaatattttatccaacaagtgttatgttttttaacaagaggatttccttacatacctaatctgctatacacctgggaatttccattactcatcagcccattgaaggtaaatttcctactactaccaaaccccaggctacttaagcaaaagagattatgatctcttaattgccaaatccagtcaactctttccagtcctcatgttaattggcctctctctttcagcagcatttggcacaggtggccacagcttttccttcctttctttcctcctctggctcctaatcacatatgtttatgctatttctgctgtcaccatttcttctcaatttccttagctgactctactttttctgcctccctcttaaatcttggtgctcctcagagttctatcctaggaattttattctcattctgtaatacatactgtacgtggattaccttatccattcccatggcttctactatcatgagtatactggtgacttcctaatctatacctcaaattgtatttggaaagatagattaggttcagtgagatgagacaatagctgggatcataggtgtgtgacattgcacgtgtcaggtgcaatgatcccagctattagggaggctgaagtgagaggacagcttgagctcaggagttcaagaccagcttgggcaacatagtaagacctgtcttaaaaaaaaaaaaaaaagaaaagaaaagatctacccaaaatctcagtagctcaatacggaaaagtttactttttgctcatatagagtctactgggggtccaagtgactccccagagaaactgtcctccatatgttgactcagtgatccagggttagaactcttaccttcaccttcccatcataaaatctccattgttgtgggagggggtcagagcaggttttgcattagcaattaaatgctttggctaaatgagacatgcatcacttcattcactacccattggccagaacttgtcacatgacattacccaaccacaagggaggctccacacaagaaggagaggagaactggttattggtgagaactagtactgtctaccacacaaatctagatctcttttgtgagccccagatctgtgcatccaactgctctctcaacatctttacctaaatgttccacaggcaccccaaacccaatgtgtccaaaattaaactcattattttttcccaatcctataaccccttattttatattatcaacattagttgatggatacaacgcaggaaacctagttattgccacatcccctctctctcttactttcctctcacacctaataaatgactagactcatcacctatctgctctacctcttccccatggccattgccgctattcagatcatcctagtttctcacttggaactctgcaacaccaaaggattcttcacccactgtctggcacctcaccagtcccccctacactctgttgcctaaacccaaatgtgcttgtgttagtcctcttcagcagtctttccattgcctatacgggtaaaatatgtttagggcccgccattacctggttttatctatcctctccagcctttcctcttccatcacccacccttatcctatcctcattccccatagcaccacctatggtgaaatacttgcatttccctaaactcaaccatcgtgccaaagcatgcccttgtttaccctgtccctctacctggaatacacttcctccctcgctctgcctagaaaattattcatctttcaaggtgcaactcaaacattgtctcctctatgaggcttttcttgacacctatcctccctccttattgtgtagcctgacctctttgttcattgcatctcactctatcctgtacggatgtctcacatctacaatatttcattatgcttatttatgtgactggccagtctggaacatgcttttgtagatgaatgaagatatctgtctctctgcaacggacagatcccgcaagtcaagaactgttgtcttactcattattgaacctccagagcttgacagggtgttttcgtaggtgctaactaaatgtctgattaattagttaatcctccctctaagtcttgaaataccgctgtttccttctgtggctcctcttcctccttcttgccctttggttgtatctttgatcattgtctaatcttttatcctcccttgtttttgctgccaccttcctaaatatctcccaaatccatatatatctcttcatctctagtgctaccatcctagtccacattactattaccctcctcaactgtatcactgcagtaatctctcagccggtctattcatatctattctggctaacttccaatctgtttgctccagttttagtgattgttccgtaatgcaaacctgatcatgtcacccttgcttaaatatctttagtacagataaacccacttctcttaaagacaaaagttgtgacggactggccccttcctgcctattcaacctcatcctcatcatgctccaccctctgcccacaacccagtgccacctcacatacttcctctttcagcttttgtcaaactagtcttttttttttttgcccttcaacttcctaccttccttctggcacaggatttttaaatgttctgttccctctgaactttcccttcctcttgttctagtggaactgcaactcacatttcagatttcagcttaagtgttgggtcattttgttatgttttttggctctaggaaggcttccctggtcctcttcccctctgttgtaggcatccatggcacagggtcctgatccttcacagcacacttaacaatcacaatttaccatttctttgtgtggtaagggcctcctttactagtctgaaagttccatgaaggcagcccctcacgctcgtcataatatccttaaagcttagaatggtacacagcacatagtaaatgttcaataaatgttttggagtaagtgaatgaagaaatgaattatctcagcaactgaggttcaaaaacttgaagtaatcattgactcatcctactgttttattcccaatatccaggtcccaagttatatgtcctccaattttatgatccctgtggtttcagcctatacccttactacacaatacccagaatatcaccgtaccatctagcttctttgtctctacccacaatttatcttatatgatatggtacaatctgtcataaaggctatgtttatcatgttatatctcaatcaaaaatatttagtgtttattttttaaatatttcaaatatgtcttgcttggacttaaagctccccaccatctggctgcaatccatctaagtcaactatttttcatctcccaccctctccaaatgcccctccctatttatttatttatttatttaagcactctgtcactcaggctaaagtgcaatggcatgatcgtgactcactgtagcctcaaactcctgggcgcaaaggatcctcctgcctcagccccccaaagtgctggattacaggcgtcaaccaccacacccagccaaaatgttccactcttgaactgtgctaatatcccagaaatacatcacttgaatttcagcaaccaaccctgggcctagggcacccctcccacagccctttctccctccatccatccaaagcctatccacgctcaaggtttacctgaatacttccttgcctgatttctccagctctgccagctgtgagttactcttctccacgtggaaacctcttccccagactctgtgcctggctagctccttctcatcttcgagttctctaagtggaaatgtgcactccttagagaagccttccccagtcctccatcttctctgaagacattctcccagtgtattctgtctagctagcactcttttttttccctcaaggcccttaatacaatgtgtcattgacttatcatttacttgtttttcatttctcttctcaattatgtggtagagtctgtgaggcaaggaacttttctgccttgctctccgaaaaacctgtaataatctggtcagttattaaacctatataacctggtcaggcacagtggctcacgtctgtaattccagcactttgcgaggccaaggcaggcggatcacctgaggtcgggagttcaagaccatcctgaccaatatggtgaaacccgtctctactaaaaatacaaaattagccgggcatggtggcgcatgcctgtaatcccagctacttgggaggctgaggcaggagaattgcttgagaccaggaggtggaggttgcagtgagccaaggttgcaacattgcactctagcctgggcaacaagcatgaaattctgcctcaaaaaaaaaaaaagaaagaaaaaaaaagaaaaaaaaaaccctataatactagctcactgtatggcctatagcatttacttaatgagtatatttattaatattattttacaaataaatatttataaagaaatgattcgccttccctttgaagggatcttaacactcttaacacatttgaagtctgcacagctagtacttaactcttagcactgtttgctcttcatttttcattatcagcctcatctccctggttagaatagatgagattataaggtttttgatgacaatgtcatactgatgcgacctccacagtaaatctggcacagtggttaaagtaaacacttaataaatatttaattagcaagaaacctgtcttgcctccttatgttctgtcattcatgtgtcagacacaaagaaaaggtacaaaagaaagattaaaaaatcataatgttgggctgggcacggtgactcaggcctgtaatcccagcactttgggaggccgaggcgggtggatcacgaggtcaggagatcaagaccatcctggctaacacggtgaaaccccgtctctattaacaaaatacaaaaaattagccgggcgtggtggcgggcgcctgtattcccagctactcgggaaactgaggcaggagaatggcgtgaacccgggaggcagagcttgcagtgagccgagatagcgccactgcactccagcctgggccacagagcgagactccgtctcaaaaaataaaataaatcataatgttgacctcaaagaggaagcctaccgttgagtttagtaagatctttgctacacacaatgtgatgctggcagtggcaggggcagtaatctttatttcgtcatttttgaaacatagaagccgtaacggaagcaagtgaaatgctcagtcttagacgactgcgtcgtgctatgaccggactttttcttgaaaggtaaatgcatttaccacatgcttttaatctagattaaataatcactcaccaaaagaaagtgtcgtctaattgttagtggtttctatcacttgttttctttgatgcaggaagggttgtatttgaatggttctattaagttgatggattttacgctatcagtaagattctccagtgctggatgaaacgtgaaaaagtatatatagcaccgcttctattttaatttatgcttctgccaactgtttgggttgtgctgaaagggaaatatatttcctgcttttcttggcctggatttgtgagtagctatttccctgtggtattgtacgatgattttgtccatttatgtgaaagttagggtggggtggcctaatgttttcacagcggctatggtaacatttttgtaaattcagaactgctactgtgaatttcaggattttacagaaacctatgatcctatcttcttccacctctccagtggcaaagcctagtgtaagctcata

SEQ ID NO: 95923 - DNA, 41665 bp, Homo sapiens
  misc_feature (1)...(41665): n = A,T,C or G
aaggtagactgtgttctatgggttgttgttgcctgtgagcatgttcccattatagccctggagccacagctcagccttggtgtctgtacataactgacttcctttctaattaccacaggcagattggctaaagaagaacaactttggaggtgccatggtctgggccattgacctggatgatttcacaggcactttctgcaaccaaggaaaattccctctgatcaccaccctgaaggatgctctgggcctgcagagtacaagtgagttagggagtgagaagggacactaagcctcagacttaagagaaattccaaaggttccttggaagtcatggagctgttgcacaagtaattgtctgacattgtccattcctatctggtaacaattgattaatggtgggaagaacaaacagggctcttcaccatttcttccttccttcattcatttcacaagaaatttattgaacatctattacatatacagtgctctgtaggtaccacaggtgatctaaatgcataaatatccatatctactctatggaaatttacaatctagtgagagaaattggatttacaaaaactgcaaagctagacaacaatacagaagatattatgtgatactgtgccccctaaaagaataagtaaccttcttgtgagttcatgataatgaaaaatttcaatcagtaagatgtaaggaggaaaaaatgcactgtgacttgaaggatgaggaaggagttggtaagcaaaggggtgagtggagcaggaaggatatatcagatcagaagactgaaatatgtggagacatagaaggaggagccaagaacaaaatccaggtactagctctcacacatcaggtatcactggctaaaagcaaggaggttcaggatttgttttcttttttcttctcaggttgcaaagctccagcccaacccattgctcccattgccgaggcaaacatcacatgcggtgtcagccacagtggtagctctgggggccgctctggcaggagctctgggggcagccccagaggtagtggattctgtgctgacagggccagtggcctgtaccctgaccccactgacaagaatgcctcctacagttgtgtgaatggaaagactttcactcagcactgccagcctggtggtgtctttgataccttctgctcctgctgcagctggtgataacatttttcagatatcacctcacccagcctcagaagttgttgtgcaataaaaggttgagcattactgtacaatcgcttctgcttctttactgtaggatcttagatgtaattgatccctatttcccaatgatatacagttgctccaccagcmcccaagcctgcagcatgcactgctagtcctggatgttgggtagcggaagcagggggattaaaggaaaatacatggtcccttcattctcaaaacatgtattcagatgaaggctggggagcccaagaatgtaagactcagataacaatgacccataagcaaatgtcattttaaagtgattgatttgcccttttggctgagaatgcacaattaggaggctattgcagtgattcaggggagaggtgcaggctcagaacaaagtagtagcagtagaagtggtcagaggtgattgaatttcagctgtattcttaagatttgttaagccagcaggtttctttatgggttgcatgtagaacgtgggagacaaaaaggggagccaaggataatttcaacattttggcttaagaaattgcaaatatgaaattatcatcaactgaaatggagaaagctaaaagtagagtagattatgaaggaagagcagaagttcaactttggacatgttgaatttaagattgttattgggtttctaattggagatgtggagtagatagttggacataacatttttagaggtagttggtatttatagttggacataacatttttagaggtagttggtatttaaagtcaatagattagatgagatcattaagggagacagagaaaggaaagcattcaaggactaagccctgagcatttcagcattcagagggaggctggagagaagagtaggaacaagtaatgaagaccaaaaaaggagggctaagtgaggtagaaggaaaaccaagtgtcaagtatcctgaaagccaaggaaagaaccatattaaggaggagaaagtgatcaagtttgtcaaatactacttaggtcaggtcagatgaagtctgagaattgaccattatgtttaacaacctgtagatcattgacaaacttgacagaagtggggttggtaaacatcttggtggcaaatgcctgagtgcagtaagtttcagagagaatggaaaggtaagaattgaagacagtaaggatacaaaaacctgtcttatatgtgttaaagggaagcaaaaaatgggattaagaataaaagattatggaaaacagaagctgaatttatgttttcaaacccacatttacttatttagagatatgggagataaaaatctaacattctttccatacctctcactttcttatttttattattattttcacagagtcaaaaatttttttaacttaaaaattttttttttttgagacaaggtctcattctgttccccacgctgcagtacaaaggcacgaacatggctcagtgcaccctcgacctcctggactcaagcaattctctagcctcagcctcctaaagtgctgggattacaggcatgagccaccacatccagccccaaatttttaatatcactttgttttataacagaactgaagtcctatatttaaatcaatgcaatattcatcccctatacttacactacagcttatccaatattcatttctttaattatcttgttgtttgttttgtttttgtttgccaagaaggacttggagtatcttccattttcttgcatgtatgaaagtgcctgactgttgcctttatacttgattggtaactttttggacatagatattggctcactcttttactcaaaattttgtaaatattactgctttttattctggcattgaatattgagctagtgtttttcctatggctctttcatttactttttcaggtttggatgttttgtagttgaacagttttttcaagtagttctgtggctgccacaggccttaagttcttttatatgtgagaatatctgcctgtctccttggttcttgaaaagtatacttcaagaatattatacttggtagagtataatacgataggcttgtactttcttttcctcagaactcttcagatgtagacaaaacttcttaacattatttcaaatcatctctgccttaccttttaattccagttgaagctacagccaccaattctgcataagccttaatggtcttcatggcgttatggaatcttacctcagatctgtgttgtgtacttcttgctacccttcctagggcttctgagatacaggtttccactcaagcaggtacaatctagacacgcagaggggttactgtcacttacaaacatcagggaaacgtaatgtttccacctttcctcccctgatgttctagaagcacattttgtaagacttttaacaccgttccaaagggatagagcatttagttgtttctaccagtggctaatatgataaaagcatgattttattggccctcccttcttccctgtttcactcccctgtctcttacttattctttgcattccactcccaaattactctcacatgagctacttccaggtgaacttagccttagatagtaggcattgctccactgtgtcctggcattgaatattgttgtagggatgtttgaagacagtggataatcactaccctttctttaatccacacttttaaagttatttgatttttttcctgtgagtgcctgaagaattcatgatttattcttgaagttcaataacttaacaaggttataccttgattatgatggtttttgtcaatttctcctataaaacagttgagaggtaagatttaacttgcctgagttaacagacctgcaggcggcctcctggaaaagaaagttggcctgttgcctctggaaaccagctataatctatagcctaggtcctaatgcaatccatcctggcagagagctgaccatggtgaatgagaacttcagccaagtttacaccaagcagttgtgcataatcacggggttggattacaccagaagaaagccaagtgttctcccaacagatgaatgctaaggtagtagataagactgaaagccaaggttctgctatatcatactgctattagatcccatatcctaatctcactaaagaagagttttgttaagaagcttaaaagtcccaacatccaaagcccagagcctctttctcagagctagatatgtgctatgttagattgttgtatgctgcctgagaataaaataaacaccagaggatcactcatctgccatcgcttctgtctctgactttttacccagaagtactattccagaaagcccagtgtgcatgctgcttggctactcaccctgaatcacttgacaactggtgtagagagctggatgtcagactaggggcacctaccatggccttctagaagtgaaccaagggacttgggatttaaaaagtgtttctcagatgatcccatcgctttcaaagattggtatggcagtcatggggactagtccactaaattcctgaagatacagagtgataaaagtgatactgcgtagttaagatcatcgagcctagcattccatgattgttattattggccttggaagaattagctctaaggaggcagaccgaggggaacttgactcagcatcttgaatgaaattacaatttgaaaactttggtgaatgtgaaatgatttatatatggtcttatccaagcaggatcaaacaaattccatcctctgaccctcttcctatgactgataggatcagttcaagatggcacaggttgtcatgttattagggtgttatgagctccagttaaatgggtgcaaagggaaggaaagacaaagtatgtgacttatgaggttagttccctcataacaagtgaagaagataatctgaaataggctgattgaactaaccgaacttctgggtagactcccactatagctccgtcttagaaagtctatgtgattactgcttctatataaagggttaaacatgataaaattgatgatggtccctatctttgtctatggaaaaaaatatccagtgagttttgggggaactcatgacccaagtcataataggaatttcaggcttcataaagacatcatggttgaagcagaggtgctctgtttccagcaaagcccaacaggaagctaacttttgctttttgaaaggaggattccccaccagactgggaagcaacagcctaggctccagagtcggacactggacttaagttgttatcagatgaatttgctcagctgcgtactgttgtgttacaaaatcaaatggcattagatacgcttacctcagcccaaggagggttttgcaccttactgcatactgaatgttctgtgtatagccctaacaattctcacaatattactcacaaagccatgttgggtgtggtttttattaattgtgcttttaattctgctgtacttaacctgtatctgtaaactatatcaaatatcccttccccatgtatctgtaagggtattttcctgcaattgagtatcagattgaggccaaatgtggaggaaaagttaaacattaaatttgaactcaactgaacatggacacaaacaatggtcaccaagtcccgcaacaggttgtgtgagtcccttgaggcgttcatccagcactgttttggaaaaatctctatttcaatctagtcctatatgttagttattgaaaaaaatagacagtctcaaaaaacaagctgacctttttatgttccttgaacctagttgtgaagggcccttgttactgggcctcatgccaaacaactcrttacaaaaacagctagagtcccagacggtgccaaagcttcatgaaacctctcctcgtctgtgcacgaacaggtggccaactctggagcccaggctgttgctttccagtctggtggtgaatcctccatagtctggtgagtgtaaatatatatatatcttttcccttctccctttcccattgcaatttgattgttatatcaatttgcttattatatcaagttgyttattatatcgtttgcttattacatctgcattgccatttatgtgagataaaggttgtttacccttaaaggtattgtgtgtgtgtcttttctcctcccctcacacatctctcacacagatcattttatacccaaagggatataaatcattctactataaagacacatgcacaygtatggttattgcagcactatttacaatagcaaagacatggaaccaactcaaatgcccatcaatgatagactggataaagaaaatgtggtacatatacatcacrgaatactatgcagccataaacaggaatgagatcatgtctttgcagggacatggatgaagctggaagctatcatcctcagcaaactaacacagaaacagaaaactaaacactgcatgttctcactcataagatggagttggaacaatgagaacacatggacaccgggaagggaacaagaaacactggagccagctgrggggttgggrgcaagssggggagagcattaggacaaatacctaatgcatgtggggattaaaacctagatgacgggttgataggtgcagcaaaccatcatggcacacgtatacctatgtaacaaacctacacattctgcacttgtatcctggaacttaaagtaaaattttttttaaaaaggggggaaaaatatatagcaaaatgcaactggaatttccaaatgaattagtattttatttaaacatctatattttaaaaataattgtaataatgagaatacatagacacagggaggggagcaacacacactggggcctgtcggggggsggtgggggtagggaaagcatcaggataaagagctaaagcatgtggggcttcatacctaggtgatgggttgataggtgcagcaagccaccatggcacatgtttacctatgtaagaaacctgcacgtcctgcacatgtatcacggaacttaaaataaaatagaattaaattaaatcttaaaaatagtaattgtaataaatttatatttgaaacatgtaaggtatttaattcacacacaatgttttgtgtgcaaactcccctttcccctataattaytcctcagctatccaaggacttgaggtcttcagattgggaaaaataacattaactaaaatttattaaataactaacatgtgctaggcccagtgctaggtaggttatctcatttaattctcacaacaaccctataagacaacaactagtattatccatatgtaatacatgaggaaattgaggttcacaggtgaaataacttgtctaatgtcacatatctagaaagaaggagaacaaaaattgaaatataagtyagcgattctagagaccatgctgatattctgttctgtcatatggcaacctttgtgctggacagrtgtgggagaatgctctctgcaattgactggcattggttattctaacagtcttaccctctttgtatgtgaataaactggcattctcacttacattgactgcatgggccagtctccgttatctttttttccatgttttaaaaatgtttttcttgtggtaaaatagaccaaaacaaattaccaacttaaatattttaagtgtacagttcggtggtactaaatacattcataatgttcttgagccatctctcctttccatctccataattcttttcatcatgtaaaactccagctctatactcattaacctgtaagtccccatttccccctcccccagctccaggaaaccactattctactttctgtctccatgattttgactattctaagtatctcacataaacagaaaaatcatatattatctgtctttttggactggcttttttcattgagwataatgtctcaagattcatccatgttgtagcaagtcagaatttccttttaaaggctgaataatactttattgtatgtatatataacagttttgttatccattcattcactgaaggacacttgagttgcttgcatgttttagctatggtgagtaatgttactgtgaacatggaagtacaaatatttctttgacaccaagctttaagttattttgggtatacctagaagcggaattgctggatcatatggtaattctatgtatgatttttttaggaacttccatactgttttccatagcagctgtaccgttttacattcccaccaacagggcacaactgctccaatttttccacatccttgttaacacttattattttctgttttttgatagtagccatcctagtggatatgaggtgatgtctcattgtagatttgataggcatttccttaatgattaatggcattaagcatctttttatgtgtttattggccatttcaatatcttctttgaagaaatagatattcwagtcctttgtccattttgaatcaagttgtttggttgtgtgtgtgtgtgtcattgaattttagaagttctctctatattctgaatatctcttatcagataaactctttgcaaatattttctaccattccgtgagttgcacttttaytctgtttgcattgtcttttgatatacaaacatttaaaatattcatgaagtccaatttgtgcattgtattcttttgttgtctgtgatttaggtgtcatatccaacaaatcattggaagtccaatgttatgaactgtttgccctatgttttcttctaagaattttatacttttacatcttacatttaggccattgatctattttgagttaattttgcctatgatgttagaaaatggcccaaaaacatcaatggggccagatgtggtggctcatgcttrtaactccagtgctttgagaggccaaggtgggcagatttcttgagctcaggagtttgagaccagcttgggcaacatggcaaaaccctgttcctataaaaaatacaaaaaaattagccaggcatggtggcacatgactgtggtcccagstaatcaggaggctgaggtgggaggattgctcgagcccaggaagtcaaggatgcagtgagctatgatcatgccactgcactcgagcctgggtgacagagtgagaccctgtctcaaaaaacaatgacaacaaagaaaacatcactgggatttcgatagggatwgcattgaatctgtacatcatttgggtagtatagacattttaacaatattgagtcttccaactcatgaacatggggcatgtttccatttattcatattttctttatttgaacagcakgctatagttttcattgtacaagtctttcacttcattaagttaatttctaagtattttattctttttgatgctattgtaaatgaaattatttttataatttttctttttttattctctttgttagtttataaaaatgcaattgatttttgtgttgactttgtaacctgttattttgctgaattcattttttagctctgacaaaatttttggtgtggaatctttagggtttttcctatataagaccacatctgcagggacaattttacyacttccttcccaaattggatgccttttatgtcttatttttgcccaaatgttctggttaagactatgttgaatagaagtggcaaaagaagcattcttatcttgttgctgatcttagaagaaaagctttcagtctttcaccattgagtatgatatttgctgtgggtttttcaaacatagcttttattatattgaggtagtttgcttctatttctagtttgtttttattatgasagggtattaacttttrgcaaatactttttctgcatcaattgagatgattatgccatttttttcttcattcttttaatgtggtgtattacattcattggttttcataagttaaatcatttcttgcattcaatgaataaatccctcgtgaacacagtatataatcccttaacatcctgttaaattcagtttaatagtattttgttgaggatttttgcatcagtgtttataagggattttggtctgtagtttacctgtatgtttatctggctttgatattacagtaatgctggacatatagaatgagtcagaaagtgttttctcctcttcatttttttggaaaagtttgaaaagaattggtgttcatttgtcactaatgtttggtggattaacctctcaagtcatctggtctacagcttttctttgttggaaacttattgcattttatgatttttctgagacaggatctcactctgtcacccaggctggaatgcagtggcacaatcacagctcactgcagcctcaacttcccaggctcaagtgattctcctacctgggcctcccaaagtgctgggattacaggcatgagccatcatgcccagtgtaagatttttggttactaattaaatctccttagtggttataagtctattctaattttctatcttttcatgatttagctttgttaggtttcttgtttctagaaatttgttcatttcatttggattatctaatttattggcatacaattgttcataaaagcctcataatccaaccactgagaattaggcaagatggccaaagaggaacagctcccgtctgcagctcccagtgtgatcaacgcagaagacaggtgatttctgcattttcagctgaggtaccgggttcatctcattgggactggttagaagacaggtgatttctgcattttcagctgaggtaccgggttcatctcattgggactggttggacagtgggtgcagcccacggagggtgagccaaagcagggtggggcatcacctcacccaggaagtgcaaggcactggaggatttccctttcctagccaagggaagccatggcagactgtacctggaaaatcgggacactcccacccaaatactgtgcttttccaaaggtattagcaaatggtagaccaggagattatatcccgcacctggctcagtgggtcccatgctcatggagccttgctcactgctagcgcagcagtctgagattgacckgtgaggcagcagcctggcaggaggaggggcatccaccattgctgaggcttcagtaggtatacaaagaggctgggaagctcaaacatgayggagcccatcacagctcagcaaggctggctgcctctatagactccacctctgggggcagggcatagctgaacaaaaggcagcagaaacttccgcagacttaaacattcctgtctgacagctctgaagagagcagtggwtctcccagcacagtgtttgagcactgagaatgaacagactgcctcctcaagtgggtccctgacccctgtgtagcctaactcggagacacatcccagtaggggctgactgacacctcatacaggtgggacsaagcttccagaggaaggatcaggcagcaatatttgctgttctataatatttgctgttccgcagcctccactggtratacccaggcaaacagggtctggagtggacctccagcaaactccaacagacctgcagctgagggacctgactgttagaaggaaaactaacaaacaaaaggaatagcttccacatcaacaaaaagggaatccacaccaaaaccccatctgtaggtcaccaacatcaaagaccaaaggtagataaaaccacaaagatggggataaaacagagcagaaaagctgaaaattctaaaatccagagcacctcttatcctccaaaggatcgcatctacttgccagcaacggaacaaagctggacggagaatatgtttgatgagttgacagaagtaggcttcagaaggtcgataataacaaacttatccaagctaaatgagcatgtttgaacccatcacaaggaagctaacaattttgaaaaaaggttagacgaatggctaaccagaataaacagtgtagagaagaacttaaatgaactgacagarcggaaaaccatggcacgagaacttcgtgatgcatgcacaagcttcagtagctgatttgatcaaatggaagaaagggtatccgtgattgaagatcaaattaatgaaataaacctagaagagaagtttacagaaaaaagagtaaaatgaaacaaacaaagcctccaagaaatatgggaccatgtgaaaagaccaaatctacatttgattggtgtacctgaaagtgacagggagaatggaaccatgttggaaaacactctgcaggatattatccaggagaacttccgcaacctagcaaggtaggccaacattcaaattcaggaaatacagagaacaccacaaagatcctcctagagaagagcaatcccaagacgcataatagtcagattcaccaaggttgaaatgaaggaaaaaatgttaagggcagccagagagaaaggtcgggttacccacaaaggaaaacccattggactaacagcggatctctctgcagaaactctacaagccagaagagagtgagggctaatattcaacattcttaaataaaagaattttcaacccagaatttcatatccagtcaaactaagcttcataagtgaaggagaaataaaatccttyacagacaagcaaatgctgagagattttgtcaccaccaggcctgccttacaagagctcctgaaggaagcactaaacatagaaaggaacaactggtaccagccactacaaaaacatgcccaattgtaaagaccattgatgctatgaagaaactgcatcaattaacggacaaaataaccagctaacatcgtaatgacagcatcaaattcacacataacatactaacattaaatgtaaatgggctaactgccccaattaaaagacacagactggcaaattggataaagagtcaaggtccatcagtgtgctgtaatcaggagacccatctcatgtacaaagacayacataggctcaaaataaagagatggaggaagatctaccaagcaaatggaaagcaaaaaaaaaaaaaaaaaaaaacaagcaggggttgtaatcctagtctctgatgaaacagactttaaaccagcaaaaatcraaagagacaaagaaggccattacataatggtaaagggatcaattcaacaggaagagctaactatcctaaatatatatgcacccaatacagaagcactcagattcataaagcaagtccttagagacctacaaggagacttagactcccacacaataataatgggagactttaacaacccactgccaatattagacatatcaatgagacagaaggttaacaaggatatccaggacttgaactcagctctgcrctaagcagacctaatagacatctgcagaactctccaccccaaatcaacagaatatacattcttctcagcaccacatcacacttattccaaaattgaccacatagttggaagaaaagcactcctcagcaaatgtaaaagaacagaaatcacaacaaactgtctctaagaccacagcgcaatcaaattagaactcaggattaagaaactcactcaaaaccgcaccactacatggaragtgaacaacctgctcctgaatgactactgggtaaataacgagatgaaggcagatataaagatgttctttgaaaccagtaagaacagagacacaacgtgccagaatctccagttaaagcagtgtgtagagggaaatttatagcactaaatgcccacaagagaaagcaggaaagatctaaaatcaacaccctaacatcacaattaaaagaactagagaagcaagagaaaacgcattcaaaagctagcagaaggtgagaaataactaagatcagagcagmactgaaagagacagagacacaaaaaacccctcaaaaaatcartgaatccargagatgcttttttgaaaagatcaacaaaattgatagactgctagcaagacttacaaagaagaaaagaaagaagaatcaaatagatgcaataaaaaatgataaaggggatatcaccaccgatcccacagaaatacaaactaccatcagagaatattataaacacctctacacaaataaactagaaaatctagaataaatggataaattcctggacacatacatcctcccaagactaaaccaggaagaagtggaatctctgaatagatcaataacaggctctgaagttgaggcaataattaagagcctaccaaccagaaaaaggccaagaccagatggattcacagccgaattctaccagatgtacaaagagtagctggtaccattccttctgaaaccattccaatcaatagaaaaagagggaatcctccctaactcattttatggggccaacatcatcctgataccaaagcctggcagacacaccacaaaaaaagagaattttagaccaatatccctgatgaccatygatgcaaaaatcctcaataaaatactggcaaaccaaatctggcagcatatcaaaaagcttatccaccacgatcaagttggcttcatccctgggatgcaaggctggttaaacatatgcaaatcagtaaacataatccatcccataaacagaaccaatgacaaaaaccatatgattatctcaatagatgcagaaaaggccttccacaaaattcaacagcccttcatgctaaaaactctcaataaactaggtattgatggaatgtatctcaaaataataagaactatttatgacaaacccacagccaatatcacactgaatgggcaaaaactggaagcattccctttgaaaactggcataagacagggatgccctctctcactactcctattcaacatagtgtttgaagttctggccagggcaatcaggcaagagaaagaaataaagggtattcaattaggaagtcaaattgtccctgtttgcaaatgacatgattgtatatttagaaaaccccgtcatctcagcccaaaatctccttaagctgacgatcaacttcaacaaagtctcaggatacaaaatcaatgtgcaaaaatcacaagcattcctatacaccaataacagacaaacagagagccaaatcatgagtgaactcctatgtacaatcactacaaagagaataaaatacctaggaactcaacttacaagagatgtgaaggacctcttcaaggagaactacaaaccactgctcaacaaaattaaagaggacacaaacaaatggaagaacattccatgctcatggataggaagaattaatatcgtgaaaatggccatactacccaaggtaatttatagattcaatgccatccccatcaagctaccaatgactttctttacagaattggaaaaaactactttaaagttcatatggaaccaaaaaagagcccacattgccaagacaatcctaaggaaaaagaagaaagctggaggcatcatgctacttgacttmaaactatactacaaggctacagtaaccaaaacagcatsgtactgttaccaaaacagatatatagaccaatggaacagaatagaggcctcagaaataacaccacacatctacaaccatctgatctttgacaaacckgacaaaaacaagaaatggtgaaaggattccctatttaaaaaatggtgctgggataactggctagccatatgtaggaagctgaacctggatcccttccttacaccttacacaaaaatttattcaagacagatkaaagacgtaaatattagacttaaaaccataaaaaccctagaggaaaacctaggcaataccattcaggacataggcatgggcaaggacttcatgactaaaacaccaaaggaatgccaacaaaagccaaaatagaccaatgggatctaattaaactaaagagcttctgcacggcaaaagaaactactatcagagtgaaagggcaacctacagaatgggaggaaatttttgcaatctacccatctgacaaagggctaataccagaatctacaaagaacttaaacaaatttacaagaaaaaaacaaacaaccccatcaaaaagtgggcaaaggatatgaacagacacttctcaaaagaagacatttatgcagccaacagacatgtgaaaaaatgctcatcatcactagtcatcagagaaatgcaaaccaaaacacactgagatactatctcatgccagttagaatggagatcattaaaaagtcaggaaacaacagatgctggagaggacatggagaagtaggaacacttttacactgttggtggaagtgtaaattagttcaaccattgtggaagacagtatggtaattcctcaaggatctagaactagaaataccatttgacccagcgatcccattactgggtatatacccaaaggattataaatcatgctagtataaagatacatgcacacatatgtttattgcggcactattcacaatagcaaagacttggaatcaacccaaatgtccatcaatgatagactgaataaagaaaatatggcacatatacaccatgaaatgctatgcagccataaaaaaggatgagttgggccgggtgcggtggctcacacctgtaatcacagcactttgggaggccgaggtgggcagatcacgaggtcaggagatcaagaccatcctggctaacacagtgaaaccccgtctctacttaaaatacaaaaaaaaattagccaggcgtggtggcaggcacctatagtcccagctactcgggaggctgaggccagggaatggcatgaacctgggaggcagagcttgcagtgagccgagatagtgccactgcactccagcagcctgggcaacaaagcaagactctctctccaaaaaaaaaaaaaaaaaaaaagatgagttcctgtcctttgcagggacatggatgaagctgaagctggaaaccatcattctcagcaaactatcacaaggacagaaaaccatataccgcatgttcttactcataggtgtaaattgaacaatgaaaacacttggacgtagggcagggaatatcacacaccagggcctgttgcggggtgggggattgggggagggatagcatcaggagaaatacctaatgtaaatgacaagttattgggtgcagcmaaccaacatggcatatgtatasctatgtaacaaacctgcacgttgtgcacatgtaccctagaacttaaagtaaaatttaaaaaaaagcctcataatcctttttattttttatagtcagtagtaatgtccccatttttatttctgattttagtaatttgagtctcctctcttttttcttagtttatctagctaaaagtttgttgaaatgttttatcttctcaaagaactttttattttattgattttctctattgttttactattctctatttcatttatctgagcgccagtctttattatttccttctttctgctacctttgggtttaatttgtgtttctttttctagctccttaggtgtaattagattgtcaatttgacatttttcttgtttttcagtgtgaatatttagagttataaagttctcacttagtagtgccttcacagtatcccataagttttgctatgttatgtttttattttyattcatttctaagtatttttaaatttcccttatgactacttctttaatctattattaagagtgtgttgtttagtttccacaaattggtggcttctacagtttcacttctattatcaatttctaacttcacgtcctttgtggttggagaagatactttgyatgatctctatatttttaaatctgttgagacttaatttgtgacctaatatatagtctatactgaaaaatgtcccgtgtgcgcttgggaagaatgtaaatgctgtttttgttaggtagagtattctgtatatatctcttacatctagttggtttattatgttgtttaggtcctctatttcctcacttatcttccgtgtggttgttgtattcattactgagaacgggctattgaagtttccaactatcatttattgtcgaactatctatttcttcctttaattctgtcagtttttgcttcatatatttttatagtgtgtcattaggtacataaatgtttgtaattgttcgattcttgctgtattaaaccttgtattaatatataatgtcctgctttgtctcttgtacattttttaatttataatctattttgtctgttactaatatagcaactcctgctctcgtttggttactatttgcatggaatacctgtctccatcctttctctttcaaactatttatgtctttaaatctaaaatgagtctcttgtagacagcgtatggttggatcatgtgttttaattgattctgccaatctcagtattttgattgaagcattaatatatttatatttagagtaattactgataaagagggaattatttmtgtcattttaattatttgtttcctatatgccttttagcttttttgtcactcatttctggcattattgtctttctttgtggttagttgattgttcgtagtgaaatgtttacatttctttctcgtttccttatacacacacacacatatacatctatacacatgtatacacacatatacatatatacatacacacatatatatacacacacatatgaatacacacacatatatagctattttcttccccattggttacaatggggattacatttaatatcctaaggttataacattctaatttgaatttacacaggtttaactgcaataacttaaaaaaactctgctcttttacagccccattccctacccctttcagttgttgatggcataaaataccatctttatacattgtgtgttccaaaatgtagactaatgattctttgaaatgcatttgtctcttaaattatgtggagaacaaaaagtggagttacaagccattgttacaataatacgagcttttataattgcccatgtgtttacttttactgagaactttgtttattcatatggcagcaagttgctgtctagtgtctgtttatttcatcctataggactcccttgagtatttcctgcaggacaggtctattggtaacaaactacatcagcttttgtttatctagaaatgtctcatgttatcccytgttttgaaggatagttttgccagaaaaaagatttttggttgacactttttttcttttagaactttgaatctatctgccaactgccttctggcctctaaagtttctgatgagagatctgctgataattttattgaagatcccttgtatgtggccagttgcttctcttttgatgatttcaagactctctttgcctttgtcytttaaaatttgattatattgtgtcttgcgtggatttctttgagttcatcttacttggagttcgctgagttcttggatgtctatatacatgtctttcatcaaatttgggaagtgttaggccattatcttttaaaatattctgtctgctcctttctttctcttttatttttcttgaattcccacaatgtatatgttggtccacttgatggcttttcacatgtcctttaggctctcttcagtgttcttcaatttgttttctttctgttcctcaaacttaataattttcactctcctatcttcatgtttaccaattctttctcctgtcagtgcaaatctgcccttgaacctttctagtaagttttccatttcagttatattactttttagctccagaatttattttctgtttttgtccaaatttttwaaaatcttattattgaaatttacattttgttcatacatcattttcttcattctctacatcctttttttagagcatattcaagacagttgttctaaagtctttgcctagcatatttgccatcaggtctttttcagagacatttctgttgatttatttttttcgtttgaatgagctatactttcttgttcctttgtatgccttgtgatttttggttaaaaactggacatttgaatctaataatgtggtatctctgaaaagcagattctcccctttccccagaatttgctgggggttttttgttactgttttggtttcttgtcttttttgtattttttattttttagagatgtgatctttctgtgttgctcaggctggcctcaaactactgagttcaaatctcctcccagctcagcctccacagtagctgggattacaggtcactgcacttggctttggtttggggttttgttttgttgtttttgttgtaaggtatctctgtgctgagaataagcctgaaatataaacttaagatcttcacaggtcttttctgagcctttccttgggcatatgcagtgactttctaattctcccagtatatacagttgttttttaatgtcctagtgtttgatgtctggcttccaaatgttggaaagagaaaaataaaggaaagataagaatggtgccaaccctttacatygcccaaatgttacttcatccagaggggaagtagcttgcaacaatggggggaggtgcaagaacaatgactgcctacctctttgtctgcacctttgtaatcagaagcagcaatcagtgataagagcacagatctctgatagttgaaggacatagtccttttttgcccaccctggctcccacaagctctgtataagctgctcctggaacacatgcacagctgcctgccttggggcttagtggtgggggaagaatatctgctactgtgctaagaactgaaattgactaaaattaacttcaatttacctacgaagctttcttctgaagttgcaagcctttaatagactctagagttccaaagtagttgcatcagacaaattctgccagtaaaatttttgtctaggaagggagacagattcctggtgctttctactttgccatcttctcagaattcgttcctcattttccttttatgtgattctcctttaagctaagcatattggaaaagaagaaagaaagctgccattattctcagatgacatagaaaccaaaaaatgcgtagaaaagtatttaagctaataatcatgtttagtgatattgctggaattaaagtttttatataaagattaattgcatttatagaaacaagtaataaatagaagatgcagtttaaaatggtaccatctataacagagacaaaatatataaaagatctgtaatttcttaagatgtgaaagactactatggagaaagttatgaaactttattaacagacactttcaaagatgtaaataacttgacaggcaacccattttcatggaaaaccttaaaatcatgaagattttcattttttccaatgttattccatgtaattccaatcaaaattccaatggggtttcttatgggatttttatgataaaactaaaatgaaagcgtaaaaggccaagaaaactaaggcattcctgaagatgataaacagtgtgtgtgagttggagggtgggataccattasctatgacaggtctgaggagtggtagaaatggcatttcaaattagcgtggaaaagatgggttattaaaattatgctggggcaagtagttacccacatggaaaaaatgaaattggatcaagtctatgcactacacacaaaagataaatttgataaattaagagctcaaatttaaaggtgacatttaaaattttagaagaaaatataaaggatatttacattctcagagtagggagaaatttttcaaataagattccaaaaaatcaaactataaagaacaagtggtgtgcatttgactttattaaaattaagaatttattttcattataaggcaccataaagagagtgaaaaaataacccataaagttggaaaagatatgttcaatgcacgtaactgaaaaataattacaatccagaatatrtaaagcatggctataaaaattaataaacttgtgggcagcacaatagaaaaatgggcaaaagatacaagcaggcatttcacagaaaaggaaacaaaaacagccaataaatgtcaaaaatgctcaaccacatcagtaatttgatagatataaactaaaactactcaccttaatgacacaaattttagtctgatgattaagttttggcaattttagtctgatgattcagttttggcaaagatgtggagtgataggaattctcatacgttgctgttggtagtgtaaattgatataactactttggaagaaactttctagctaaatagtaaattttaatatgcatgtgttatttcactgggcaattccattcctaggtgtaaacactggaaaaactgttgtaaatgagtaccaagagacatgtgtacaggaacgcttatatagcagcatgtagaagaaaaatactgaaaataaagcatatgttgttacacataaaaaggataagtaaatcacagcatatttgtataatggaataccatagagctatgaaaataagtgaacagctgctacttgtaccaagtggataaatctcaaaaacaatgctgagctaaaaatgcaagaaatagaagaatgcatatggtattatttcatttctataaagtcaagactaatgaatatgttgaaactaatataataaagtgattataataagtgaatataaaactaatgaatgtatcatttggggaaacagacatatgtgataatactataaatgaagtaagaaaatagttcaaaactcagaatagtggttactccaggggaatgaggagcatttaactggggagaagtatgtagggtaatagtcaaagttaatgttattttttaagttaggtgatggagaaaaggttttcatttttactttttttttttttttcttgagatggattctcgctgtcgtcacctgagctggagtgcaatggcactatctcagctcactgcaacctccgcctcccgggttccagcaattctcctgccttagcctcccaagtagctgagattacaggcacctgccaccacacccagctaatttttgtatttttagtagagayggggtttcaccatgttgacccagctggtctcaaactcctgacctcaggtgatccacccgccttggcctcccaaagtgctgggattacaggtgtgagccaccaggcttggccatatttttcttaaaatgtatacctaaactcatgtgtatggtagattttacaattaaagaaactaaaaataatacaaggttattgaaaacaataatgtaaaaggatacacatggtcacagtttaaaactattcattctatgactcataaacrcagtaattctttccaataaccaagtgctcagatgggatgcaagtttgctggggctcttaaggagctattaaaaagaaatgtttaatctgtaggtcatgtcatttatttagaactggggatgccaaattcaatagaaaatacctcactagctataaatggtagctacaccctatagtcctgaatacgataaacctggagctactggctttgctgtttgtttttgcaaatccttgactttgatttgacattctctttggctcaactgtattctcttgactaccttgggaaaatgcctcactcagtttaacttgggccaaaagcttgcgtacttaacacagggatctggatctggtgtttaatagctgattaattttctcatcagcaaaattggtgtgatagtaataatcctctttatagggtaaaagaaacaataaagtcaagccctctgatgatagtyattttttttagtcactcagctttactttttattcttttagaatttcattttgtgaccagtccttgtgaaaatgtaaatccaagtgccctgccctttccctaattgagggtctggtgtcatacaacaatatgctttttccccaggatttaattcttgtcattcatagatggaaaataaaattggagtttatttctcctaagccttcctcccacacccctccccatagaaagacttggtttctattgtattagaggcaggttctgtattctttttgattctgtgagtttcttcatgtctttcaaatatattgatttgtgcttcttagagttggttttgattgcttacaaaattaaagcctaagtgatataagcaccaaatacagtctctggcacatagtaggcacttgtagtgtttgttgatatgattattttcacaattgaaatgttccctgaacaacacacactagggcctgtcagtgggggtggcacgagggaaagcatcaggaaaaatagctaacgcatgctgggcttaatatttaggtgatgggttaatagggacagcaaaccaccatggcacatgtttacctatgtaacaaacctgcacaccttgcacatgcaccctggaactaaaataaaataaaaatttttcctggcagcacttctattagactttctctggttctgagagtagaacaaaacacttaacctaccaatcacaggaagaatggatacaatttagtttccaaatgtgataaatggataaacctgtctggactcacaagaactctgctaaggtgctgaaatcccataatgatcacccatattcccgccaactgcattcctggtattgtcacaagacagcatcatataagcaatacagaaaatatgtgctagagtacataaagtaaatcaaaagaasgagagagcattaagatagaaaagatctgagttggactttgaagaactgctaagattgggataggcagtgaggataaggagacactgcaggcaagacattacaggcaaggagtggagggataccttgagcaaagacatgcaaggcatgtttgagggcaaagaatagtcctttggccaaaagagaaatgtattatagaacaatggtagtgaattatgtttggaaggggtagattggagttaatttaaatacaaagttccagaaacggtcaagttgcaaatatttctatgaagagactcatttcaatatcatctatattatttctatccattagcaacgcagtttttaggggatgtaatttgaaactacagaacactagagagttcttggtgacctttagaggggacattttgagatccaaacattcttagataaaattatcatttagtcatgacttgaagccattccaaagaacatgtgtgagtagaatattgagagagtagcacctaaagarggaagatttcttaggcactgattgtacaaattacatatgaataattccatgaggaaaaaaaggtttaagaacagctaataacttccaaagtttctttttatttatttttccataaagacttgctttgatgccagacacaaaatgtccacaatagaaaatctgaccacagtatctaaacagttgcttatcagyccttggaactgccaaaaaagctattaaactgrtgttttccatggtgatggtctccaccaccctgttagragccatgacattgttctgtccttgttgggcagagaaggtggtgatgctggtggtgggagggtgtaggttgaaggtcttgggagggtgtttgtagaagagaaggtccgttgatttactgattaactacatacacatctgggtcaaattgttctctatttagaagcctttgtgataaccacagaatcagaacatataaaaagctctgcgggactggtgctgactgcaaccatgacaaagcttattctcctcacaggtgggtttgtaatcagagattgacccttcatcttatctagtttctttttctctcacaggctctgaaaatcatgaagtggtcttcatactacatccctatacttttccattcttctttcatcatttcaaatttcaaatgaatcttgttatatacaaatcagtctgcctcttgttctcttaacttcaactgactctggtaacatttctgcttttgttaatcccatggacctggtcctaaaggaaaagcatactttctcctagtgctagtcttactctttcatcttttgttcagccattcatttttctttactcttcttcctacgccatctcattttaattggaataatgtttatttatttgcttgtgtccttggactagcttttctggggaagaaaatcagtaggaactgagatagagttatgcaagttgtctttgttctgctgttttcagaattatttctctatttaytcccctattatcctactgagttgatgatgtaccataaacatgttagaaattaaattattcaaagaggttgattcagtaagttgtttagagacaagtcataccaagaatttattagttgctctagagctgggatttgcaaactgtttaagcttcagaaccttttccaaatgaaacctcaagctcaatttataaaacaatcagagtagaagaattgctttgtagaagtcagggaaaggtatctggagtctcacccmatagttcctagctcttctytcctcatataaggcctcctgaaagtcattccaaaaaaccactaaaggccagaagatactgaattctctgatttagcagatgccttatctgttggaaggctgtgttctatcactcaggtaggggaagaacgaatggatgtgtcatcattgastacagtgatcagttggtgatttcagtaagtacatcttccatagatagtaaacttcggactcagcattcaggaacatttatttgtgacaagraaggtgtgagacgaaggtaccacggtcatttttgataaaggtggggaaaggtagatctactgttgtattcactgaaaagcctttggaatcaccaccaaatctcactgaggytgtaacaatttatggyaaattggaaggcaatcaatccttcagaattagattctacggggtacagacaatcggttcaaagtacatgctttttctttctatccaggtcttgtccttatactgaatttgcagctcggtaagtcatggactccatgttttatcattgaatgtatatatacgagataaaccatactatggaaagagagccgctgtttgcttcacagacagatgggtttgatttgggagtaatctagtgttttggattggctgtcactgctatcctcttcagcatgaccatctgaattataaactggtactcactgggcttcataggactatgggcatcttttcttagaaggctgctagctaggcttatccaaaatcccaaaatgagtctgtgaaagttaaaaataaacaactccaagttagtgaccagttctgagttagaatcttaggatgcatttgcaagagtgttcatactaattacctccacacagagatcaggcatctgaggcacagggagggaaacagaggcarggccaaaactcacmgcacacttcagtggatcctaaaccaggccattgtccctcctgctgactacacacaggctctgcctaccagctgacatgctacttcaccaactgggcccagtacyggccaggcctggggcgcttcatgcctgacracatcracccctgcctctgtacccacctsatctacgcctttgctgggakgcagaacaacgagatcaccaccatcgaatggaatgatgtgactctctaccaagctttcaatggcctgaaaaataagtaggatgagggagatatttaatttggcatcccctttttcagtacttcccaaacattaatgcttcttaaaatgtagttcagatccatggatctgagatggggaccaagactctgcatttcatttttcttttataactgacaaaaattgtatgtgtttactatggacaatgtaatgttttgaaatatgtatacggtgcggaatggctcaatcgaactatcaacatatgcatttccacaaatacttaatgttttttgtggtgagaacacttaaaatgtactgtttgcaattttcaaaatacaatatattgttactaacaatagtaaccatgttgtacaatagacctctgcaacttattcctcatttctaactgaaattttgtatcctttgaccaacatgccccccaacccccatccccacaccacccccagcctctgctaacgaccattctactatatacttctatgagttcaacttcttttagattccacttataagtgagatcatgtggtatatgtctttctgtgcctggtttatctcacttaacataatatcctccaggtttatccatattgctgcaaatgacaggatttctgcctcttttttaagacttaatagtattcattgtatataaagaccacattttctttgtccattcatccattgaggggcacttagattgattccacatcttagctactgtgaatagtgctgcaatgaacatggaaattcagatatctcttcaacacactgatttcatttcctttggatgtaaacccagtagtgtaactgctggatcatatggtagttatttctttgattttttgaggaacatctatactattttccataatgggtatactaatgttcattcccaccaacagtgggcaagagttccttttttttccatgtcttttccaacacttacctttcatctttttgataacagccattctaagcggattgagtggtatctcatttgattttgatatgtatttctctgatgattagtgatgttgagcattttttatacacttgttgaccattggtatgtcttcttttgagaaatgtcttttsaagtccttggcccattttttaatcaggttatttggtttcttactactgagttgtataaatttcctatatatttttgatactaactaactccttacttgacatatggtttccaactattttctcccattccataggtagtctcttcactctgtttcctttgtcatgcaaaagctttttagcctgatgtaatcccatttgtctatttttgcttttgttgctgcactttccagtcatatccaaaaaattcttgctgtagctcttggagcttttttttaaggttttctttcagtagttttacaatttgaggtcataaatttagatctttaatccattctgagttgactttgttcagtttagtcatatttaagagaaggaaagctacaggtgattgctactatcagtaatggyattatcgtgaatacagctactagaatttaagttacaatgactaagagtaaataaactcctttacggcagtgtttcttgaagtgtgstccattgactacttgcctcaaaatcatgtgaggtacytgagtaagtgttagtccctactgcaatccaaccgaattggaatctcaggggaaggggcgataaacccagatttttmatgttgtcctcccacaacccttgcacttaattattatgtatgttaatgtttgggaatctctattcaagagaatgtgtataatttcaagccaattaatttattttaacattacagaggctaaaaatgtaattaagctcaagcaacatttaccattttatctgatagaatagaatattatattagctattcatgytttttaaacttacacaatcaaagatactgccaacacacaatattttttaaagcccagtttcaaaatttagatttccctagggaaccctgagtgcattcatgacaggaacaacacaaagaatttttataaaggaagttttcagtaggggaggaaaattgttctacaaaaggcaaaacaaaaatatctgaccagatccaanactaaagcaatgtattttaratggagggagtcntgacttttgaagtttatctgtttctatcctttgntttacaggaacagccagctgaaaactctcctggccattggaggctggaacttcrggactgccccrtaagtcttctatggagagcatgttgttcgtttgctatggaaaacaagttagccccaygtgatcactgtccctttagacttcacaatctaagacagggtattgaggatgtacataaacaaatatatgaattaaatatattgctacaccagaacctcattattaagtggaacacaatttatttcatacatttaatttggtggayatttgggggccctatccacagaggtttacttactgaggttcccaaacaacctcttcttaaagtmtttcaagagtacaaaccctgaggacagtgttataatgcttccctctatttatcttctggtggggggaggaatgagaaaatcacacaaataaacaagaggacttcttggagggtacatgtttggggarggaacacagtgtgctgggttkgccaggtatccaaagaaacaagggcaacttgggagaaagagcagagttgggsggataacagaataaagggaatgttaagataccatggctgggaagagtagtgattacaaaggaaggagaggagaaaaccaagaacatgctttactctgggctgtgggtcctgatgaagggctctgaggcaggaattgagagcttgattttactccaaggtgttgggaccaccaaggtctcaccctgccttctttgggtctccctcagtttcactgccatggtttctactcctgagaaccgccagactttcatcacctcagtcatcarattcctgcgccagtatgagtttgacgggctggactttgactgggagtaccctggctctcgtgggagccctcctcaggacaagcatctcttcactgtcctggtgcaggtggggaaggaagtcccagtctttagcccaaaaagattcaaagtctttctttccgaggagaattgggtggctctagggtaaaacaaaacttgaatttaaactgatagaatattagcattgcaaagagtcttatatatcgtgcgttcattaaacaaacatttaatggcaacaacaaagcaacatgtgagctctgtgccaggcactgctctacatgttgttttaagaaccataacycatttcatcttcatatttactctatggcatacatactataagtgttataatctttattttacagatgaggaaactaaagtacagagaggatttaagcaacttgcccaagatcacacaactagtaggaatcataacttcctctgcagtttggctacagagtccattgcttctaagcattacactaggctgcccgttattactgagtacgtattctgtggcagacattgtcaggctctgaagaacttcttctgaggtggaagactgaaakaatatgaacaatgtcaatgcattgtgataaatgccatgttagaggtctgcagagtacaaaagtaacaaggaaagagggtaactaattctgctctgggkcaggatcagaaagtgtttcctagagaaagtgatgcttgggctcagtcttgaaagaaactggtgttaaccaattaagtgaggatgggaatggcacaaatgatatacagataagtgtgagcaagtgggtgataatggctgtgaagttgcatgaagaaccagataatgtgagaacttttatattatgttcaggaatttgcactttacctttgacacaatgggactgttttgaagaattttaaatagtagagagctggcttttaccatagaggataaattagaaggagatgagaagtcatggatagaattaggaggttattgcagtaaatcaagcaagaaatgatcagggccccaacaaaggctctaacactgagggaagaagaggatgtatataagagatatcaagaggatagaatcaataggatttggagatcaactggaaataggaaatggagaggacctccaattttctgactttgaggatkggtttgrttttaatgctattaactaagatggtaaatacaggaagaagtgtagatttgaaagaagaagaattgaccttgaacttgatgagtatgaggtatctgtagagcatcctaacrgagtgcccagtagscatcagataaatatcaatctggagttcaggacaaaaaagcttgatatacttggtttttagacttactgtctcccaagacagattgtttgctattccattctatgtaacagatcgtcacycagcctctgaatagtttcaatgttaagtaataggtgaaaagtcaatttacttacttgttgaattgccctaatgatcataaaggaatatctctttcttggctggaacatgcctctagtcataatttataacttctggtcattgtttctagttcttcctgctgaagcaacagagaataagactgcatcttttgcaatatatgggcttaatgtcttaagacagctgtaaataccttgcctataatttctcttattccagttaaatatcttaatgccttcaatcaataaccgcatgacaattttcagagccagccttcactggaacatactctggcgcaccctaatagtgcaattataagaactaaacccagtactccaaatgagattacagtcgcacagatacaggtggattaatctctagkattgaatgggaacctatcatctagctgttaccaccttccttattggccaatacaccattttatttgatgggatktcagtcctataaagtagttcatctactttatgaaacaaatttctatactgctggatgtagggtatcactgcaactagagcttcaaagtatagagatacaatggagccctgatggtcatctgggacctgggttttggtcatgacctacctactaactcagtgtgggactttggtgaagtgtcctaactcttatgcatattagatagccagaaaattcaataatattatctatccgatctactttatttggttgttgagagactaaagtaaaataaaatatgtgaaagcaatttaagagagagaagcattatacagacatatgtttattagtattatttaaggagctaaaatcagcatcatagatgtcctattatgccttattattctgtaggaaatgcgtgaagcttttgagcaggaggccaagcagatcaacaagcccaggctgatggtcactgctgcagtagctgctggcatctccaatatccagtctggctatgagatcccccaactgtcacagtgagtgatgtgccttatcttcaaactcctggaggtgtcactcgggcacactagacttgtccttggtctggcttgctattcagggaccttgtttaggagactttagaagtggtgtcctgtgcctgcataggtgtgggaaatgaccatcagaatgattttaaatcctccaccccacctcaggtacctggactacatccatgtcatgacctacgacctccatggctcctgggagggctacactggagagaacagccccctctacaaatacccgactgacaccggcagcaacgcctacctcaatgtggtgagtccctgtacagatgcaagagcagaccagagatgatgatgaaaatcacatagagattcaggcacaaaaggcatcataagtttagtggttttctcaaatgggaaattaggctgccatarttaattaaatattctcatttaatttcacacagagactgggacacaaagtaaacataaattctgcaagtgtctcacttaaacaactgtcctcaagttgatcgtatttcattaactacaacttcaccaaaatgttttgaaaaaaatactaatccatctggaattaacagcatagagttttacctgtcggaataggggactaatataactaagtactgggtcctcagctggttgggccatgtaactaacccactgacattgcaggattatgtcatgaactactggaaggacaatggagcaccagctgagaagctcatcgttggattccctacctatggacacaacttcatcctgagcaacccctccaacactggaattggtgcccccacctctggtgytggtcctgckgggccctatgccaaggagtctgggatctgggcttactacgaggtatgtagattggactgaaaagtgctctgtgaattccgtgcactgtgccttagggctagaatctgctgaaatcttgaatgttcattctgtctcctacctaaatgctttaaacacagctgcttaaagtgtttaaatagcattcatttacataatccaaatgaatagcatttaacaatgcataatatcccttcacacaacagactacctyttaaatgtaatttatattagcacacaggtaataaaataaatatacctctcatattactgtgggttcccaaaatcatttgacaagcaacttgatcctctttactacaaataaaaacctgtaactagaaattgagcaaaaccccaactggagacatgaaagaagaaaaatttgaaacatgtttttctttaatgggagtaacatttaawagatttgaatctcttgacttttgaaagatctgtaccttcctgaaaaatggagccactcagggatgggatgcccctcaggaagtgccttatgcctatcagggcaatgtrtgggttggctatgacaacrtcaagagcttcgatattaaggtaagatcagtcccttaaatgtgctgaggtcccagccctgagtcccaggaaagcaagtgattcctgttatcctctttctttaaacaggctcaatggcttaagcacaacaaatytggaggcgccatggtctgggccattgatctggatgacttcactggcactttctgcaaccagggcaagyttcccctaatctccaccctgaagaaggccctyggcytgcagagtgcaagtaagtgactgagggggaatgcccaggtgtataaataycccttctccaactcaaaaagcaaccctgatgtcttcccacctcccccttgcccagggatcctctttccacttcacctcaccgctcttgcccagatgagagacaggttttacccttgaacggccatgtcaggaacattgtgcacttatgggaagccaggcctaactgggtgggtgttctaagtctgctaagtcttaagggtgtggaagagcctcaagaaattatactaacatcaatataagtatctgcttctctatgaatcccttattcaaaatctttctcagcccacctggggagatttaagaaaccctcaccaatgctcacatatctctaatcagtgattcaggggatgtatcaattctctaaattttttccrgatttttcctagaatttatttgttcaccatttatgcccagattctagaaaagtgttttgcatacatttggtggttagtaaatttttttttgaatgatttagatgttataaggaaagagcaacctttttttacaattaaaagccaggctggcttgacacaatagctttatttatctcctgaatatggagctactttctcttctcagttgcagggatccagagccaactgcaccccacctccacacttccactcccacagttctcttcacctctaggtgaagcttagagcctctcccaagcccactagtctgctcttactgctgtatgtttcaggttgcacggctccagctcagcccattgagccaataactgctgctcccagtggcagcgggaacgggagcgggagtagcagctctggaggcagctcrggaggcagtggattctgtgctgkcagagccaacggcctctaccccgtggcaaataacagaaatgccttctggcactgcgtgaatggagtcacgtaccagcagaactgccaggccgggcttgtcttcgacaccagctgtgattgctgcaactgggcataaacctgacctggtctatattccctagagttccagtctcttttgcttaggacatgttgcccctacctaaagtcctgcaataaaatcagcagtcaaaacatgactgtccttgcttttaagtgatttgggtggaaacctcttccagatatgaaaataggggctatgcatgggggtggagtggtggagtagagtgtgagaggaagtggtggagctaacagcgycacagtcttctatctgcctgtgttcatctgcmtgaaggttggaagctgtaaggaggaaatgtctgaatgtttggtgcatgggagggatgaggatatgaagaggataggtctgtcaccaggcaattttcctcaggaaggagctgaagtgcttctgtaagactgggggacataagcagtgctgcctggcttgctcaaggagtggaagactgggacatcctctccacttctactgaagtggactggcagcttcgggaagatatgtgcagtagactccatttagggtttctgcctagcccatgggccagccaggctccctttctcaggagatgacacctaccattggaatcgtagtggtggccaccagctgctgtgcttgtatgcataccccctcccatggcttggctgatagactgggatagacatcaggctcaagagggccaataagattatcacacctcagaatttgcagctcggaacaaggaattgcctgtcatcactcgtgtgggtgggtctgcaatatgtaagctcaggagctgtagcgagggactagggggaaggaaaagttgtcctacatgcagagctgagctacagacaaaagccaggatgtgagatgagagagaacatttactgatagacggctttcttcttcttcttcttcttcttcttttttttttttttttattgagatgaagtctcgctctatcagcaggctgcagtgcagtggcatgatctcggctcactgcaacctcggcctcccgggttcaagtgattctcctgcctcagccttccaagtatctgggattacaggcacgtgccaccatgtccagctaatttttgtatttttagtagagacgaggtttcaccatgttggtcaggctggtctcaaactcctgacctcaagtgatccacccaccttggcctcccaaagtgctggggttataggcatgagacaccacgcctggccagataaatagctttctagctcttgattatagttccttcctgaggcccagatgcacttttgcctatggattttgtgaaatatccctataattacataataaattcctctttgctgcttaagctgactaaagtttgcttcttttacatgcaaatgaaagaaacctaaataatgtaatgagaatataagggctcatttctttttttctggcattcttactatgtgtcaaactgttctaagtgttttacatgtattttcctatttagttttcctagcaactttatgaggtggataacgttaactccaggaaactgaagtagagatgaattaattaacctgccccaaatcacacagctaggtagttgcagagccagatacatagccaggtggactggccccagagctcacagtcttatctactatgttttacttgcctcccttgacacacaccacattgttctcatgggagatgacaacactggtggcagtgatgaggtgcacaccactctctgggcaacatcattcattcataaactcacaccatttattgattattatgtgtcaggtgatattctaggtactgaagacatagtggtaaataagacatactctactctcatggggattatattttgctagtggaagtgttagatgataaataagcaaatgaacaaatgagaaaaataaaacagtgatagaaagtgaccaaaagaggagactactttatttggagcaatcccagaaggcttctctgaggaggtcctatacaagatggccttgacagtcaaaaagagttgtctgttttgggatctgggaaaagtgtgttttgggcagagggactaagtacaaagtccttgaggtggaaatgaacatggagtgttagatacaagaagcccagtatggccatgagatggtgggcacagggaagaaataggcaggggtcagatcattcaagggcttgaaacatggttagaagtttgtattttattgtaagtgggctgtgaagccattggaaagtgataatagggatggggttgatgacaggatctaaattcaacattgatgagatgaggctggaataggattaaagaatataggaaaatggcactcatggcgatggtagccaatggattgactgagcacctttgtgacatgccttgaagattgaagacagaagtgggggacttgtgtcttcaatgagcagaggaaggcaagagacagtaaaagtgggtatcactagtaatgtcgttatatttctagtcaaagaatgatgaaatctggagtaaaatagagcatagaaattttgggggtggcttttgaaaggagtttcctatttaggtcactactaaagtaaatagcactgaggggggacatggggatgtggggctctggagttaatgaaaaaatgacatgacatcagctgttggctttgaggaagagcatctttgaacaacttagtgtccagtggctaaatcaaagtggttttcaaaactagcacctttttcaatgccactattttcccacaaagatgaattctgccaccatttctagaacagggaaattattgcagccaaaacaagtagtgtcccctccatttttcttcctatttttacatattaattggtcattcaaatgcatgtttactgtgcacctactatgtgcaaaaagacggtgagcatgagctagctcccctgaccactctgacctcacctccaacaattctcactcactccattccaactatgtcatcttcttgctgtttctcaagtattccaggcatgtgttgcctcagggccttcatacaagctagaacacactttccatagatttccatttgactctttccctcactttcttcaggcttttcctggaagtcaccttctcagtgaggtctttcctggccactcaacctgattttgaaaccccctttctctgcctctgcctgctgtgcttcttttgccctttcttgacacttgtcactacctgacctaccattcatttaacgtatttaccttttttatcgtctacctccctcactagtattaacctccatgaggaaaggcatttctgttcactgcaacattctcactgcctagaacaaggcctggcatattataagagaataaatacttggtgaattaataaatgaatgtggtaaaggaagtgagataggaattaacaagctgacccctcacgtcaggtggtgtgtggtccatggcagacttctctcagcagacacaaagggttgggtaggcctgcagtttcatgcaggtcagtcctgggtgcctaccactcacaggaggatgaattctctcttcttgttacctgcctgcaatttcccatccccaggcatagaagataacatgttatgccccgactgtgctaagaggaataagaagatgataaaaagattaataacaatagagaagtagcagcaacccgtttgaatacaatgtaagagaccagaatatgccacctcaaaataagtattattttgatttgaaggcaactgaaaagagtcacatgcaagagaaattctctgccttcccactatagtctaaaaaacaggacataaatttataaaagtctcttgtccattctctaccaggaaggacaaatggtggtgagcctgtagatgacttgcatcccaatcattgctgtgcggtgtcctgaccatatttggtgtctcctgatgccttctgtactgatttattaaacatttagctgtacgggaaaagaaaaacaagctgaatatttcaagcatcaggcaatgtactttatataggttatctcctacttagtgagtattgtccccaggtttcagggtgaggaaatcaagaccttgtgaggataagcaacttgccaaggatcacagagctggtaattagtggacctcattctcaaaaattaggcctctctggctctctttaaaccacaatgctgccttgcacaaatcaatgtcacaatgacttgaagagggacttccagagtggggctgttgcttagcagccagtcttagttacacccttcattttcttggttaaagtccccatgtgagagtggcaactcatggaaataatacatgagagatccaggcttactggaagttcccctgasgacctgttcttgcccagaacgactgaggaatccagaaggtccatgctatcttctctacctgggagcttgagaggcaacaaaaccatatcatggatcagacagccatacatctggaactttggtaatggtaatcatgttcttggactctagtagatgtatgaaaactcatccttttagcattggagtctaactggaaagaagtagaatattcacaaggtctctgattacacaagttctctgattctggatggaggcagagagagtgttccactcaccaaattatttgtttcagcaagggccagctcccatcttaataaacctgcactgtttcttcatttgcacaaagataccattggagccagctgcagccctgggcatggaggtggtaaagtggaagtgccttaatatttgttaaataccaaatataggttagtccctcactgtatacgatttgtccttgtgttagctctgaaattcttatggcatccttaggaggaaagaaatgattcatgccattttatagataaaccaaggcttaggaagtttaagtaacttccacaaggtcacatagttagtcaatgacagactaatacttattgaaagccagtgctgagaaatttcaaagcctttattcattcctctaccatcagatggtagatgtaggttttaagaaagtctggaagatagtatgtagaaattatattttcctcctctctttctctcttctccagaatagagatctctattctcttggacagggattctcaatcctgctttgagtggtagattattttataacactctatttattatcctaaaattagaattaattcatggataacataacctactacatataatttcacaaacaacttggtataatgccctaactataaagtaaaggagaaaaaataatttctaacaaaataatatggatttcagtacataaatgtttagatgtaactactttagagacaaagaagtagtcagattcttgcaccatatgttgtataatgaattagtccagaattaagagatcagaagtcctttcatacaagcagtttaggaaaataaaagaatagagttataagtggacaccagaacaaaaaccagtattaggagaactaataacactccagatttaccaatttctgatagcagaaaaaggtaaatagctttagttgaaataggaataatacctagacaaattacaagccattgaaatgaaaagaggaagagagtgtaaacatgctgtttttttactgatgcattatattttacctatttatggggtacatgtgatattgttacttgcatagaatgtgtaatgaccaagtcagggtatttgaggtgtccagtactttgagtatttgtcacttctatatattaggaacaattcaagtcctctcttccagttactttgaaatatacaatttgctatcaataaccatagtcactctgctgttgaatgacagaacttacaccttgtatctaagtgtatgtttgtacccgttaacctatctctcttcatcccccaccacccactcactctttccagcctctagtatctaccattctactctctattctctacctttatgagatcgacttttttagctcctacatataagtgacattgtctttctgtgtctgggttatttcacttaacataatgacctcgggttctatccatgttgctacaagtgacgtgatttcactctttttttataaccaaatagtatttcattgggtatatatactacattttctctatccattcatctgtttgttttata

SEQ ID NO: 95924 - DNA, 23222 bp, Homo sapiens
  misc_feature (1)...(23222): n = A,T,C or G
gaatcataggatggcaggatgtatcataagaacaacagggttacaaactcaaatacattttacctggtttcccatacaaagttccaacagttttttttaactgcctttaatatacaaattttaaatatgaatttgcaagaaacatctatcatatgtaacattgttatcacctatggacgtctgaggagactaatgtttctagcaatttcagttaggaaaatgctactttaggtgactccagggctaaaaaaaaaacaatcttcggtttccaatgttccagtcatagcaatacttgggtatgggccaagaaaggcagtacatgtagtagagagaatcataaacttaatcaggggactcttgccttacatggcttcatttttattcgtacccttttcattacctaacagtatattatacagttactcatttctttattgtcatcctacaacagaatgtatgttccaggacagcaggcacttaacactgttcaacactgtatgactgcaacagtgcctggcataaagcaggcatcaaaaaatttgatctactaacaaacagagataatgctgtaaaattaagttaaaatcccaaataaatttataccaaagacaagttggagcaatcaaatcaattgttacaatttccttttaaaaatagctgacttgcggctgcaggcgggtggctcaagcctgtaatcccagcactttgggaggccaagatgggtggatcccacaagcccaggagttggagaccagcctgggctacatggtgaaagcccgtctctacaaaaaaatagaaaaatgagccgggtgcacgccaagtcccagctactcgggaggctgaggtgggaggatgacctgagcctggggaggtggaggctgcagtgagctgtgatctatcactccatcctgggtgatagagtaataccctgtctcaaaaaacaacaacaacaacaacaacaacaacaacaaaaaccaaagaagaaaacccacctaacttgattttagtggtgccatcaaaacatattaccagagactaggcaaaaatgctcacctgttacaccagttttaggataaagaaactggaagaattcctcagggatcagtccataacgaacttttcctccgtattcaggaagaggtggtacagggacaaggtgtggctgccctgtatgaaaggtccttgttgcctgcaataccctacaggtagtaattgtacaaatgtaaagcctgtttctttaaggagaatacagtgtatgaataatgagcagaaacaataaatagggttgataattgaggcagttttctaactctcataatggaaagagaatggactgggaatgggaaggttagggtccagtaatcagctgtgacaacagcaaagaattaatcacagacatttaaccttctacccaatactggaatcccttctatcagccttgcagatcatctgtctagcactttgtatgtctatcattagcactgaaatatgtaagaatgtggacgtggcggtcagataggcatcttgagttcaaatcctagacctgctccttgactttgagtaaagaacttaagcttttgtaatctcagatttctctcagtaaaatggaaatagaagataataccttatatggttgttgagaggattaattgagttaatatatgtgacgtgcttagaatgatgcctggcacatggaaaagttctacgtaagtggttagctattatatgcctgatatgttgtaagctcctggacctttttgaatactctctttgatgagagtgctaaacactatatgtaacagactttttcagtactgggtagctctaattatgttcatctttgaattgagatgatacatacattcttggaacctcaatccattcttagttctaattttgcttttctatgtaagataacacacatgtacctgggtcaaacatctgttccctcacaatcctgattgcccgtaaggacttctctggttttatcttttttttttttttttaatgaggtatacagaactgaatataatactttaagtatagtctggccaatttattcatcctacaaatacttattgagaacttactattgccagtactgagcttgaacaattgaactattatcaacagtggatttggaaactattcttgtattaaagcagcttaagactacacttttaacagttacagcatactgatgtctccttaagcttctgatgaaataaaatctagtccctttatatctgctgtcatttagtctccttcaagttttcagtgtatttctgtcccacttcctaccctccattcctccaatctctcaacttctatctccttgtaatataagaatttacattatttcatttattttggtacaatgcttatcttttgaatattatttctgcctccaaatatattagctaccccaccaggttttgaaatctgagaatcatgcttgagattccttcatttacatcaaggtttctcaattcagcactaccgacgtttgaactggatatttctttgttgtaagaggttgttctgtgcattgtagaatgtctggcagtatctttgtggcctttatacaataggtaccagtagcccctccctccccgacccatcctatggtaacactgaaaaatatctccagacattgctaaatgtcacctgcaggcaaaccaccccaggctaagaagcactgatttaaatcatagcactaaatggtatgcttaggctgacaagtctccctaactagctaccttagttcaagtccttatcacctcttgcttagtttaacaatacaaaacctggtctctctgcttattttatttatttttttgagacagaatcttgccctatcacccaggcgggagcacagtggcatgatctcagctcactgcaacctccacctcccaggctcaagtgattcttgtgcctcagtctcccgagtagctgagtagctgggattacaggcgtgtgccaccacacccagctatttttttttttatttttaggagagacggggttttgccatgttggccaggctggtctcaaactactgtgatctgccgtctcggcctcccaaagtgctgaaattacaggcgtgagacactatacctggcctctgcttcttattaaataccccaacttaaacctagcccactcacattactgccaatgtttctaaaatgaaaatctgacttgaaaactcaacaggctctctcctgcctacagaaaactacttaatataacatacataatctagtacctgtcatttttttttttttttgagacaaagtctcactgtgtcacccaggctggagtgcagtggtgccatcactgctcactcgcagcctccacctcctgggctcaagccatcctcccacctcagccttcccaatagctgggagtacaggtgtacaccacaatgcccagctaatttaaaaaatttttaaaaatttttgttgttttgtttttgtctatgttgcccaggctagtcttgaactcctgggctccagtgatcctcctgccttggcctcgggattataggcatgaaccaccactgtgcctggtcctgccaaattttataaccttatcttccttcattctcttactctcctggaattacttaacagctctcaaaaacaaacaaagaaacaccacaaaaaaattgccttatgctgctccttctgccttgtatgcccttcataccatgactttatagcaatgactatcaagaccaatcaggagcaatgactaccaagaccaattagcctccagatttgtaaagccctccccccattttgggctaacattcattcttttaatcaattaaaaaaaacatttactgactttctactaatgctaggcaccggtaacatggcaatgaacaaagctccagccttcaacattctagtgggggtatgggaagggtgagtgtgtatctccatacaaaatttcaggcagctctaagtgctatggagaaaaactgagcaaggtaagsggatagggagcaacaaaatggggaagagttttttggtagggagtcagatgacatttgacccaatsatctggggaaaagagagaagagcaagtagaaagatattgaggcaagaatgcgcttggtagttttcagaggaacaccaaggttggagaatgagctaaaaagagaccacaaggagatggtgtcaagagataggatggaatcaattcatgttggaccttctgggttatgctaagtttggattttattcaagtgggatggggagctctggaaggccttggtgggggattgacataatcctcctggctattatgagaatgggctgtaatgggacaagaatagagatgcaagactaattaagagactactaaaatacctaggtgaaagtttatagtggttcctactttagcggtagtggaagcagcagtcagagtccaaatttctagaggaagagccttgctgaggtactggacatggagtgtgaaagaaaaccaaggatattccttgtatcttgtaagtataagttatttactacctggtattacaattatttgtttaccagtctgtatggggtcctttttcttctaagttggaagcagtcaattatagccttactttttgcatacatgagacttaattatagataagaccactttttcaagtccattttttttcaatttgagttaccgtattttgcaagctttagaactaagtttggaagtaaaaagagaaatctctaggaaaatggacatgtcttatggaacaattttaacggtaacagctgctaaatttactaagcacacgctatgtaccaagaactgtttttgagtttcacagcaattgtctcttaattctcaaaagccacaatgcactattatcgccattttatagatgaggaaattgaggtcacacagccagtaagtggaggggccagggaccctgtactggctgtggagccctcactctaaaccaatactcttaaggtgcctcccattcctagactgtgagctccatgagggcaggtaattagccatactcattcttgtatccttggttatgtttttaggcaacataaatatttactgaatcaatgaatgatttctctgattgttatcatatggcagcaaaaactaggtatctgggaaaccgactgtaaacaacatgctttactgttttattgaacaaaatttattcttgggtatgtcatctactcggattcaggctgtggaagctacatgtcataaggtcccaagggaaggtcacaaaggagtagggcgggtatagaagacagcaaaaccaatttctagtttagttagaatacgttacttatcctgctaaaatcttggtcattaggtgacatgagagcgttcctggcagttacaggaacaagtgtcttgtctgaaagagggtttaagtgtcccaaaattatcggaaagaaatttctgacctaaagctaagggggtgggggcaggaatcgggaaataaaaggtagtgaaaacaaagacgaaagggagcattatcctcacacttaccctggacctaggaaggctgcattcttcagagagggggctgcagatagacaaggcgaaggtcagcaaagtcaaatgaaatctggtttgccctttccttacccccgccaggctctatcactaagcctatgtacccctctttcccgtccctcaagaccccacgctcccttccgaactgcactgaccactcgcctctcaggcccgtgtcgctgcgcccttctcccctccctgtcacccctagattcgcttctttccaatcactctgatagtccagagcagggtctataccccttacccgctgtggcggcggcggaaagtaccacccgggacagcatggtcaacgaaagtccaggtagcaatcttagcgtccctgtgaccccgataggagaatctgtcagggcagraccaagatggccgctcacaagtctcgcgagatgaaaattttgtactcttccttcaactttccttgggagatttttwaaaaaaattatcgcgagaagagtcaagtaacgctgagagcctatygcatgagggcgacagccggaaagcaggatggagccatagaagcaattctcgcgagaagtagagttgcggttccctcgggagaggggcggaggctcagaggtgcaccacgtggggtttgctgccggagckgagtctccggccggcgtccagtttgagtctaggttggagttggaaccgtggagatgcggaaggaaaccccaccccccctagtgcccccggcggcccgggagtggaatcttcccccaaatgcgcccgcctgcatggaacggcagttggaggctgcgcggtaccggtccggtgagccgagatcccgggcctgggagctcccttaccccggcccagggcgcccctccccggagactgaccctcccagcccatccccgccctgcatgttatcctgaccctgggtcgcgtcaccgagctgtccccagccctgccccgcgttcctgagctcagatccagacccggccggaacgctgttctgtgcggtctccatggaggcgaacccttctacccttcacgcgctgacagcttgtaccccccgtagatggggcgcttctcctcggggcctccagcctgagtgggcgctgctgggccggctccctctggctttttaaggacccctgtgccgcccccaacgaaggcttctgctccgccggagtccaaacggaggctggagtggctgacctcacttgggttggggagagaggtattctagtggcctccgattcaggtgagtcactatcccattatccacccccacccccgggtggaacggtagaatggagacttggggtaccgtagggttgagctcaatatctaacgtcctatactcagtgcttgraggagcctgagagtgttggccccgaatgcaaactcttktgtaggtgggaaataccttttctaaaattctaaattgtctggtgagatttcctagaaaaatccgtaacaaaattaagcaacggattggaaccatttttcttctgtgtaacctgccccttaacccccacagcccagaccaagcataatcttgattttaagatgacattgaagccaatctgtgctacatgtctcttcccatttcttaccgctttcttgtcttcattctgctttctttttgttgactgttaggcttagcgatgcaggctttggctttttttttttttwaaatcagaatttggaagttggccggcattgcatggaagtttaaagtcccagtttttgatagatttaacctytctgacagttgagcttgaacactacataatcaagacaacttttggcggattctctatacttaaccagtcactgtgcaagacgttcaattattcaacatatttttaaagactctgcaagacatttattcaactagttcagcaaatacttactagtgtccaaatattggggaagtgttaacatcactggatagtgtgctgcttaaacagttgtggaaacttcatccttgtccccttgcagctcattttccatattctctcactaaaagcagataatgaattttacagactgttccatctttgtctttttctggaagctttctgcacctacttgtctgggctgtcattaggaaaacagtaacgcagaataaagtcaaagactcagaaattagctgaactctccaatgatgtggactttgcttttacaggaataactaacttactttgttaatttagtgacaatggctctttgantcctagaagtgaattactrccttggtataatccaagctcatgttttccttaccctacccccaacaggtgctgttgaattgtgggaactagatgagaatgagacacttattgtcagcaagttctgcaagtatgagcatgatgacattgtgtctacagtcagtgtcttgagctctggcacacaagctgtcagtggtagcaaagacatctggtgggtccctgttctcattgctcctgtctctaagcctcctgtgggtgcctttcctatcctgttaacctcattaggtaacattttgggcttrttctaagaatccagtgacttattttagcatgtctataaggtttccttagggattttgcagtccatcgtaagtagaccatagcagcagtccaagaggcaaagacttggggaatgttgattacaggaagttcttgtttgaacacgtttttatgttgatagtgtaggtcaagattaaatgtctgtttgcttttgcttcttagcatcaaggtttgggaccttgctcagcaggtggtactgagttcataccgaggtgagtattctttcatttttagccctggtgttagctgttgtgtttttggactttttgaactttgctttgatgttaggagcagcaattccatgttctgatagttttcttgtaaaacaatagtcaggctccggtatctactccttgtccttttctcaatttccttgtttctttctttctttttttttaattcgactagtcaagtgcagtagtgaaaagggaggaaagaatagaacaaggagtttaatctgtaactgactgaacaatcaactgagataactcactaccttcagaccagccagtttccctgtttctrttgatggcctcaccaccttggcaacacagggctcaaactcggtccttttccacctcttctgttttcccaccatcggttggccactaagttctttttagtcttttccactggtcagtcaccttcctgtccatttctatgcccgtattcactttcaggctttaccttacacaggcagtggcactcatctctccactagcaatctagctcttttggtcttttattagtttcttgtggcctgtggattaaaatcccattttcttgtcatggcattgaagcccttttactccatttcctctcttcaagcttactagatccttgacattcttgagggataaatcttgagacttttaaatcttgaacttttgagtatttaccttcataaaatgtctgttttctggtgagaaccattacttttttaatgcccctctttctgctcactttcattaacagcactagtagttaactttatcttgggagccattctttgtgaagataatgtctagagccttaatgtgtacatggttccaaggtttagatgctgggggatcactgtggttctctcaatggctaagtgcctttccctgccatttctaacttcaaagtacatgactaagttataggccagagaaatcactgactcatatccaaggtccagtatcctggaccctcagggtcacttggaaatagttttacaataatgttgaatgcccagctgtgcgcagtggcttaacgcctgtaatcccagcactttgggaggctgaggcgggtggatcatatgaagtctaggagtcagagactagtctggccaacatgccgaaaccttgactctaccaaaaagtacaaaaattagccaggcgtagtggtgcacatctgtaatcccagctacttgggaggctgaggcccgagaagtgcttgaaccctggaggcggaggttgcagtgagtcgagatcacgccactgcactccagcctgggcaacagagtgaaactgtctcagggaaaaaaaaaaagtcaatgttctatgtctattatatttgctttttatttcttagacatatgatgtgctttcctggttaatgctaactctttttcagcatttctgccatgcagcctttttgttagttctttgtgtttgtgtcttattccccctgctgaattccaaatcctttattatttttctattttttgtagagacagagtcttgctatgttgcccaggctggtctcaaattcctgggctcaagtggtctcctgccttggcctcccaaagtgctgagagatacaggcatgagccactgcaccctgccccaaaacctttgagggtagaggaaccatgtattcatcttttgtacaccaccatggtgcttgtcccagagctttgcttttttcaagtgagcaataaattccttttcttacttcttatcctgttggctttctatgaattctagggctaggaaagaactatggaaactggtttaattccatccttctgcctcagggaagggccacattcagactacctgggaaagtctggtaaaatgactgtagaaaaggtttccacagcttctaattaacatgtagcagtgactttaaagttttttacatgtagacctcctaaaacagttttgaaaatctgtgccccctcatacatttttaaactgatacctaaaaatgcttatttaagtagttgcagagaaggtaatttctggcatataatttattgtgtgcttatttcaagcatatatttgtcaaaattttagattcgcaggttaacgctacttagtttgcatgaatgtctaccaaacagcctaactggcaaaagccagtctgcattgtaaagccagtggaccaagatagactaaattttctgtcagaaaaagtctgactttgtttttaaattcagataaagttgttgaatatgtccttatcacaatgatctatcatattttttagttctcattattagacagaaacagagttaagtcacagagccatacttgtgtttgtggtgtgactgaaacaagatcagcccccttcattgaattttacctagatgctctttctttttgctctttggttcttatggaaaagccccttttgtcccttagtttagaacccttatatttttatacccctgagcattgtagcgtggaaagatctgggatgaatgacaggtatgtgttctttctatgaagtgggagaagagtgattgaaaacagaggcagttcaattttaagaaagagaacattagagaaattggctctcttaatactattagcgcccagaactccctcaaaagtttttgtatactacttggagktgtgtgtactccagtatgaagactgctattctagaattatttagccctcacrtctaggatgcctaaactggaaattcctttgttattcttactaagcccctaatttctcattcattatcttcactaatacgttttttttttacaaggctttttaggttttataagtctataaacttctcctcttagcttttgtctaatccataatctcccacaaaatttgttaaattgcatcatgagaccagccctccctccctcctgccccttgattattcctgggctggccctctagtaatgcttcagcttgttttctatcatatttctctttctctctcctttatagctcatgctgctcaggtcacttgtgttgctgcctctcctcacaaggactctgtgtttctttcatgcagcgaggtaagagatagctccttcttccctaaacacactccagccatccataggccaaagtctctagtggggagactttctggcctgcaactgctcctttggattatgaaatcctttttctgttccaccttcctctaggacaatagaattttactctgggatacccgctgtcccaagccagcatcacagattggtgagtctgagattcattggtgggagaatagtacttggaaccctgatagaagagactgtctttggccagtgtcaaagcatagttgctagatgcccagtgtagttactgtgacatgagtgacataatctccttcttttccagtgaggctctgctaaccccattctgtgcaatgaataccaagaggaagggccagttcctgggtgggtgatttactttattagatggtaggacaaaggggccagaattgttatcgtcatgattcgtgcctgaaacttgcctgtgactcgtgyccagaaagggcaggakgctgctgggataaatggttatgaggctcaaggatgaggacactgctgccttagcagggtttgggaaatcaaataaaggtgctcccaggatttagagtgatatcatttgagaaactgcttcttctgtactctgagttttggtccagaccctcgtctctcctttgcaggctgcagtgcgcctggctaccttcctacctcgctggcttggcatcctcagcaaagtgaagtctttgtctttggtaaggcagcgtgtcagacttcatattgactctgggaaaggggaggaggaaaaagaaagagctgactccacaacacacaaggcccttgttgctcagtcttagccctcatggacactagatgaattatgaattgagggtggggaggtggggtgatgccaacgtagttttagtgtagttttggagaacatgattattttcccagtggatttgatttttgattgattgatccagcttctgtattctgggcatggctataagtcagtgatccacaaagcaagtggattgctatatagcgaattctgtcctactgtgggtaggtgtagcgctatcgtggtcatgaggctgtgtatatggtgacatagtttgtggttaaaataataactgcttcgttcattaacttaattttcacaatgatccagtgacttattattcctactttgcaaaagagaaaactgatgctcagaatggttaacttttacaagctcgaggaactaggattcaagtctttggcacaaaagtccatgctcttaatcactatgacatgttccttctcttctacaggtgatgagaatgggacagtctcccttgtggacaccaagagtacaagctgtgtcctgagctcagctgtacactcccagtgtgtcactgggctggtgttctccccacacaggtactgttctttgtcatcaggggcctgatgggtataaatgggaacngtgagggtgtgtgtgtatgttttcaaagcattagctgatgaagtagttccttaaagcagacagtgttctagctgaggtttcggaacatcgaagatctcttaagtgtgaagtagaatcctttgggagtcaaaggatttttcagattagatggtttctgtctgaaatggctaaaatgtgatttcattcctgcccaacacccaaaatggttaatgttgtgggcttctaggactgtgagattggaaaagcctgtgtttctgggttattgctgaagctatagagagggaccagatggggtggttagttgccaggatggttgtcaaccctaactttgcttcatttccctcatctttacttgaaacttttagtgtggacttgtagtagccagattagccaaaagtgggaatcaggctgcctctcctgggtcactttacagtggcggcagggccggcccagttaaggttttgtcttgggatccaggctggacctttcacaaccctctcctccatctgatagtgttcccttcctggcctctctcagtgaagactgctcacttgctgtgctggactcaagcctttctgagttgtaagtgtgaagtggaatcctttgggaatcagggaaggggagcagtgggtgggcgagtcattttcctcttcagaaaactgtgttgtgcttttggagaacagattctccatctgtatccgaagggacttggtaatggaagcaggctggctgttgaccctgtccattcctggggcacattcacaaccccaaggacaagccgtgtccttggtagaggggggtggtaggtgaaatttttaagtctagccctccagcgctctcccacaagggggcggcagtctaccctctcacataaagaactgcgtatgaaatgcagcctgctacagggtaaaaggcagcacctggaagacctgaattgtacttccctccttgccgtgatttgctgcctgttactgcccctcatcactgtcttgttctatccagcatttcttcatctatgaaaatagaagactggattggatgactgrtgacatccactgtggatagctacactgctatcctggcgatgaggccatacagttggtgaaatgtgtgtaacacacccaaaaaatgtgccccagatgtgttgggttctctttttttctccaggtctgcttttcttgtctctactctgccccgactttttttctttcttctaggtttagaagccaagcccacagagactttgtgagagatgcgacttggtccccgctcaatcactccctgcttaccacagtgggctgggaccatcaggtcgtccaccacgttgtgcccacagaacctctcccagcccctggacctgcaagtgttactgagtagattggatttaagacaaaaagcaagtcccccatgagtgtccacttctttgccctgccctctcagcttgtgagacaacacaggagccttctatagtatgttgatatgctagatctgtgccgttaataggcatcgtctctcagcctgagggaggctggattytgggttcctgtagtcacagggaggaaaagctttyttaaaaatggacatgtatgtgcgtgtgagtgtgtgtgtagatttatagtttttggtagtggcaggaataaaaaaaatccatcctacatcttccctaagcactgcctctctctcaccccccaaaacaagttgacgaaagggttttatgtagctgtctatgaggaattggccgtgtctgggtgggttatgggatgtgggcatccctgggttcttggaagcagctcttatgctactcatagagatgggattgactttatttttttatagtgcttaattcaccattatgagaaatgcttccagtcacaaaaatgcagcccagctcactctgaggaagaagcaggacttggtacggttttacacaactccttaccattaaactgaatcagaaatccattttctggctgaataaaaagtttggcttgcctgtgtaatgcccactcccttccccctggctccctagtgatgggacatatatgagagaraagtgtttttctatcatagacaccayagggraaagtttggggatgaaggagagcttaaaggtgtttcaattaagttagaaaactgacacaggctgttgagaattctttgccacttttccmaccccaaaacagcatggggcctgacatyttytgccctggtcccctttctcttgatgtggaaagtctgaatgcagtatttatagacttytaaggttttaaaatccagtatcaagaagaaaatcagaaatactggttggtgaaataaagagtttaggcattgttggcctgtcttttttgaagcatgtgtgttatgtgtagttagatatatttcacttatgtgagtcatcatggtgttggtcttgtagcccattatttttcctgtgcttccccagcttcccaaagtagctagttagaacttaaggtaaatatttattcttgggttggtggagtggatattgccagttaggagtcatggatcaattactgattatattgaaagtaaatataatcaattatgtacttttgagctttgcaggttcaatttaggtaaaaatcacattatgaaactgggaawgtctgaaggaatatgggcaaaatatttctcagtaaagcttccatgcttcacccttgacatgattacccttgagtaaaacatgggaatttgtagttgtgtgatcctctggcgttgatgtggagtaggaataaagtcttgcatcatttttataatgtgggaggaaatagaatgggtaggtacaatcacttaagttctgcctctcgaagataaaactttaattttgtggacacttagagaaagtaaggggtgggrgagcttgaggtgagtaggaatttgcatagcccttttcttcctggacttaagaatgatrgagaaaaaactcagtgaaagagataaggaagcaaatgtgtggaaatgtgtgataaggaaggaaatgtgtcaaggtggttacaatatggaagggaagcataggttttttttttcttttgttgagatggagtttcactcttgctgcccaggctagtgtgcagtggcatgatcttggctcactgcaaccttcgcctcctgggttcaagcaattctcctgtctcagcctcttgagtagctgggattacaggctaatttttgtgtgtttagtagagacagggtttcaccctgttagccaggctggtctcgaactcctgacctcaggtgatctgcccgccttggcctcccagagtgctgagattacaggcatgagccaccgtgcccgaccagaaagcatggtttttgaaggaccatattttattgtaaaaaaatgttttggttcagatagatgtgtgctgatgggagtaattcacatctatcagtgaccaccaccaagatatttataaaccttatcaaatacagtaggaagagcaaccagcacaattttggataaatgtatatgttkcagtgaacaaagaagatagtttaaaataaaagatgaccacagaataattagaaatggtactgtcacatatggagtgatttgctasgtccttcacttgaggatagttctagtagagtgagtgcagagctgatgacaagttgaaatgagatcaatctatttgtttaaaaatatacaaatattttgcatttaatttcatcggttaaaatgtctaaacattagagtaaacccatttccctatctacatccttactctgaagtccactaatcaaacctactcttccacagctgttctctggtccaccaagggctatgaggctcaccccttggatggtgctcagaaccacaaggaatactgaagaagccttgcctatgatttcaggtggcatcagacattgggctaattttcaaggtgtctctccttcccaacaggacagtcggagtctggttctttaataaatagctatatggatcttacttactggttcacaatcatattacagcagcaaaaacacccaagctctaactgctctgggcctccagccatgtttcctccagatagcatgttagaaaggacaggagattttaaaaatcagattggacttcagagggctccaaattttcttgccacatctagacctgaaagtaaagagctctgattattaagaggcagattctcgttgcatttggacagcgtgagtaatggtcacactgaacacattagaatcagttgtgaaattgattttgtttcaaaaaaggataagcaagctgtagtctcaattttgrgttaattgaaatttctcaagaacttcatcagcagctcacatgatacagttttggaagagtaaacaaggtaagcagacaaccctgggaccccaaacacattttcttttttagttctccatcaaaaataggcatttctggagttttggtctcactgagtgatcacaggactgctgcaatccagggaactgagggagctgtgagcatctgagaagaaaggttagctcttgttttaagttgtagagacaacttaaaacaagttgtgacacaattagtgatcccataatcttttatcatctggtacaacatttaatatagtagcattctacttactgtggaaactccttgtttcacaaatgatgttctgcagcttcaatatgtaatggatggaccatcaaagttcaaaatataataaggaatttaattcccaaacaacatcctttaacattctggtgaaagcccagccagtgtcactggttgaaagtgccttcagtggatatagctatatttcacctgtccctgtgatcatgaggtaccagattccggtcaagcatttcactttgggaggcaccatgttgtaaacattaggaatttcaggtgcaaactaattttccattctggtagtaactcttacctggagtgtcagctaagtcatgaaaattgtttagattagaaaatgcactttttatatatagcctaaattagcttcatgttctgtagtttctgcagcttgtctcagaaatcctctgagtagaactgatgtatgagaccctttaagaccattatccaactgcagtttgcttggcagagttagcattaatgcaccctttgatctaggcacctggaggcaggtaagacaggctctgcgtgcaccaccgtccctggacctgttgtggcggactccttgaagcaagatcaacttgggctttgtttgagtttttaaagtcttttttttttaatgtaaaatttgtcattttaactttttaagtatacagttcagtggcattaagtttatttgcatttttgtgcagctttcaccacttccatctccaaaactttttcatcatcccaaactgaaactgtacttattaaacagtaactccccttcctcaagaccctggcaatcaccattcatcttcatttctataaatttgactattctagacatacgtgtaagtgggagcatacaatatttggtttttttagaggggggttctggcttaattttataaggtgttaacttgttcctcaaaatgtgttctataaactggcagcatttgcatatcttggaacttgcttgaaatacagaatgtccagatctactgagtcagaatttacattttcaaaagcttcctasgtgactcatgcatattaaagtttgggaagcactgacttagattaccttttgagaattccagatgggtcagaaaccagacagaaatactcagtagtgagaagctatggtgtatcagaagctgttaggcatttcatggtttggtagtgagcaagacagatagttttcctgtattcagcgacttagtctagagagagacaggatggaattaagtgtttaggtgctagccaaaagtaaagattcgtagaaaacaagggttcatatcccagtcatcaaagtgataaattttccctgcttaacatttagattaaaaagtaataattaggccaggtgtggtggctcacacctgtaatcccagcacttttggaggctgaggtggacagatcacttgagctcaggaattcgagaccagcctgggcaacatggtgaaaccccatctctacaaaaaataccaaagtcgggcacggttggttgtgtgtgcctgtagttccagctacacgggaggcagaggcaggagaatcacttgagcctgggaggcagaggttgcagtgagccaagattgggtctttgtactctagcctgggcgacaggagtgaaacagtctcaaaagaaaaaattaattgacaaacattgtgtatattcaaggtatacaacgtgattatttgatagacgtgtaatgagttatcacaacaagcaaatggtacacaatatagtttcggagggtttatgtataaggggactaattagaaaggtttggaaatggtgtaggagaaccaaagggctagtgcccaagggcaagggaagggagtggttacctgaaactggaagaaaagatagttttgtagagcatctgctttgagagcagcagtgacttttatcaagagatagagttaccttgatgccacatcacggggtgatccaggagaatgaatacgccgatttctgtcctcccttcctctactcttccatcaggctgtacccaacagagcccatttgatgtagtccaaacagacagactttcaggggcagcaagtgaggtggagaaagatgggaaatactaatagaagggcagttggaaaatatgtttagtctgcctttttgccccttatcatcctctcttgtccttaatataggtgaaatttcatgtccttaacacaagagatgcctagagtcccatcaactattttatcattatggggtgataaccatttgttcgtgcttccatcttaaacctaaaggattaggtatcattagtgtcctcatataaagcagcagtagaaaagtgagaagagaaaaacaaggaatgaaatatagctgttagagttcctactcgtaaatggtcatacagcctaagtatcatggccatcttttcccaccatccattcgacgttgggttcccctcaccctctgagaacccctcgtccaggttcccctcrccctctgagaacattggtgagatgaccaaacctgagtgcggggtctgagttcttagtgatttgctctttattgggtttctgcagctttccgtcatgggaattactgggcaagggagtagtgaagatgtcccagtgagtccccagagtcgcaaacacagtcctcctttctctggttgtgtagcagcaactcaattcccccctggtaattgggatcaatcaccccaactggtgcaatggcttctttctttacatttttttttccagtggcctaaggagccccagatggccaagaggtagccttagcttctaattcattgagaccataactgtactgggtgaaacattcctcatttaatgctagaatcttcaagcctacttagccaggactactgaataagcagcaaaaactcttcaagtgaattattagatataatagtaaaacaggcaacttctgttcctaccccttggttcttaattgcagctatgcattttggccttgggagagatgacaccatatattctccctgatttaaggcatagtggcattaatacagtggaccaatataatgttttgtgggctactaagaaatttaagttccctttggactatattataacaaaaagtggaagagttgacacagtcctggggcaagatggtattaataaaagtatactcttgtccctaccatacaagtgcagtttccccaaatttcttaatgattggaatggaagataaagcaggtcagtagctgtatgtcaagtgcaaggggctatgtcattttgctccattaaagaacagcacatctggaattgtagttgtgattggcagcacaacctgattatcaactgtaattcttcagaatttgtctggttttcgcaccagccaattaggtgaattaagggatgatgtggtaagaatcatcactctgcatttctcaagtttttgatggtagcattatttctgcaattcctctagggacgtagtagtgttgttttgttttgttttgttttgttttttactatttttttaaactataaagtttaaaacacacacacacaacacacacacgcatacatatatgcaactccagaggtttctgcctgacccttcctaccataacagtcctcctaccagaggccaaggaaataacgtaaggactctgcttgttagtgatatctattcccagtatacattctgggacttgggaagaatcacataataagtccgtggttatgctgcttagatggactcaggccaagacttcatttaccccttgaaatttataagcccccagtgacatgttaggcacattggtgtttccagtctctgagaatcagtgtaaatttagagacagtatctaatgcccctgcatagtctaggcatttctttttcccagtgtgaagtcatgcagcccacactatctctggggaaagcttgggtgaaaattcagaatgcatacctatagctacattgcaggatcccttctcagaaggacccagcttcctcatagttaagtggctccaggattgtgaactagtttagatctgggaactgggtaaaaagctatgaatatgaatcccttctatagtaatctgggttcggtttctgtcttgtagacctagaaattttccacctatgtatgtctagctgcaccttagtaggctgctcatttatttcatttcttggaaccttaccatcaattagtcatcactacaaattcttataggtcaaaacaccatgattatcatttctttatatttagtttaattaacttatttatttgagacagaatcttgccgtcacccaggctggaatgcagtggcacaatcacagctcactgcagccttgaactgctgggctcaagtgattctcccacctcagcctcccaaatagttgggaccacagacatgccaacatacccagctaattttttaaaaaactctttgtagagacgaaggtctctctatgttgttcaggctgatcttgaactcctgggctcaagtggtccttccacctcgtcctcccaaagtgctgggattacaggtgtgagccctgcgtctggcccatgactatcatttctttcttatggggtttattgtggtcactgcctagcttgtatctgattgatcagggaactgattcccttgcatctattcctaccattatctccagcatacagaggacagccaccatagagctgcacctttttgaattgggaatcagtcatcatgagcaaaggcacagcactgggaaggtgggaaaagataaactcaagatggtttggcaccctgcccccttcctgccatccagtgggtctctgctccattccttcttttacttgtctataagcatcttcctagaatatccttttgattgtttccctttcctgcccagataccttccatggtaaagaagtttctaaaccatgttcttcccaaacagtacatcctgcatgttttcttaatcatacttatacaaaatataagtaaataggaaaaagtaactatagtaacagttgctattggaattcctctttggatttattagagaaagtaccctaatatctgccttgggtatagatagtgaaagcccaagcattttgggtctggttagaactaaactgtagcaaacaagggaggagtttttcagggactctggaatgggagagaacactgggataactgagaggagccaggagttggtgaagtctttgcattaggggatgtgacacttcacaggcacccctctcccctatgtttttactaaaaactaccaagaacttgatgtgtaaggatttcttatagaggccagtaaaaaggttaagtcatgcaacaggaagctttgcagaaaaacagtctatacccaaggatgcaggagcacagaagtagagaacataaggaggaattcttgagaatttgctggattatcggggacacttcgggctgacacagggagtggggctgggattataggcagagtgtaatcagaccactgaggggcagagagtctctaacatctaagttacatacttatattttaaatttttgtgattttagtttttgcttgctccattagagtagaaaataagtatttgttgaataagttagaaaaatgaatgaatgaatgaattgctttcaggactatgccacagaatgttagagtaggaaaggaccttaaggatctattagttaaacctgttgagcaattagttcaatgttgttaggtattgatctcactccaaagataataaccattagcagcaataacaacagtcactgctatgagtgcctaccatgaatcagacagtttacatttataatctctatttttttaaacctttcaagaaaagtgtc

SEQ ID NO: 95925 - DNA, 26329 bp, Homo sapiens
aaactctgtctaaaaaaaaagaaaagaaagaaaaccacctcgtttctgtgtataagagaagacgtgtgtgctctatgttcatctcatcacagagctacacagacatgagttaagtgcatatactttaatgtgattgataattttaatcacatcctgcaaaacgttaagttcaggtgacatttttcggctaggcagcatttctctatggatgacacagtgcatagactcacattcagaagcaacctctttgacctgagtagtgaaaccagaaagccatccagtcatggcagccactctgtccatgcatataccaacacaaaatgaccagttcagttttcctgatatgtaatcattctaagacttgaatagttctgcagctgtggtgttcagtggcaacaaaagtacacataacttattctcatgtacatcctcctgaaaaatatattgcacaaaaacaagcattgttgccttattgtcaacactggtagactcatcaacccggattgcataccatggtgactcattaaacctctctaacaattgtgcctcaatatcctctgctatttcaccaattcttctagttatggtgctagctgaaagagaaacacattccaccttctgaactgcagcttctccaaacaaattcatgacaagtatccttagcagcaggcaggatcaagtcttcaccaacagtaaagggcttcttggctttagtaatgcagttagctactaagaatgaccctctcagtgcagacacatttgatgaagtggtagccttcaataattgctttcattctttgtgttcacatgttttgcttttggaaaaactccaaagacttgtcttttaatgcagggtgcttggtctccatgtggcgaagcagttttgaaggtctcatggctctgctggatagttggtcaccaaatattatacaaagcaggcttgaagaatatgatcctcctgttgcaatgatgctataatttaagtaggactcttggcattttctttcaaatgcagccgtctttttgttggcagtcttaagagagtcttctagctgtttcatcattgggtctttcccccttttccaagaagctttccagtgacatttgttttttactcattttggctaggattagcttgtgtgcttacgaaaactgactgagacaagtgtgcactgtgggaaagaggtgccgatggaaatggtaaaataacgggcaggccatacgcagactaaagtaagtgtcagattctgacttaaagcctgccaccagatgcaacttgtcacttgccagtcatggataaggttttgatatgagtctacaagcaattgatttattatggtctgtgtgcagtcaagactctctgctaatgttaatctgtatttgcaactactccccagggttagcaacactgcctcagctcctcctcagatcatcaggcattagattctcataaggggcacacaacctagatctcttgcacgtgcagttcacaataaggttcacactcatatgagaatctgatgctgcagctgatctgacaggaagtagagctcaggtggtaatgcaagcagtggggagtggctgtaaatacagatgaagctgtgcttgcttgcctattgctcacctcatgatgcgcagcctggttccctggggcttgaggacccctgacttattccacaattatttataaagtgtcaactatttcaggcactgggctatgcactgcagccataaagatgaacaaaaatggccttgttttggtctatgagaagtttataatctaaagaaaagagtcatgccgaaaagcagttaccatcctgtgaggtttaaatttgacaggtccatctgaacatggagtcaaggagcccctcatctgtctgagaaatcttggaggaatacagaagcatggtgacaggtaaactaaaacttgaagaatgagcagaaaatcaatcctctagactgggcaggggaagcaggttcggaaaagggcatagcagaagggaagaaaaacataatcaaaggcatgaaggcatgaattaacaaggtggatctgaggaagagacaattcaaggtagccatggtacggtcatgttggagagaccagcagagtgtgaagctgcacagatgagcagggaacagtcagagaagaaatgctccttgactagtggctgaaatcatgatcctggagattatggggagctactgagggattttaataaggaagaggcatgatcctatttgcacaagggaaagctgattgtggccaaaatatggtggaagtaattcatggtataaaaacacagcaggggtacaagttggagactatcccaacaattcattcaagatactttgtgtctgaccagttctatgatgtgaagatgaactcaaaaatattcaaatatgtttgaccatttgacaaatctttttcaacttaagaagcaagggttaagaagaaggcaatgtctaatttaggtttctggccagggagactagagagatgatggcattaactgagagagagaatacaggaaggtgagcagcctcctgagtttagaagaaagaggtgagctgagaatgaacatactgaggggaagtgtatatagggcacccaggtatgctggtctaatgagaaaaatcataaccaacagttaccatgaacctggatggttctaagtagtttacatgtgtggtgaggcctttaaccctcacaaaaattctacctaagtattattgttttcctcattgatagagaaaaaaacagacacagagagtttaaataaccacttcaaagtcacatatttaataagtggaaaagctaagacttggattctgacagatgggcccccaaacagtgctggtaaccagtagaccacaccaatgtgagctatatgataatggtgctccagaggggacctgggctggaaattcctaagtaggaatctgggctgggcatcagcatcttcatagcatgatgaattattagactgaatgaggtcattcttggaagaaaactacaaaagttctgagtatgtaactgaaaaacatcaatatttaaaaattgggccaacagatttccaaaaagataacaaaaaatggattaatgtgggtgaggccacgtaggtgaagcaattaattacataaaatgttattgagtgcctactaagtgacaggtctgggactataagttgtagtccttgtccttgaaggtgtttgtggggagagaacagacatacaaatgctcagctacctgatacaatgggtgtaatgaaggagctgtttacaggatgccacagaagctcagaggagggagcccctaagttactctgggaagttcaaagaagatttcacagatatgggagcacttgagcagaggtttaatagaagaacaggagtttacttgattgacagaacgtgttattcttgcactgctataagaaatatctgagactgggtaatttacaagaaaagaggttaattggcttacagttctacaggctgtacggaaacataaacccagcatctgcttccagggagccctcaggaagcttctagtcatgtcagaaggtcaagggggagcaggcatttcctatcatgggagcagaagtaataaagaatccaaggtgctacacagctgtaaagagccagatctcatgagaagtcactacagcgaggacagcaacaaggggatggcactaaaccattcatgaaaaaaaatccacccccaagatccagtcacctctcactatgccccaccttcaattcaacatgagatttgggtggagacacagatccaaagtatatcacaaggaaataaaggacattacagttaaaagagaaacactgtgttcagtatcaattaggactcatgtttgtcaacaactcacccaagaaacaacagattaatgtggtcagaagcaggcaggaataggccatttcatcttggtgtagtggctccaccatgccataggatagtagactctttccatcatttctgtcttccatccttagcatttggccccaatgtcacctcatggtcccaagatagctgctgcacttccagactcctatgtttacattagaggcccaaatgataaaaaaaagaaaaaaaaaagggctacaaggctaaagggcatgctgagtctgtatcctttaagattgtttctcaaacacttcacatcaccaacacacagccacatggctacagttggctgcagaaaaatatggaaaggtgagtatttttagctgggcacattggtgttcttttttagtgacaagaaagggaaaatgggtgttgggtagatgaacaggcatctaccatattgctgtagaagaattgtgggtctggaagatagaaaaatctgtccctagttgtagacacgactttagcccagccctataaaggctctgggtttcaattttgtcttatgtgaaaaatagacacgaacctcacccgtgtcacgtaactatcactagtatctttgtagaaggcacatcacaaaatgcttgggaccaaaagtaaagagctttgcctatatatgaagaaggattgtaattttctgttaataattttgagaaggagactcaggaaatggaccaccacctattcagaaaatgttctctgaggtacaaaagaagacacacacaatgtgtgtttatctcacaagcagacatttttagcatatgcatctaatgccttagactctattccaattgttgagcagataggtgttttgtttttttttttttagcagtcctagataaaagcgtgtattgttgaaatgtattgaaaccagattaaagaataataatgctataagcacgaggctgctatgctgggagcctgtcaccatgggtggctaagtaagtggtaatagaaaggaccaagaggaagctgataatgcccatatctgatgtggaggatgtagtttgtgaggctgcctcctgtaacaatcccatcttctttcttcatttcctgaacaatcccgccagtggcagggaagggagcaactggcattcttgctgcctgcctgctgagcaaagccaagatgattaattttcatttgcagaaagatgaattatctctgcccccacatgctagcacacagagtccagtaatttattttttcttccaactttattttaacataggtccagatgggactctgggctagccagtcaggattgctaaatggctatgtcttttgggaatttgtatgttagcctgaaaatgatgttcaacaaatatttattattaacagtaataacagctaacaattattgaacacttactttgtataggacttcaatgtgcatgattttaccaatgatgatgttgaggcatggagaggtcacatacttttcccaatgcttcattacattggagttgggatttaaatgtactttctctctgattcctgtattcttaaccactgtgatatatgagtgaccagaccaagcacctactatgtcctatttttgaccatgggaagacaggcttgtaaacaagaattacagaggctcactgggatctgtgtgggaaggtgacacacagagaggaatgagcaactgtagcagggaggaaaggaaagatgaagaagaaggtgatgctggtgctgtgtattactggacaccaagttaggagtcctaaatgtcatcccttccccattttgagtggctgtgtcacattgggcaaggcactctgcctctccaagcctcagttttcccatctgtaaaatggaagacttgcctcaaccatctagctaaatggtggtgaggcttggtaactttctaaacgtcccagttgggtaaagctgggaagaatttaccactgtgaactttctcttattccacagggcagtggcttgaaatagtgaaaatttatcttctaccttcttagctttcaagctctctccttgcacctccaaaaggaggagatataatgcgtgtaataatgtgtgtggagatataaggtgtgtaatgaaggagctgtttacaggataccatggaagctcagaggagggagcccctaaattactctgggaaattcaaagaagatttcatcagtgcatttaactatgatggtgagcctacaaccagcagccttttccagttcctcatatgaaagcttggtggtaccactgtcagaacagaaaaccttatagccatccatgcactgctgtgaattgtccaggttgacaggctggggctagagggctgaacactggagagcctggcaacctcctaggacttttaactcagctgcattatttttttaatctttatagaaaacatgtttaatgtggacacatttgggtattgattaactgattcattcaatcaacaaaaatgtactgaattcccgctgcatcgcgggagctgttctaggtcctgaggatatatatataatggttaacaaaattggcaaaacttcttgcattcacaacgcttatattcttgtgctagaggcaattataataaacaaaacaccagataaatgggaatttgagaaaatcttgggtatcaaggcttcaaggctcctgtttaattctctcatagctcacatcatcttccaccaaatccaccacactgaactgacgatgccttgacagtgtcaggctctcacttgccgcgggttctttgcacatgcggttccctctttctaccctctctgcattgcctccttaccttaaaaattctttctcatctctaaaatctaagcttaaataccacttcaagaaatcattccctatactcttccacatttgctctgcatttctcccgttatggcatatatcatggtatattgggtctgctggaaccaccttaagaacaagatattaaataatataaatattataaacaattgcttccaatttatagcctagatgagaytgaaattcttttggaaatgtgtaaattaataaaagtaactaaagagaaaatagaaaacctcaaargcctatatctaccgagaatattgaatgaataatttaaaaccttcccccaaagaaaactccaggcctagagggcttcaatggtaaattctaatacatatttaaggtataaataataacactcctacatcatttctaaagaacccatataaacaaatagcatctcaaatcctacctcgcaaaacaaacaaaatagattatagacctaaatgtaaatgctgaaattgtaaaatttcttggaaaaaaagaaaacacagaagaaaaatgttcatggcctgatgcaggcaaagatttccctgaaagtgcatcaaaactgcactagccataaaagaaaagtaataaaaagttaaaattctacttttcaaaaggtactgaatttaaaaaggggagtaactatgtcagataatggatgtgttaatttgcttgactatggtagccacgtcactatctctatgtatgtcgaaacatcatgttgtataccttagatatatacagcaaaattcaaaaagataaaaagaaaatttaaaatgtaagccacttaaatattatgtatctatcatcagacagaagacttgtatccaaattatatgaataatttatctcagtaacaaaaagacacaaaaagaaatttaaaaagtaggtaaaagatttgaacagacatgtcaccagaggagatatacgagtgaccaataagcatatataaagggaaatgcacattaaaaccatagtgagggctgggtgcggtggctcatgcctgtaatcccagcactttgggaggctgaggctggtgcatcacaaggtcaggagattgagaccatcctggccaacatagtgaaatctcatctctactaaaagtacaaaaattagcctggcgtggtggcacgtgcttgtagtcccagctattcaggaggtcgaggcaggagaattgcttgaacccaggaggtggaggttgcagtaagccgagatcacgacactgcactccagcctgcgagacagagcaagactccatctcagaaaacaacaacaacaacaacaacaacaaaatcctagtgagaaatcactaaacactaatgggaatcactaaagtaaaacaataaataactaaaggagggaaaagaaggaagaaagaaagaaaagaaacctagaaacatacacttagttcctacagggagcaagtacagctcttatcagtttctggcgggtgtgtgaaatgataccaaaacttcagagaaagtctggccgtttcttataaaactaaccacacacgtactctatgatctagaatttctcctcccaggtatttccctaataaaaagaaacaaaacatatgttcatagaaacayttgtataaaaacacttatagctttatcgaycagaacttgaaatagtcaagatgtccatcaataagaggataaacacattgcagtatattgatataatggaatactattcaacaataaaaagaatgaaatattgataatacaaggacatggtgaagctgaaaggcattatgctaagtaagaggcttacaaaagaacgtacatgtggtgtttccacttatatgaagttctagaacagataaactaatctatggtagaaaaagatcagaagttgctttggcagtggggggaagggtgtttcttgggaaaaggcatgggggaattctagagtgatgtaacactgtatgtttcgataggggttttggtaacatgggtatgtgtatttgtcaaaactcaaaaaaaaatatgttaaacatttttgtgttttattgtatgttaattttaccttaaaagaaaatacataacaaatattgcattagtaaattaattaaaattgaaagtgagttagtaaaacatcctgacgtatttaaaaggaagttgactggtgtctgcaatttactttgaaatgtatcaaaaaataaggtagatgaatagaagatggataaatgcatagaaatataataaagcagggaaggaaaatcttaatgatagagtctaggttaggawtctactgtaaaatttttttaacttttctgtatgtctgaaaaattacataataaaatgttggaaacaattatgctgaccctatgaagctggacacaaaagagaacatactgtataattccatgcatatgaaattctagaagaggcaaaacttgtctgtagtgataggcctcagatcagtgggtatctgggctgggaagcaaggagagttgacagagagggggcaagagagaactttctagggtgacgggaatattctatgccctcactagttatatgggtggatacatataacaaaatgcttcacactgttcacttaaaatagatgcactcatttattgtacctaaattctacctcaataaatttgatttttaaatgctctctcctactgtataaccaagtattctttccaacattcatgtgcaggtgaggatggagctgggcataactaatgcctcttagggtgtcctcaacctacagaggttcagaccttccctatgctcctagtggtaacatccttcagctggctcatccctagtggcaccaaggggtcccatattaaatgagcaagcatctagagtaagtccaggttggtcctttctgttctcttctgccccacagggaagggtgctggcagtgaatagaagccagcctgggtgagctgtgtctgaggagtggagagggtgctggcatgcatcaccttctggtatgcagaagtggaagctgcctgaagactccttgaaggtagggctggggcacagttgctgaagatgggccatctattcaaggtactgccatgagcttggaaaacatgtccctcaatccacctgtgcaatcacacgctaagaaagaatgtgtctttgggctggctccaggtcaggacagcatgttgagtcctactgtggccctagaatgttagttctccttttctcttggtcctcttctcaggctcaggcgggtcttattttaggacctcaaaacacaaagggtcagacacccttctgaggacagctcccacagactctttgtcccggacaagagagaccacctgcagtaacctcagaatgccctgatgttccccccggctttgtttgaactctgagtctttactctttaactcatagacctcagcaagtctatgttgtgttccggtaccttctttggtgaaataaggggtacaaatttattctgaataggactctgcttcatttctttaaacatcggtattcccaggagagtggcagctttttgatggtagggatagtttcctgttcatctctcacctgtatattctagcataagctatgcgatgtttactgaatgagcataatgagcatttattttctaagcactgctccatatattaactatcattagggaacacaataaagagaagacatgtcgttttatccttgaggagcatgttcttctgtcatgatgataagacatttccacagaaaacaattagggaaaaacacaagtgactacagacttggctcctgactttcttacagtcaatttcccattcatgctctgggaaggcagaaagtggaaatgatctttgcaggctgcagatattaggagtgttgccatggaggaagtgtggtttgacccagtgcttggtggattggtgtattttaggtagatatgaaggaaaaggggagcaattctgggcaggagacggggcataagtgaggcttagagatgtgcatgatcacagcctgtaagcaaataccactgcccattattttctcatttgcagctgcaatgctggactcttgctatttctaatttttatcatgcaggaagttttaaagaggaagtaatttgttttgtagatcattctttctttaagaataacttatgggatagtttatagaccaaggagcactttctgctgcaaagagatgatcaggacttttgatcctgggtaacaagtcctaggttgagagcctagaaacaaagactcgaatcccaaccctgccagtgacttgctgtgttcctaccagcaggtcctctctaaatgtatcaggcttctgccccttcctctttggatgtcttctatatgtacacagttggagcacttacttattttgtttaggaaatcaatgcgattccctaaacaatctgagcaattgtttatccaaatgagactctgtcatcgccaatagaattcacatctcaaatgcattccagattccctattactcagcaatctgagtcccctttctctctacattagaagataacaaaatgttctttgaaatggcaaacgtgaagagctgggtctgaatgtcgtctctatgagaaccgtgacatcagactcttccatctcagttctgccacctataaacccagaggggaggacccagtgatccaccactctcacacccctgatatgcttctgtaacttgcatcatgctcaattttaattttcccctgtttttacctataccctgcacccttaggagccaagactcctctctgttagatgttttgcttttccacttctggaattattcttaaaaatactgttttgactgttccctttatacatgtttttccctctgtgtgaaatgccctttcctctcctctctttctctgcctgcaccaaccttggttactacacttattacagtgtcctgtaattatgtctttaggtccttataaaagtatccaaatgtttgaatgagaaaattgaacctttcaccttcttcaaacatagcccctagtattttttctaccactgcactacactgcatacctcttgggcaactctgccttatctcattcttctgcattacaagtgcacacagcaataccagacagcacatagaagacacttaaaaaatgttggttggaagaatgactactagcattctattgtttgtcacagaattcaatgtaattattttaattcaagatgaagcaaagcacaattaagagagtcaagttgctttgctgccaaaaatatattaaaatcccaaaccataaaataattatcttcttggcttcgatgctgctgctgtctatgatgaaagcatgcgatgacaagcacagtagctcggcaacagtggagctctgtagggaaggaagggtgtgggtattgaaaccaacagtgaggtgcaaattctagctctttcactcacttgaggactgattttggacatgtctttgttatccataaaatggagatgatacttgtgcctgcctcatccaattttgtgaagaacaaatgactgaatctatgtaaagtgtttagaaaaatgcctggtaccacgtgcacgygcctatttattgcggcactattcacaatagcaaagatttggaaccaacccaaaggcccatcagtgatagactggataaagaaaatgtgtcacatatataccatggaatactatgcagccattaaaaaggatgagttcatgtcctttgcagggacatggatgaagctggaaaccatcattctcagcaaactaacacaagaacagaaaaccaaacactgcatgttctcactcataaatgagagttgaacaatgagaatacacatggagacagggagaggaacatcacacaccggggcctgttggggggctgggggagagatagcgttaggagaaatacctaatgtaaatgacgagttgatgggtgcagcaaaccaacatggcacatgtatacctatgtaacaaaactgcacattgtgcacatgtaccctagaacttaaagtataataataaaaaaaagatgtctggtaaaggcagtacttacagttaaatgtcagctttattcctgagccctctgttcccggagagtccatgggacagaagaaagaaaaaggtggcagagttctggggtgcccatggctctgagagagcaagaaaccagatatatgagcagtactaggacagaagggagccaggaggcgatctccagtctgagtgtgcagaatgggttatccccagcttaggttcagccacatgcccaattccgcacagaagaactcatgtgccagtgtgtgcaattgccatgtcctaaggctacagtgacgaacaggctcatatctggggataatgtgcatttgtactatcaatggtaggctatggctactgaccagattctcacaaggctggtctcatctccaagtgccccactcatccatgaatccttcctggtattcatactattcatactttacatataaataaactcaatgatagcaaaaataatgatgatagccaacatttactgagtgtttatgattttctagatgcagaatgtcttctatgaaccatcttatttaatccttaaaagaagcccatgggctgggcgtggtggctcacgcctgtaatcccaacactttgggaggctgaggcaggcagatcacgaggtcgagagatcaagaccatcctggccaacagggtgaaaccccgttctactaaaaatacaaaaattagctgggcatgggcatggtggtgcatgcctgtagtcccagctacttgggaggctgaggcaggagaatcgcttgaacccaggaggcggaggttgcagtgagccgagatcgcgccactgcactccagcctggtgacagagcgagattctatctccaaaaaaaaagggaaacctatggagctatttataaataaatataattctttttataaatgagacattgagacacagaatctatgctgtcctggtgatggctcacactgagttgcaagagccaaagcaagctgacggagttttagaaattttrtgggttggttgttaagtgcagctcttgttacaaattaagttatataaactttcaattaaatgaattatatttaaaacggaaccaagtattcaaaactcataactttctagttattttactacatttcactattacgtatgcttttgaggatatttatgttaaytgtgtctgtgtggtaaaaatactagaaaatggtatgctactgcacatcacttctcactgataccatgttggtattttaaagtaggccatagtgaaagtatttacatcatggaaaatagaagatgctactaggcagagctagcttggtttccctccatccctccctccctccctttgtccctccctccctccctccctccctcccttccttgcttccttgcttccttccttcttccccatctccttttctccctctttttggaaaactggttttaaacatttactagcacactactgagcagagaaattaagtaacttgtccatggccttccctctgagtgttaagacaaagactcaaactcagccattaactccagcgacgattctattaaccacattccgagaagactgatactgcttataaacaacccagtatgtgtttcatgaacccacttaattgttacctgtcctacaccccatacccttctctgatttctcacctagttcttctcaactcacagaaatgtcatcttttcctggtattctctgatctacctcgggtccttagtaaactctaaactctgccagagtagggcctgtggctctgtctgatttatcactgtaatccacctttctaggataatgcttggcactatattcaatttttttttgcacagggaataaaaacaattaattatgtgcatgcattatttctccttctggagtgtatgctccttaacaattagttctatgattcatttctaataccagcagcccaacaccaggcacagagccacatatagattaaatactcagtagctatttgttttagtaaaagttaccagaattcagggatcagcttttttttcttatagcaaagcctcctgagagcaggttttgatgaaattggaagaagactatgaaaactcaggaccccaagttttgaagtataggatgaccttagtcatggtgtaggggcgatagcctgcggcatggagaatggacaatatgtataagggtataagggagatttaggggagtaaagcacactggaagggttggctgtgatagccaccttgcctatcttctgcttcgctgaggctcagtacttcagatggctaagagcaatcatgtctgtgtatgtgtttcacattaaaacaaaaaagtaatttgtcatggtgaaaataaccctagccagggcccaagggagacctgcatttgaatcctggatgtgttagattgccttaatgatcccaattttcttcccttccatgtattcacacctttgtccttaaacttgacagcatgttcctgttctgatcctgggctcatctgtttgacctacgttagccaataaaatgaggcaaaagtaaccacgttccagttaaaagatttgctttgtccaatagaatgagacagaagtaaacacatgccagctccaagaccatgtgcatgttttcattgttcccttaactgtgctatcaccatgagaaggactttccctgatgatcccagcaaaaggatgagagacacataaagtaaactaaccacagtggaaaccagcctagatcagccaacccctgacaaacatgcagtctttctttctttctttctctctctctctctctccccctccctccctccctcccccccctcccctcccctcccccttccttccttcctttgatggagtttcactcttgttgcccaggctggggcgcagtggtgtgatctcggctcactgcaacttctgcctcccaggttcaagcgattctcctgcctcagcctcccgagtagctgggactacaggcatgcaccaccatgcccggctaatttttgtatttttagtagagacgtggtttcccatgttggtcaggctggtctcgaactcctgacctcaggtgacccacctgcctcagcctcccaaagtgctgggattacaggagtgagccaccaaatcctgcagatttgttatgaatcataaatgattcatgtctaagtggttgagttgtggagtggtttgttatatagcaatagctaactgatacagtggcccttcagtcttagtcagctctgactgccatatcatatgccaggtggcttaaacagaaatgtagtttctcagagttgcagaggctgggaagtccagatcaaggtgccagccaattcagttcttggtgagagctgtttttgtggctgggggatggctggcttcttgctccatgctcatatggcctttcctcagtgcacacattcagagaaagagcaaagaagcaagatttctggtgtgtctacttggaaatgggatgctaatccaaacggatcagggccccatcattatgacctcatttaaccttaattactttcttagaagacctatcttcaaatataaccccaccaggggttagggcttagacactgaaattttgggaggacacaaacatttaggccatactacctcccttaggattcttttattcatctgaaagataaagataagggtgtatggttataatacacacccaataaatatctattgaattaggamtattggactatatatttctaagaaacatttcaggatggttttttcttttcttgttgccataaaggtatctagaattgatatgagagggaaaaatgccctcctctattcaaattaaactgtctgcacgtaaggaaggtcatagagatgcctaatattcaaatacatgcaagtacatttaagattattgagcagggaactcaactattccattcaattgttccttcaggtcctaggtcagctcttggcataaagtaggtaattcaatatagatatcgaattaaaagaatgattgaggtaatgagtccaatcagggcttgtacctgcctatagctgtcctcaaaaagttcagggagatgaggcgggatacagtctgaatcatgggaaggaacggtcctctgcctgactracaggaagtacaaagatgaaaacagaggaggtgttgagctgtcctgatggctcaagggttgccttggggcagtccaactgacacctccttccttttcctccttcgtgattactgtgacatcccacagcatgttaactgcaactgattccaaaccacactgatgttccccctttgttctccaaacctaattgtgcttgtcctcagtatctgcctgattgttcaaatgagagatgagtcatctcttgcttctttacatcccactcaatggagcccacagctccatttccccactgaaatgacaaaatccaatttgacattaattatagccactgagctgtcatttgctggggagtgaccatgggcctggcagtgctctagatgagtagtctaaaagatctcatctaatcctcatcataatcttatgatgtgagtatactctttctatcatattgattaaatagggactcagaaaggttaagtgattttcccagggacacagagttggataaagggatttgcagttaatctgatggactttaaaaaccctgccctttccacgttgtcagattatctccagtccagatgctttcttctcttctttctccattgtctctgttctgtggaatcggacattcacctctacccccatggtacctgcacatgtctctgctatagctcttatcatatgagatgataattattcacctgcttgactatcactctgctagcaatgtcttattctcccctctgttctgtattctcagctcactgtcagatatatagtacctgttccataaatacttttagaaattaattaaattccttcatctctaattaccaaacctgttatctttcagagagtatagggttacatctgacataaattgtgaagaagaagagaatctcccctatcagcccattattttctgtaagaacaagcctagttaamcccccctccccaaaaggrccagggttctcttcaggtactcctgctgtgagacaagaatggcagaatgactcccatgccctgacagttggamgagatcaagctcccaaggcgccgtctgctttcatgggtttggcctgccagggaagagctcagcaaatccagctgaaagaggtgatgaagtcagagtgagtgctggctgagtgcctgattccagagatttaccctcttccagatgctggaagcatcttcaccccattttcttactgcattttccagaccttgtagatacaatatattctcttttaaaacaaacacagacgtgacccgtctttgtcaatgtgacccgatctttgcacaaaatggtgccctacagcctactggttacttggctgcagaaagctctgggtgtgcggcagtaccatgtggcatcagtcctgtgccaacgggccaaggtggcgatgagaccctttgagcctaagtacatccactatgacctgctagagaagaacattaacattgtttgcaaatgattgaaccggcctctgaccctctcagagaagatcgtgtacagacacccggatgaccccaccagccaggaaattgagcggggcgggacgtacctgcagcagtggcyrgacagcgtgaccatgcaggatggacggcccagatggccatgctgcagttcatcagcagcaggctcccaaggtgaccatgccatccaccatccactgtgaccatctgattgaggcccagctcgggagtgagaaagacctgcaccaggccaaggacatcaaccacgaagtttataatttcctggcaactggaagtgtcaaatatggcttgagcttctggaagcctggatctggaatcattcaccagattattctggaaaactatgaatatcctggggttcttctgattggcactgactcccacacccccaatggtggcagcctggggggcatctgcattggagttgggggtgccgagctgtggatgtcatgactgggatcccctgggagytgaagtgccccaaggtgattggcgtgaagctgatgggctccctctctggttggacctcacccaaagatgtgatcctgaaggtggcaggcatcctcaccatgaaaggtggcacaggtgcaatcgtggaataccacgggcytgttgtagactccatctcctgcactggcatggtgacagtctgcaacatgggcttagaaattgggacmaccacttccgtgttccattacaacctcaggatgaagaagtacatgagcaagacctgccaggcagacattgccaatctagctgatgaattcaaagatcacttggtgcctgaccctgggtgccattatgaccaactaattgaagttaaccccagtgaactgaagctgcacatcaatgggcccttcacccctgacctggctcaccctgtggcagaagtgggcaaggtggcagagaaggaagaatggcctctggacatctgagtgggtctgtggggcagctgcaccaattcaagctatgaagatatggggtgctcagcaggtgtggccaagcaggcactggcccatggcctcaagtgcaagtcccagttcactattactccatgctccgagcagatccgtgcctccattgagcaggatggctatgcacagaccttgagggatgtgggtggcatcgtcctggccaatgcttgtggcccctgcattggtcagttgcacagaaaggacatcaacaagcaggagaagaacataattgtcacctcctacaacaggaacttcatgggccacaatgacacgaaccccgagacccatgccttcatcacatccccagagactgtcacagccctggccattgtgggaaccctcaagttcaacccagagaccaactacctgacaggcaaggatggcaagaagttcaagctggaggctscggatgcagatgagcttccccaagcagagtttggcccagggcaggacacctaccagcacccccgcatggggtaccactgaccacatctcagctgccggcccctgactcaagttccgtgggcacttggacaccatctccaacaacttgctcagtggtgccatcaacattgaaaatggcaaggccaactctgtgcacgatgctgtcacccacgagtttggccccttccctgacactgcccgctacaagaaatatggcatcagttgggtggtgattggggactagaactatggcaagggctcaagctgggagcacgccgcgctggagcctcgccacctcagggggccgggccatcatcaccaagagctttgccaggattcacgagaccaacctgaggaggcagggcctgctgcccctgaccttcgctgacccagctgacaacaagattcaccttgtggacaagctgaccattcagagcctgaaggacttgacgctggcaagcccctgaagtacatcgtcaagcaccccaggaaatcaacctcctgaaccacaccttcaacgagacggagatcgagtggttcagggccggcagtgccctctacagaacgaaggagcagcagcaatgagtgcggcgcctccccagcaaccccccctccccctcttcccscctcccccagctggtgtcatgttcaagttcggctctacatgcatcataagcggatccgatccatccagccatggcttcttattccaagatggcataaccaaacgtgcttcctgctccccgctgagccccaggagtgactgtgattgggaggcggcagggaggcggagggggtgggggggttcttaaaataactttttagcccctgccttcctatttttggttttcagattttaagcagctccacgcaattgtatttatttttgatgacaagactcccatctaaagttagaaaaaaaaaaacaaaaaaaaaccacagtggctcacgcctataatcccagcactttggcaggcgggtggatcacctcaggtccggagttccaaaccagcctggccaacatggtaaaaccccgtctctactagcaatacaaaaattagctgggtgtgtggcgcgtgcttgtaatcccagatactcaggaggctgaggcacaagaattgcttgaacccaggaggcggaggttgcagtgagccgagagtatgccacttcactccagcctgggcaacaagagtgagactctgtctcaaaaaaaaaaaaaaaaatccaacacaataaacaaaacaaagtaaaacaaaactaataacagtgacaataatattaacctttagtttcctgtaaaacttggttcttgctacacgcctgcactttcctgccttcaacatcctagttcggcttatcttgagtgattccattctctctgtcttccagaattcatgcctgggcacaaaaattgcctgttccaaagaggtaattaaagcaggacgagactgatttcctgaagaggggagtgccagacaacctggctgtgaactcaacccagcgttcaagtaatccctgaatttgtctggcaaaaagcaaaccagcagttacccaagataagaaattaggtgatttttttttttcttgcttgcttgcttgctggctggcttgcttttttgcctacgtgagagaagttactaaaagatttttatcttgctttctaaataatcaatcttgcccaatttctgccccagcagaaaacaaaacaaaacaagtctgtgttatgttctgcactgggatgtttcaaagaacaggtcatggctgggagccttgggaaactgttgtgagtgcagctggcgtgaggcggtaaaggctggagtttagagaaaatgagtttctgtggagaaagtaaagcaaaatatctcacggttttaacctttgtattttcaaactcatttctgtccttactccccaaagttttagaatcttaggaacacgagtccaatgacttctaaagtcaaatatgcaaggttaagcaaactttgcaggttacctgcactgccctccacaaaactgtcctcactttggacagcagccacaggtcccagagctcccaagtcacactcccttctcaccagctggctgcaaactcagaggctcccactacctcttcagatgtaatgtcagtagaatgactcatagaactcaggaaagtactgtacttattattacaatgttactttagccaaaagataaaaatcaaaaccagccaaagggagaagcatagggtgaggtctgggaaagttccccacctgaagcttctgtcatccccaaagatgtaaccttctcactatagtgtggaaaactgccaaacagggcagctcactggaactgaaaaaaaaatttttttaatggacatgtaataattgtacatatttatggggtgcatagtgatgttgtcatacaaaaaattcacagcgatcagatcaagattggcatatccatcatctcaaacatttatctatggggaataccatggaggttccacaaaaaactacaaatagaactaccatatgacccagcaatcccactactgggtatttattcaaaggacaggaaataagtatatcaaagagacatctgttcccccatgtttattgcagctttattcacaataaccaaagtgtccaacctcagtgtccaacaatggaggaatggataaagacaatggataaagacaatagaatactatcagccatagcaggcgcagaggctcacgcctgtaatcccagcactttgggaggctgagacgggcggatcacgaggtcaggagttccagaccagcctggccaacatggtgaaaccctgtctctactaagaatacaaaaattagccgggcgtggtggtgggcgcctggagtcccagttcctcaggaggctgaggcaggagaatcacttgaacccgggaggcagaggttgcagtgagctaagatcgcaccactgtactccagcctgggcaacagagcaacactccaactgggaaaaaaaaaaaaaaagaatactctcagccataaaaaagactgaaatcctgtcactcactgcaacatggatagaactgaaggacattatgttaagagacataagacaggaacaggacctcttagcaaaaagtatcagatgtagtctgaagggcccaccatgagtaacggacactgctatcactggggaaatttcaagggcctagaggttacctcccaggtacggtgagataaaggccagccaaattctttttcatacaatgaggaaatgcgaactgagacttcatgacctgatggatctcaccattctacttcttctcagccctcatttcttttgacagaactatcttacctcattaaggggctgtcagtccagcacagggttctgagtgtccaaacaccggggtctcctcttaaaccccccatctggctgtgtaatcttagaaaagtcccttaatttgttgagcttgagtgtccccagttgtaagtgaaagtgttagactataatccatgagctacatcaaactgatggttctatggctaagccactaaaactctctgagactaaatttcctcatctttaaaataaggagactagattagatgatttctccctgggctaaaaatccacgattttagtaccttacaacctttgcaaaatgtaaggaaaagatgcatcagcactattccacatggcaattctattttctagtttattgtcctctcctctccctaagagagtgactgcctaatgtgttatcaggggccccttatacagatggatggcaaagattttccttttgtttctgggggaaataaacagaaagtgggagacaggaataaattttaaaggctgggtaagggaccagccaagaaggcatagctgaaagaatttttgtcccttaggtaaatattatttttgcattaaccacatgttgcaaaaagtaaagaacattatatacaggaaaaagacctcaattccaaaatgtgggcattttcaaattgttaggcaaacgtgctttcctgatggcccatgaacgttttgtatttaaaataaaagtaaataaaagctctatgttaatgctgctgatgtctcccagagcaaaaacaagaaatgaccctttgctgggctccaaatgccccttagttcatgtctttgtcattgatctcgacaataagactatttagttactagtgcgtctggccctctgaatcaatagctcacaaattttttgatcacacactcccaaaaagggttaaaaatgcatgccccaaatacccccaaaatgtatgtcattcatttttaaattaagcgtgcatcttattttatttaaatgtgcctattcaaataggctttattccttttggaaatcatggtttatgaaaatgtaacaatttgaagatctggctcaaaattcagtttattttgatatttggttttaatggccattgtatgacctgcatatcctgcattaataaccaccattaatggtcaccaaaattataagattaaataatacaggggtccaaatagaagaatcatgtcattggccaagcttactgaatcttgataatcatttttcagttatgcaaaagttttagttcaaatcttgttagtatatttttatattccccaaggcctattactttttcttgcaaataaaataagaggtgcagcattgttaaatatatatatttatttttaataggctttatttagactttaattttaatagacttttaatttttagagcagttttaggttcacagcgaaattgagcagaaagtaaagggagttcccatgtacccccttctcccacaccacctcccccacttatcagcatagtgtagcacagtggtagatttattacatcactgaacctacactgacacatcatcacccaaagtccacagtttacatgaggtctactcttggtgtcatacattctgtaggttttgccaagcatataatgacatacatccaccattattgtatcatacagaatagttccactactctaaaattcctttaggctcagcttattcacctacccctccccagaactcctggtaaccactaatctttttactgactccattgttttgcctttcccagaatgtcatattgttgtgaggtaggaaggggaactcaactctggaggtgggcttagacattggaccaaattaaggactagctaaaacaggtctgggcagaagcacctccccataacacatgctcaccagtgtgccatgtcagtttaccactgccatgacaacacccagaagttactgccccctttccattgcaacaacccatcaacccagaagttaccaccctcattttatagatttctgcataatctaccattaatttgcatataattaaaagtggggttgaatatgagtgcaaacctgcctctgagctgctaccctgcacaccactgcctatggggtaaccctgctccacaaggaacagtacttctgccatgtcaataaaagttgttatttaataccacccagcccacccttgaattcttttctgggtgaagccaaaaaccttccctggctaagacttaatactggggcttgcttgtcctgcatcagttggactcatgcagtatgtaaccttttctgattgatttcttctactcacatgcatttgagtttcctccatgtcttttcatatagtgttgaataaccatagttattcattgtatgggtataccacagtttatttatccattcacctactgatggacatattggtttattctaagtcttggcaattatgcataaagaaggtagaaacatccacgtgaaggatttgtgtgaactaagtattcaattcatttgcataggtatcaaggaagtatacttgctggatcatatataaaatttttgtaagaaactgccaaactgtcttccaaagtagctgtaccactttcattcctactagcagtgaataagagttcctgctgctatcacttcttggccttttggctaagatgaagtgtggagaattcctgttgctccacatcctcaccagcatttggtgatctcagtttctggatttttgcccttctaataggtatgtagtgatatctcatttttcttttaatttgcaagttcctaatgacacatgatgttgagcagcttttcacatgcttatttgccacctgtgtatgttgtttggtgagatccattcatatcttctatttttaaatattgttgttggttttcttattgttaaattttaagatttttttgtgtattttgggttatagtcctttatgagatatgtcttttgcaaacattttctcccaatttgctgcccatcttctaattctttgtacagtgtctttcatagagcataagcttttaattttaatgaagtttcatttatcagtaatttctttggtattttatctaagaagtcattgtcaaatccaaggtcatttgcatttcttctgtatcatctaagagttttacagttttgcattttatgtctaggtccattaggtccaaaatataatctattttgagttaatttttgtgtatagtgtaaggtctgtgtctatatttatttttttacatgtaatatcca

SEQ ID NO: 95926 - DNA, 25848 bp, Homo sapiens
aaggactgcccctgacgtcaggagttggagtccagcctgggcaaaatagcaagaccccatctctactaaaaatgaaaaaaattatccaggtgtggcggcatgagcctatagtcctagatactcaggagatggaggcaggaggagatatatatatctgtatatattcaaaaatatatatgcatagtatatcaagagagaatacgataaagcaaatgtgacaaaatgctaacaactggtgaatctggatgaaggtgtatagaaattctctgtactatgcttgcgacttttctggacatttgaaattatttcggagaagtttactttttgaggaaaaggtaaatacaggccgagcgcagtggctcacgcctgtaatctcagcactttgggaggccaaggcaggtggatcacctaaggtcaggagttcgagaccagcctggccaacatggtgaaaccctatctctactaaaaatgtacaaattagctgggcatggtggtgcatgcctgtaatcccaactactcagaggctgagggaggagaatcgcttgaacccaggaggcagaggttgcaatgagccgagatagtgccattgcactccagcctgggcaacaagagcgaaattccatctaaaaaaaaaaaaggtaaatatgaagaacctgagattcaaaactcctgactgaaatcaaggtttgttggatgttagtgacccccgccctactgcagaatcatccagaaatttctagataggaaaaaggctctggctgaatcatgaaaggggagctggatgcctctctgaccaacataacggttaacatttaccgtgtgcctcctctgccaagcctcactgtaagcttcttacatgcatcaaactgatttcatgctcaccacatccccttgagtcaatgctgttattattcctcattttgtcagatgaggaaataaaagcttagggtgttccagtgtacacagatgggaagtcatggatcctggatttgactgcagtccttttgcctagagtttattgctttagctagtctatactatcctaatggtaccttgatcaggttgaaccagggcataccagatctgggaggtatagtcaggctccattttggcaagactggcctggtagtctgcatccttcaaaggctagaatgccttcttgtctggctgtgggtcttcggtcactgggtacgtgctaatagaggctgcacgatgtttggaaaagatgttgccattctatgccctttgctgcctcgggcccaggggctcctagggcagcgatgctgtggaatctgagtgagccagacacacttggcctcaaatcccgggtgagctgtgtgatattaggcagggaatttcaccctgcttgctaagcctcgttgattaaatatgtagtgaaagcctggcttgtgctaagggcataagaaggtgaatctgacatggcccttgctgacttcaaggagctcacagtcaggacggaggtgggggcaactggggcccctggaggggtccataatgtgaggagaagagcttcaggaaagcctgtgtagaatctgttttacagcttcatgaagatataattggcatacaataaactgcacatatttaaagtatacaatttgatgaattttgacacaacttataacctgtgaaagcatctccacaatcaagataaagggtgtattcatcactctcaagtttcctagtactccttggtaatcccctcacttcaactaggtaaccagtgatccaattagactagcttgcataattttctagaattttatataattctatatacattatgcgtatgtgtgtgtgtattgctttggcgagctcttttattaggaatgttcatcttttgtctgttatatgtgtggcaaacacttccttccagtctgttggtagggtttcaaccttatttatggggtgttttggcatcagaagggttcggtgttttgcacttcagcctatggatttttttctttttcttttttttttttttgagatggagtcttgctctttcacccaggctggaatgcagtggtgcaatctcagctcactgcaacctccacctcccgggttcaagcgattctcctgcctcagctcccccgagtagctgggattacgggcacctgccactacgcccggctaatttttgtatttttagtagagatggggtttcaccatgttggccaggctggtcttgaactcctgacctcaggtgatccacccacctcagctcccagagtgctaggattacaggcgtgagccaccacaattggcccagtctatggatttttaaaaaataacttgggcttgtcttccttgctgaagaaggctgttttccagcctgtcacacagcagttaggctgtagaccctcactggagcccctgccctgcagaatcgagcacatgttctttctgggtctgtgtggggtgtgggtgtggtcaggacaccgtctgtgaccttatttactggggacgtcccctgcttgaggagaatatccaggcaaggtctcctcactctccttagccaccatccagcttggccaagaggcctccccatgattcctcccacgccagggcctcgcctttgtttttcactgttaggggctggcgagtcactgacccgcccccctccctgctgcccaaaccacttctgtttcctgaaggcgccttgggaatgctgagtcgcgatttcctcatcccctcgtgcagctgcatttctgctgcgtcatgtttgggaggggggactcgcggaaacaaagggaaggcggattttgctagattttgctgagtcaccagtgcctcctcagcttctctttaggtgggaggtgaaagggcagctttaatggtaggcaggaggaagtgaaacttctagaaaacggcagaagcctcttgtttgtcttttctaagtctgtgcctttcccctgctgggtcccccagctcccaccctgtgaagtccacctcaatctgcccctgatttaatgttgcaatccaccgaggccttcttatgcttcacatctctctgacttctgcatctgcctcatctcttctgcctccagcaggagaaagttctctactttttttgcctggataattattgtatttttagtagagatgggggtttcaccatgttggtcaggctggtcttgaactcctgacctcaggtgatcagcccacctcagcctcccaaagtgctgggattataggtatgagccaccgtgcccagcctcatcctccatcttcaaagctagcagcatggcatctcccagtctctctctctgtcctctgctttctttgtcaccttctgtatgtgcaaccatccagcctccctcttataaggcccaagaggataatccaagataattccccatctcaacatccttgacttaatcacttctgcaagatccttttgctatgtaaggtagcaaaaaggtaacctattcacaggttctggtgattagaatgtggacacctttaaggggcttttatttggcccagcaggaggagagagaatagcatttggatcatcctgttgcttgactaaaaagaaggggaagtcaggaggctgaatcagcatgcgaaagggccacaaattcagccctgggacagcctagaggaccagaacaactctggcctggcctcttgcaccccagcaacccactgtgtggggggctgttctaacgaagtctggggctcccagagaacagttagaaaagaaagcaagcccagaccggcagccaggaaccctgggtcactggaggttctctttccaatggggggcatagcctggccaagtccctcctgctcttggggtccctgcttccctgtgttaaataaaaagggttcagatctcatgagttttaccctctagggtcgctgaatggacagactctggatctatacacgcaaactcatctcccctaaactcctggaccctctgtgagaagggttggagtgtggtggtcaggactgtggggactggcttcaaagtgctgtagtttgaatcctggctcttccatcattaactgtatgacttgggaaaatgacttatcctctttgtccctcagtgctcatgtgggcaaaatagagatgaaaatagcttgcaaggctgttgtcaggatgggctgcaatcacgcgcgtgaagtctctgcacatagtaaattctcaataaaggctggttagaatgacagtttggaattgtggcttggttccagcccattctatcagcccagcaatattacagcctaacaatattattattttttcccagaaagagaccttgaagcatctattcattcaggcatgcattcagtattaactgtgacctaccaggcactattccaggaactgggaatttacaaagcaaagtagtaggcaaggtctccacctttgtgctttacatgccactgttggggctcagaaagtgataccaggacaactggtgctttgacatgatgagaggccttaggagctgcctcagagtcaaggtccctgtaagcttgtcttgttcccccgacaagcacagggagagacgctctctggaatttccttatctgaccaagaacacttctttacaaaagaaatgcaattgtgttaagtctttttttcctttgagacagagtctcgctcttgtcacccaggctggagtgcagtggcactatcttggctcactgcaacctcctcctcctcccgggttcaagcgattctcctgcctcagcctcccaaagtgctgggattacaggtgtgagccaccgcgcccggccagtgttaagccctttttctagtaatctcatcaaatatccaggaaagatcaaccactggagagagaaagagactgggagtcatcaccagacccagacagatttacctgttcttctgaggacagtgccaagagattacctgggggactttatctgcctaggacaacctttgtccctgtgcggctccacctccaccttcccttaaagtcggcctttcacctccagggccattccttcttgctaatgatttactgtctttcaaaagaattgtctgcattccctatctcccttctcccctataaaaaaggctgggtagcctctgtactccactgggttacagggtcaccattcttccgtgattaccccattacaatacatttttgtatgtcttttctcctcttaacctgacttttgtcggttggttttcggggaaccttcagaggaagaaggggaatttttttcaaggccccttagctcacccttgggaggatgatcctttccaatacaatctcagaagtgcctctgggctgtagtggccctaggctgaattccaggaagttttttttttttttttttgttttttttttttttgagggacagcgtcttgttctgttgcccaggttagaatacagtagcgtggtcacagctcactccagcctctacatcccaggctcaagtgaacctccagcctcagcctcccaagtagctgggaccacaggcatgtgccaccatgcccagctaatttattttatattttgtagagacagggtctccctatgttgcccaggccagtctcgaactcaaagcaatcttcccacctcgactgggctcaaagcgctcttcccacctcaacctcccaaagtactgggactacaggtgtgagctaccatgccaggcctgaaagccatcttaaaaaaaaaatcttagaatgagaatcacagtattgggaaaggactgtatgaatcatctggtccattcgttttgtcctctgggttcacccagtgaccctatttcccccgagttctaaggagtccacctcatgcagaattgattcaataggcgatcagcaagggccagctctgctctgggccctgagcaggcactgagtataagtcagacctgaatgtgcctggaagagtgtcccacgcattccagcagggaagcagtttgtatgacaggtgtcccagtccaggcggataccaggtgctgccagagtgtggaggaggcaggcggggacttagtctcctccctgggtttggacactggcatcctgctttatgtgtgacaccactgcacccctctgagcctcggtttccccatctgtaaaatagaagcgatctaccctcacaggtcagttgtagggatgaaccatgaaaatactagagtctctgttttttgacaggaactcaaaaaacagatcctaaatgtacatttaaagagggtgtgaggaggcaagcagtcagcagaggattccagcaggtgacattttagggagctggagacagcagagcctggggttgctaagttcctgatgttgcccaccaggctwttgctctgagcagcgctgcctcccagctttctggaaccttctgggacgcctggggtgcatcaagtcccaaggggacagggagcagaagggggggctctggaaggagcaaaatcacacccagagcctgcagcttctcagatttccttaaaggttttgtgtgtgtgtgtgtgtgtgtgtgtgtgtgtatgtgtgtgtgtgtgtgtgtgtgtgtgtgttttctctaaaagtcctatggccagactttgtttcccaagggtcatatgactgctcctctccaccccacactggcccggggcgggctgggcgcgggcccctgcgggtgttgcaacgcccggccagaaagtgggcatcagctgttccgcctggcccacgtgacccgccgagcataaatgtgaccggccgcggctccggcagtcaacgcctgcctcctctcgagcgtcctcagcgcagccgccgcccgcggagccagcacgaacgagcccagcaccggccggatggagcgtccgcaacccsacaggcaagcgcggggcgcgggacgcgggacgggcgcctttctctcccaaccctgcttgcgtcctagccccaccccgggacactgccacacagcracagagcccaggagccagaaacttgggctctggagtcaggaggtgcggggttctgatcctgcctgtgcccgtagggtagttggagggaggaacggtaatttacatgcctggcaccctggtatgcggttggtgaccaagatgggagtgtccctagagtatccagtctttgaggtagccaattttttttttaatcctactttcgaggtgtgtttggagttgctctctgctgaatctagatctctggggctctgccagcctgggggagcatgcttggttctcttggtggcatctgtccctcactagctacggaggacctgagccagacatcaccctggctrcggtgttccatgtctcacagatagcccagttcagggaggcgacatgcccaagagtgctcagttagctggtgtcagaactgggccttgaaccttggtctgcccacctccaggtctcactcattcccttctttcaataatttgttagtatttttttttttaactcctgggcttaagcatcctcccacctcagcctccagagtagctgggacttacagacatgtgccatttctcctgagactttgaccagytgtgttgtagaacagggaagcagggcaggagaaaagggaaaaatgacaattctgtggggaggcagggatacggacccatgacagaaatactcccagaaagactttttctttgactaamgcagactttctcaggctttttaaccctgacgccttcatgatgagcataacatgatagggggtcatgagatttgcatctggaactttaacaaaataactgaattaaatattgggtctaaaagccaatcaaagcaattacaaacttggagatgccggttcatggggctgctgcttcttcctgggttatgctgtacctcctcctcctctccactgcgaactacctgtaccaggatttcccccttggtttgggggactgtattatttagtgttttaatgactgaagagtgtttacaargctgcgagagccaccatgcccagcctgaatttgttttttgttttttgtttttttgtttttttgcttttttgcttttctttttttgagatggagtgttgctctgttgcccaggctggagtgcagtggcgcgatctcggctcactgcaacctctgcctcctgggttcaagcgattctcctgcctcagcctcccaagtagttgggattacaggcgcccactaccatgccyggctatttttttttttttttttgtatttttagtagagatagggtttcaccatgttggccaggctgggctcaaactcctggcctcaggtgatctgcccgcctcagcctcccaaagtgctaggattacaggcgtgagccaccatgcctggccctttttttctttttttttctttttttgagatggagtctctctgtcaccaagtctggagtgcagtggtgtgawctcagctcactgcaacctctgcctcsgggattcaagcaattacaggcataattgctgggattacaggcacctgccaccatgcccggctaatttttgtatttttagtagagayggggtttcaccatgtttgccaggctggtctcgaactcctgacctcaggtgatccacctgccttggcctcccaaagcgctgggattacaggcgtgagccaccgtgcccagccacaaggctgcatcttaaagcgattgagaacgtggcctgaatgaggatgggagtctcttgaaggcctgcccacaggtgggaggctcagcagttgggaaggaccccacccccagccagctttgtgttcacctttcccatttcctcctcagcatgccccaggatttgtcagaggccctgaaggaggccaccaaggaggtgcacacccaggcagagaatgctgagttcatgaggaactttcagaagggccaggtgacccgagacggcttcaaggtaygtggcttggtgggactagccctggtggagggtgtggcaggtgtgggtggacccaaggctcagaccagtggtttaagtggggatgctgagggaccagatgggcatgtccaatagaatcatcttaaaaatgatgacactgaggctcagagagggaaggtgagttacccaaggtcacacagcaagttcagcctgctctgtaatgttgtggaggggctggggcagcagtgccgttgactgagcaccggttccatgttgggcattttgtacacgtggtttctaatctgtgcttcaaccctgacgagaaagatgaggactggaaggctcagagaggttcagtgactaacaraaggtcacacagccagtaagtggaaaaggctgaaatcaaccaagaccgatttcagccttgtactccktgtatttcagagcttgtactcctgatctaactcgaatttgcctctgaagataaggaataatataggttggagtcttaacagaacccttttctaacagtgagactgagggtgcctcatctaatctccctaagccacgttttccccatctgtaaaagagtatttcaacagcagggttttcttaagcacccactatatgccaggtactgatwttgctgtttcccagcactgttgtgaaattcatgcaaatagaaggaaagcacttgatgaagaaccgggaagatactgggtgttaaaacatcagcgtggggaagagcttgttcaggttgaacagagggtgtgggggtggggagtagggagctatatcccaccaccttcatcccagtcccttttgcaatctgcaccctctgccaccccctacttccaacatgagacatgctttatttattttattttatctgagacagagtctcactctgttgtccgggctggagtgcaatggcaagatctcggtgccctgaaacctccgcatcctaagttcaagcgattctcctgcctcagcctcccaagtagctgggactacaggtgcccaccaccacacctggccaatttttgtatttttttagtagagacagggttttaccatgttggccaggctggtctcgaactcctgacctcagatgatccacccgtcttggtctcccaaagtgctgggattagaggtgtgagccaccacccggccgagacatgctttaatgaggagagatttaatctgtggttccaggctgggtggggtccttgggcctgtaatgggtcttcctcatcctcctcccctctcccttaaaaagatgaggtacacccagttgctgcagtgtgactggagacagtgggtgcagggaggtgaatgctggaatatcccatccccagccagcttagactttggattttgcctctaagtcacagggttctaaggaggcgccaagatccatgagagaatccagtgctcacttacattaagctggtggacgtggcacttatcacagcccttctcatgtgagcgctaagtgccaggctgccctctgtgctggcccagatcctctcacttaatcctcacaccagccccatctagtatgtggcaggtgagggaactgactagcacagttggctagcacagtcacacggacctcagatcatctgctctaggataggataggaagctgggaccagagaaagcaagtggctcacccatggtcacacagttaaggactggcagagttgggtaagaaccaggtccgtcacactcaaaaacccaggctcttttgtaccagactgcctggctttctgtcccctcaaggaatagagctgctttgaatgtttgtggctcagaaataactcagaaactccaacctaaatgtcttaactttgttctccttcaaatttaaacgggcgtattaatgtgtaacgggagttagtgccccaagccaaggtacactcaagacctgttgcctcagcccagcatgcagaggtggtggggttcagaataggcctccaggaaggagaattgtgccctgtagttggttacgcagaggtcaaaagccagaagcacatggccaatctcctttaagcactttcatttcagctgttcccctctcctgagccatggtgggtccctggcaatgcccggtcttcaatctagtttcatttcttactagctgtgcaacctccatgtctcataccctctctgagccttagtttccttttctgtaaaatgggaatagcaattcctttgttggattttttttttttttttttctgagacagggtcttgctcactctgttccccaagctggagtacagtgatatgatcacagctcactgcaaccttgaaatcctgggctcaagtgatacccctgcctccgcctctggagtagctgggactataggcatgcacccccacagccatacctggcttttttttttttttttttttttctgagtcaaagtcttgctctgtcgcccaggctggagcgcaatggcgtgatctcggctcactgcaaccactgcctcctgggttcaagcaattctcctgactcagcctcccgagtagctgggattataggtgcctgccaccatgcctggccaatttttgtgtttttagtagagatagggtttcaccatattgcccaggctggtctcttggccaggctggtctcgaactcctgatctcgtgatccgcctgcctcagcctcccaaagtgctgggattacaggcgtgagccaccgcgtccagctggctagtttatttatttatttatttatttttatttatttttttgagacagaatttcgctgtgttgcccaggctggagtgcagtggcgagatctcagctcactgcaagctccacctcccgggttcacgccattctcctgcctcagcctcctgagtagctggaactacaggcgcccgccaccacgcccggctaatttttttgtatttttaatagagacggggtttcaccttgttagccaggatggtcttgatgtcctgaccttgtgatcctcccgcctcggcctcccaaagtgctgggattacaggcgtgagccaccgcacctggccccagccagctagttttttaaaataattttttgtagaggtgggttttgggctatgttgcccaggctggtctcagactcctggctttaagcaatcctccagccttagcctcccaaagtgcagggattacaggggtttgagccaccacactgggccagtttgttagatctttatataaggattcaattaggctgcttgttttgcccagtggggtaaaaggtttttaggctgagaaagtgcatgatcgtcttttcctcttgtaaaaacccctctggctgctgtgtgaagaggattgtagcgaggggtggcagaaggagtcagagcccagctgcgaagtgaggagggcctttccaaaggcagtagtggacgggacggacagaggtgggggtcttctatgtggctggcggcctgacctgctcactctgctttcagctggtgatggcctccctgtaccacatctatgtggccctggaggaggagattgagcgcaacaaggagagcccagtcttcgcccctgtctacttcccagaagagctgcaccgcaaggctgccctggagcaggacctggccttctggtacgggccccgctggcaggaggtcatcccctacacaccagccatgcagcgctatgtgaagcggctccacgaggtggggcgcacagagcccgagctgctggtggcccacgcctacacccgctacctgggtgacctgtctgggggccaggtgctcaaaaagattgcccagaaagccctggacctgcccagctctggcgagggcctggccttcttcaccttccccaacattgccagtgccaccaagttcaagcagctctaccgctcccgcatgaactccctggagatgactcccgcagtcaggcagagggtgatagargaggccaagactgcgttcctgctcaacatccaggtgagggtcgggcagcctggggcagcctctgcctccccccgttgttcctccaagggacccttctcattgtaggggagggtgctataggtcatggttaacacagggaaccagagttccagcactgccacttactagctgggtgatcttgggcaaatgccttcatctctctgtacctcagtttccctatctgtaaaatagggataataatggtacctatatcttagacttataaggcttgagtgartttacagcagtaaagtccccacagcagtgtctggcacagaggaagccctcaaacattcactactgtcataatgggacatgagaatcagttgtagctctctgtgacaacagtctgtggcaatgtataagttgtgtgtgcactagtgtatagccaggttggcactcccagggttacaggtggcctctgccttccagggactctcaacctagccagagaggtttacctctttctacaagtgtctcaaatccagggggaaggtggggtttgcgcaaagcctggaaggatgaattcttgggcagaggtggaggggtgaggggctccttctaaccagatgtcatagagccttctctctctgccaccccctggaggtgccatggggcctggggctcggggtcatgccctcctggctccctactcccagccgtggattgcagaagattctggtcctggcccctgttacggaacaaggcctttcccttccaccctcccccttcagaaaatccagtccgtcttggaggaagaaaatctgtgtctttcagagaagtgtaggcaaaagaaaagggccaggtgcagtggctcgcgcctgtaatcccagcactttgggaagccgaggtgggcggattgcttgagctcaggagtttcagaccagcctgagcaacatggtgagaccctgtctctatcaaaaataaaaaataaaaaaaaatttaaaggaaaaaaatgtttttaaaagaaaagggatttggaatcagaactggctctcaggctcgtgcctataataccaacactttgggaggccaaagcaggaaaatggcttgagcccaggagtttgagaccagccctggcaacacagtgagaccccatctctacaaaaacatgaaaaaattagccagacatagtagcgtgcacctgtagtcccagctacttgggaggctgaggtgggaggattgcttgagcccaggaggtcaaggctgcagtaagccatgattatgctactgcactccagcctgggcaacggcaacagagcaagactctgtctcaaaaaccaaaaaaacaaaaacaaaaacaaaaaaaaacggctcttggctggccgggcgtggtgggtcacgcctgtaattccagcactttgggaggccgaggcgggtggatcacgaagtcaggagatcgagaccatcctgactaacacggtgaaaccccatctctactaaaaaaaagaaaatacaaaaaaaattagctgggcatggtggtgggcacctgtagtcccagctactcaggaggctgaggcaggagaatggcgtgaacccgggaggcggagcttgcagtgagcagagatcgcgccactgcactccagcctgggagacagagtgagactccgtattaaaaacaaaaaacaaacaaaaaaaaacggctcttagtgcctgacctctggatcagtccttgggcaaagcacttaacctgtaggagctacagtttcctcatctgcaaggctaacaaataccattcagcacacctcaccaaggctgaatttcacaaatctaaactcaagagaagaaagcagcggcagaagagtgcatgtactaggataccacttaatattatttcaaaacaagcaacgcagccttttgcatggagacacaggctaaggacatgggcggccacagtgaactctaaatccaggatcattgttatcggttgggagggcaagagcaggcaggggagccaattgggcttggaacatcttatctcttaaggtggatgaaagggatatgaattttctttctttctttctttctttctctctttctttctttctttctttctttttctttcttttctctctctctctctctctctctcctctctctctctctcttctttcttctttctttctttctttctttcttctttctttctttctttcttctccttccttccttccttccttccttccttccttccttcctttctttctttctttctttctttctttctttctttctttctatctttctttctttctttcttttctttctttcttgcagagtctcgccctgtcacccgggctggagtgcaatggggcgatcttggctcactgcaacctcagcttcccaggttcaagcatttctcctgcctcagcctcccgagtagctgggattacaggcatgcaccaccacgcccggctaattttttgtatctttactagagatggggtttcactatgttggctaggctggtctcaaacttctgacccgtgatgtgcccatcttggcctcccaaagtgctgggattacaggggcgcaccaccgtgtccggccaatatttttcttaccatcttgttatttccaaagtatttcctaacacaacttaaggtcctaccttcagctgggacctggtagcatctctcactgagataggcatgtgtgtcttttgtcttttagctctttgaggagttgcaggagctgctgacccatgacaccaaggaccagagcccctcacgggcaccagggcttcgccagcgggccagcaacaaagtgcaaggtgagagcatccaggaaggggcacttcctctgggctacacatggagggacttggctgtctgactgtagtatctctattcctctgttttctgaatgtttggtggtggtgggtgttgtttcctgctgccccaccccactgcccctgtaaggacaggttctcgctatattgcccaggccagtcttgaacacctgacttcaagcaatcctcttgcctctgcctccccacrtgctgcagttacaggcgcgagccaccatgccagcctgaatgttygttgttgttgttgtttgagatggagtctcacccaggctggagtgcagtggcgcgatctcagctcactgcaacctctgcctcccgggttcaagcaattatcctgcctcagccccccgagtagctgggattacaggcgcccaccaccatgcctggctaattttttttttgtatgtttagtagagatggggtttcaccatgttggccaggctggtctcgaactcctgacctcaggtgatccgcccaccttggcctcccaaagtgctgagattacaggcgtgagtcactgtgcccggccacctgcgtgtttttgtatgagaagtggagtgcaggcaaaaggacctggggtcaaccttcagcgtgtggctctgggcaagccatgagacttctccctacctcagtttccccacccgtaaaatccagtgaggttcagctacttctagcttattggctcagaagtgcacaagaacccctcagaaatcatgggaaactcctgcctccttaatttagactcctttttaggcctttggtcccctgatgtgggccagggagttggggacctgtatccagctatgaacccaccacaggaagatgtcccttctgagtcttgttgtgtgtgagcccctccctcatgtgcctaagaacgatcaaggctggctgtactgaaacatcttggaaacttccaaaaagaccaaagtgctccacaaaatgtaccctcactaagcctaaaacactgagggagggagtgtggctttgggatgggtagcaataaagaggtaaggcttagctacctcctggcaggttatattaggcctcccctcctgtgccaccctaacctacctggcttgtggctttctcacttgtgccagaccacacggacccctctgctaggggtttgtaaccccggagggcttggctatttggtggggtagggagacgtcaccctaatgaagcagttctcaaagtgtggtaccctggctgtgggaggtggtaatcctagtatcccctcaacggggtctgtgaggacaaagcatttttataacactactactatttttttggttttttttttttcgtttgagacagtcttgctgtcacccaggctgragtgcagtggcatgatctcggctcactgcaagctccgcctcccaggttcacgccattctcctgcctcagcctcccgagtagctgggactacaggtgcccgccaccatgcctggctaattttttgtatttttagtagagacggggtttcactgtgttagccaggatggtctcgatctcctgaccttgtgatccgcccgcctcggcctcccaaagtgctgtaattacaggtgtgagccaccgcgcccggcmtttttttttttttttttttttttttttgagacagggtctcgctctttcacccagtctggagtgtagtggcacaatcacagctcactgcagcttcaacctcccaggttcaagggattctcccacctcagcctcctgagtaactgggactataggcacgtgccaccacacccagattttttttttttttggctttttttaaaaaagccaaaaataaatgagaaaattagagtttcactttctcatgaatgtgtgttggcattttccaaaggttatgtgacatgtgatgctctctcatggatttgatggctcatggaatgtgtgcctgtatgttcttgtatgttaagaatttctcagttttggccgggcacgatggctcatgcctgtaatcccagcactttgggaggctgaggcacggggatcacttgaggtaaggagtttgagaccaacctggccaatgtggtgagaccccatctctactaaaatataaaaattagctgggtgtgatggtgcacacctgtaatcccagctactcgggaggctgaggcaggagaatctcctaagtccgggaggcagaggttgcagtgagccgagattgcaccactgtactccatcctgggcgacagcgagactccatctcaaaaaaaaaaaaaaaagaaagaaaagaaaagaaaaagaatttctcagttttaatatctaattttgtaaatagtgatagctatactcacacaaacaaaagctcttttggatccttggttgcatttgagtataaaggagttttggaaccaaaacatttgagaactgcacccctaatgcatcagaaggagcaggagcctttaatatgaacaacacacatgtaaatgtcacagtgtacctgcttgcttgcttgcttgcttgtacttcctgtgaccgcagccctgggccaccagacctaaggccctgttttctctggggaagcccttctcatagcccagggcggggctaggattgaaacccagctggtctggctccagagacctgccctggactctgtcctgcttctaaagacctagggagcacccactctgtgcctgaggaggcaggtggcacatctacccaggttgcatggttggctctggcctatcatgttttaaatcttttttttttttttttttgaaatggagtctcactctgttgcccaggctggagtacagtggcgcaatcttggctcactgcaacctctgcctcctgggttcaagcaattctctgcctcagcctcccgagtagctgggattactggcactcgcaaccatacccggctaattttttgtatttttagtagagacggggtttcaycatattggccaggctggtcttgaactcctgacctcgtgatccacctgccttggcctcccaaagtgctgggattacaggcgtgagccactgcgcccggccctatcacattttaataaccagggatgggactgaacttgaattttgacctcagagctcctgctttctagctcctgccccatcatcaccatgcttagcaaacgtgtgagtttgagaggaagatttacagctcagacctaattgctggcaaagtttaaggagaggacagggagcaggcagaagtctgaaaaccacgcctgggcccaagaatgttttcacaatgtggcctggctgcacagggaagaacagacagcttgragaagtagtgagctgcccgtctttgaaggtattcaagcagtggctagagggacacctgtctgtggtcttgcagaatcctggcgttgggcagtgactgtaccacagaccctgaggccgctctgctttgctttcctatgacatcagacaccctgatgcacgcccacctgttaatgaccttgccccattttctctttcagattctgcccccgtggagactcccagagggaagcccccactcaacacccgctcccaggctcygcttctccgatgggtccttacactcagctttctggtggcgacagttgctgtagggctttatgccatgtgaatgcaggcatgctggctcccagggccatgaactttgtccggtggaaggccttctttctagagagggaattctcttggctggcttccttaccgtgggcactgaaggctttcagggcctccagccctctcactgtgtccctctctctggaaaggaggaaggagcctatggcatcttccccaacgaaaagcacatccaggcaatggcctaaacttcagagggggcgaagggatcagccctgcccttcagcatcctcagttcctgcagcagagcctggaagacaccctaatgtggcagctgtctcaaacctccaaaagccctgagtttcaagtatccttgttgacacggccatgaccactttccccgtgggccatggcaatttttacacaaacctgaaaagatgttgtgtcttgtgtttttgtcttatttttgttggagccactctgttcctggctcagcctcaaatgcagtatttttgttgtgttctgttgtttttatagcagggttggggtggtttttgagccatgcgtgggtggggagggaggtgtttaacggcactgtggccttggtctaacttttgtgtgaaataataaacaacattgtctgatagtagcttgaagtagttttcatgggctttgttattcttggggaactgaccttttcctccctggtttcttgcgtgctcggtaggagaagtggtgatagggggttggcaggagctggtctgtttgagaatacagaaggtgagcttttcttttctttttttttttttttgagatggagtctcactctgtcacccaggctggagtgcagtggcgtgatcttggttcactgcaagctccacctcccaggttcaatcaattctcctgcctcagcctcctgagtagctgggattacagaagttcatcaccatgcccagctaatttttgtatttttagtagagatggggtttccccatgttggccaggctggtctcgaactcccgacctcagctggtccacctgcctcagcttcccaaggtgctgggattacaggcgtgagccaccgtgcctggcccaggaggtgagctttaagtagctggtgggcgaatatttgtgttgaaccctgcttgatgcaattctcgactttatggaagatggggttgccctgtttggtggaaatgagcagattctggggcaaaatttgtattttctgtccagtgactattagggactggagtgaaattcttaggttcaaattcctgctacaccactttgaggttagtcacttaacctctctgaggctccattttatcactggtgacatgaatatagtgatacctaactcacctatgtgtcctgagaagcaaacaagatgcaagtgaaatgccaacgccatacacagttagcacctattatgcaaagaaggagaccagtgttttgtgattcttgtactgtcgagtcacctcatctatgtcatccctgtgttgagggggtgtttccactatctgagggtcaggatggatttcactgaggtctgtccagctctaaaacccaagccctttctatggccctaagtcaagaaaatactaaatatgtagcctcccaatctgggaaagtgaaaaaccttttgctgaaagtgtcctgggcagagcatgggacaagattttttttttttttttttttttttttttgagacagggtctggctttgtcctccacactggagtgcagtggtgtgatcttggctcactgcaacctccacctcttgggcttaagccatcctctggcctcagcctcctgagtagctgcggctacaagtgcacaccaccatgcccagttaatttttgtattttttttttagagatggggtttcgctatgttgcccaggctggtctcaaactcttgaactaaagtgatcctcccaccttggcttcacaaagtgctgggattacaggcgtgagtcactgtgcctggccaaggtgtatttttttttttttttttttttttgagatggagtctcattctgttgcccaggctggagtgcagtggtgcgatttcagctcgctgcatcctctgctgcccaggttcaagcaattctcctgcctcagcctcccaagtagctgggattataagcacatgacaccgcactcggctaatttttttagttttagtagagacagggttttaccatgttggccaggctggtcttgaactcctgacctcgtgatccacctgcctcggcctcccaaagtgctgggattacaggtgtgagccactgtgcccagccaaggtgtttctttataggaccagtacctaaggactggaagtcaggagacctttgtcactagtctgactatgccacttcaaggctcattttgttcactggtaaaatgagaacaatacacatacctctcacagctggtgggaggatccagtggtgtccaaacaccagtctgtgcatggtggcatcagaattacttggagatacttaaccacagaatccagggctccacctgggatggggctctagaatttttttttttttttttttttttttgagacggagtcttgctctgtcacccaggctggagtgcagtggcgcgatcttgactcactggaagctccgcctcccgggttcacgctattctcctgcctcagcctcctgagtagctgggactataggcacccaccaccatgcccggctaattttttgtatttttagtggagacggaggtcacaggtttcaccgtgttagccaggatggtctcgatctcctgacctcgtgatccgcccgccttggactcccaaagtgctgggattacaggcgcgagccaccgcacccagcctagaatcagtatttttgaaaagtaccttaggagagtccaacgcgcacccaggtccaggagcacgtatggtcacgtatgcaaagcataggcattcaaatagcagctggagctgggcacggtggctcacgactataatcccaacacttttgggaggctgagacaggcggatttcttgaggccaggagtttgagaccagcccggccaacacagtgaaaacctgcctctactaaaaccacaaaattagctggaagtggtggcgcatgcctgtaatcccagctactccgggggctgaggcaggagaatcacttgaatccgggaggctgaggttgcagtgagccgagatcgcaccaatgcactccagccttagcaacagagcaagactctgtctcaaaaaaacaaaacaaaaacccaatagcagctgggactctcctgccctgggcccagtttcctcatttgtgaaaggggaatagatattcattgtactgacaaagaaaggaaggaagaggggaggggagagagagaaactatcttgaattttactaataggagaatggctgaataattttttcctatcaattgtcgaacaaagccagacactagttaaagtggtaaggacgaccgggcacggtggctcatgcctgtaatcccagcactttgggaggccgaggagggcagatcatgaggtcaggagtttgagactggcctgaccaacatggtgaaactctgtctctactaaaaatacaaaaattaaccgggcatggtggcgcgtgcctgtaatcccagctaccaggaggctgaggcaggagaactgcttgaacttgggaaacggaggttgcagtgagctgaaattatgccactgcactccagcctgggtgataaagcgagaatccgtctcaaaaaaaaaaagtggtaaggacagattttaatcagtaatgattattgcaacagggaagagagttcagtatgaactgaactcagctttaatttgtatagaggtattttaaagggaggttgaccagcctgggcaatatggtaaaaccccatctctacaaatgaataaataaattcgccgggcatggtggtgaggttgaggtgggaggattgcacgagcctgggaggtcaaggctgcagtgagctgtgattgcaccaccgcactctagcattggcaacagagaccctgtctcaaaaaaataaataaaaaaaataaaggaagattgagggaggaaggggtgggcaagtgattagtagagtcagggaagtgaaatattacaaaaggttaagtcagtgtaaatgcagtgaggctagctgtgtctgccagttggcaatgatcaaagttagaatttttgcctcccacagagcctgggagacagaggtcacatcctcggttgttgcctggaataaacggtaaacatttaccagcagccttgagttttctcaggcaggcaccttagcgggggctggctagagtcattttagagatgttagcagctgttagaaactgttagtgtttgtttaagtctttttttcttttctttttttttttttttgagattaagtttcactcttgtcgcccagactggagtgtagtggcacgatctcggctcactgcaacctccgcctcccaggttcaagcgattctcctgcctcaggcttccaagtagctgggattacaagcgcctgccaccacgcccggctaagttttgtatttttagtagacacagggtttcaccatgttggccaggctggtcttgaactcccgcctcagcctcccaaaatgctgggattacaggtgtgagccacggcgcctggactgtcttttttttctttttagagatgagtctcgctctgtcgctcaggctgaagtgcagtggtgcaatcaaaactcactgcagtctcaaactcctgggctcaggccatcctcccaccttggcctcttgagtagctaggacaacaggtgtgctccaccatgcccagctaattaaaaaaaaatttcaagccgggcgcagtggctcatgcctgtaatcccagcatcttggaaggctcaggcgggtggatcacctgaggtcaggagttcaaggctggccaacatggtgaaaccctgtctctactaaaaatacaaaaaattagccaggcgtggtggcacacacctgtaattccagctacttgggaagctgaggcaggagaattgcttgaacccaggaggtggaagttgcagtgagccgagatcgtgacactgcactccagcctgggcaacagagtgagactctgtctcaaaacaaaaaaaattataaaaaaatttctagagaagcgggatcttgctatgttgcccaggctggcctcaactcctggactcaagggatcctctcatcttggtctcctgaagtgctaggattacaggcatgagccacagtgcctatagatcaaggttgaggcttagaagtgaagggagcccagaggaacctggctagagtttggtcaaggagagtctttgtcaccatactacagaaaattaagcagctgttaaacagaatgaggccggtctgggcatggtggctcacgcctgtaattccagcactttgggaggccgaagcgagtggatcacttgaggccagaagttcgagaccagtgtgggcaacatggtgaaaccctgtctccactaaaaatacaaaaattagctgagcatggtggcgcctgcctgtagtcccagctagttgggaggctgaggcaggagaatcgcttgaaccggggaggcagaagttgcagtgagccgagattgagccactgcactccatcctgggggacagagtgagactccctctcaacaaataaataaacaaataaaagcagtgtgttagggtgcgagaacccgggtcggggacgcgggtgagccgcgcggtaatcgccctgtcctgccaccagctggaggacaggggctcctcagagcctcaggcccagagaacgggccccacgaccgggaagcgaatactccacagggcacagtctcccaatgcaaaatgggcacctggacccaatcatttctgaacttctagttttttctccctatggctatgaaaagggtcattttttttcataggactttaaaagaaggcttaagaaaagcacgcaggcctggccgggtagctcacgccagtaatcccagtgctttgggacgtcaaggcaggcgggtcgcttgagagtagagtttcgagacctgggcaagatggtgagactccgtctttatgaaatattttaagaaaatcacgtacacctgtggtccccgctacaagggaggctgaggcggaaggattgcttgagcccaagaggttgaggctacagtaagccgtgatccagccactgcactccatccccggcaacacaacgagaccatgcgtcaggaaaaaaaaaaaaaaaccaagaaaataaaaaagaaaccacctaaaggcgtcctccgcgcgcccgcccctccgccatctttgcgtccgccccgtcctgcgccgccacttccttcccagccagaagtttcgcgccaaattgttccgcacacaaaatggagcccggaaggaggcgaggtcatgcactttgcagccaatcatcttcggcagacagtccgggcggcggggctggagggctcagaacggtccaatcgctggccgcgaggctccggcgaaccaatgggagcgcagcggctgcggcgtccgaacaccgcctcttgtttttcccgcgaaactcggcggctgagcgtggaggttcttgtctcccctggtttgtgaagtgcggaaaaccagaggtgaggc

SEQ ID NO: 95927 - DNA, 49224 bp, Homo sapiens
tagccctgacagaggctgctccttgagccccggtcccagaatgagaagacacaaacaacagaattccagtctagagctaagcaaagccaaacctcttacccagcagacatttggtatttaaattaaaatttttataactacttttaagtgcataggaaaaaatcttgccaagcacagtggctgacgcctagaatcctagtgctttgggaggccaagggaagaagatcgcttgagtccaggggattaagaccagactaggccacagagtgagaccccatttctacaaagatttgttttaaataagccagatgtagttgtgtacaactatagtcgatgagacgagcggaatcacgtgagcccaggagttcaaggttatagcgagcaatgatgatactacactcaagcctgggtgacagagcgagaccctatctctttaaaaacaaaaaacacaaagaaaacctcaaaagatcatactaaattgttaaaggtactgaataaatccatttatacaacaataattttcacttttcactttgttcattttgtaatattagaatgctttaaggaacatatagtacttttgtaatttcttcattttctatttttaaaaattacctatgctacgccaggcgcagtggctcacgcttgtaatctcagcactatgggaggccaaggcaggggtatcacttcaggtcaggagttgaagagcagcctggccaacagggtgaaaccccgtctccactaaaaatacaaaaattacttcgggaagccgaggcgggcggatcacgaggtcaggagatcaagaccatcctggctgacatggtgaagccctgtctctactaaaaatacaaaaacttagccgggagtggtggcaagcacctgtggtcccagctactcaggaggctgaggcaggagaatagtgtgaacccggaaggtggaggttgcagtgagctgacatcgtgccactgcactccagcttgggcaacagagcgagactccatctcaataaataaataaataaataaataaataaataaataaataaataaaccgggtgtggtagcaggcacctgtaatcccagctgctcgggaggctgaggcaggagaatcacttgaacctgggtgggagaggttgcagtgagccaaaatcacgccattgcactccagcctgggcatcacagcgagactgtatctcaaaaaaaaaaaaaaaaaaattacctatgctggtctccacctaacatagctgagattaaattataatgaatttacattttaagaaaaaggatatcaatataaaaacatgttgatttagataaagaactttgtacatatgtgattacatttatagatctcattgaaaacacaagcttaatggaagcattccctttgaaaaccggcataaggatgctctctgtcactattcatattcaacacagtactggaagtactggccagggaatcaggcaagagaagaaagaaagggtattcaaataggaagagaggaagtcaaattgtctctgcagatgacatgattgtgtatttagaaaaccccactgtctccacccaaaaactccttaagctgataagcaacttcagcaaagtctcaggatacaaaatcaatgtgcaaaaatcacaagcgttcctatacacccttaacagacaaacagccaaatcatgagtgaactcctattcacaactgctacaaacagaataaaatgcttagggatacaacttacaagggatgtgaaggacctcttcaaggagaactacaaaccactgctcaaggaaataagagaggacacaaacaaatggaaaaacattccatgctcatggataggaagaatcaatcatgaaaatggccatactgcccaaagtaatttatagattcaatgctattaccatcaagctaccaatgactttcttcacagaattagaaaaaaatactttaaatttcatgtagaaccaaaaaagagcccatatagccaaggcaaccccaagcaaaaagaacaaagctggaggcatcaagctacctgacttcaaactatacaaaaaggctatggtaaccaaaacaccatggtactggtaccaaaacagagacatagacaaatggaacagaacagaactcagaaataccaccatacatctacaaccatctgatctttgacaaacctgagaaaaacaagcaatggggaaaggattccctatttaataaatggtgctgggaaaactggctagccatatgcagaaaacagaaactggaccccttccttacaccttatacaaaaattaactcaagatggactaataacttaaatggaaaacctaaaaccataaaaagtctagaagaaaacctaggcaataccattcaggacataggcacgggcaaagacttcatgacaaggccaccaaaaagcaattgcaacaaaagccaaaatcgacaaatgggatctaattaaagagcttctgcctagcaaaagaaactatcatgagagtgaataggcaacctacagaatgggagaaaattttcgtaatctatccatctgacaaagggctaatatccagaatctacaagggacttaaacaaatttacaagaaaaaaacaaccccatcaaaaagtgagtgaaggatatgaacagacacttctcaaaagaagacatttacgcagccaacaaacttatgaaaaaaagctcatcatcacttgtcattagagaaatgcaaatcaaaaccacaatgagataccatctcatgccagttagaatggtgatcattaaaaagtcaggaaacaacagatgctggtgaggctgtggagaaatacgaacgcttttacactgttggtgggagtgtaaattagttcaaccattgtgaagacagtgtggcaattcctcaaggatctacaaccagaaatgccatttgacccagcaatcccattactgggtatatacccaaaggattacaaatcattctactataaagacacatgcacggccaggcgcggtggctcatgcctataatcccagcactttgggaggccgaagcaggtggatcacgaggtcagcagattgaaaccattctggccaaaatggtgaaaccccatctctactaaaaatacaaacattagctaggtgtggtggtgcacacatgtagtcccagctactacgtaggctgaggcagaactgcttgaacctgggaggcggaggcagaggttgcagcaaaccaatattgcgccactgcgctccagcctgggcaacagagccagactccgtctcaaaaaaaaaaaaaaaaaaagaatttatgtactttgtagggacatggatgaagctggaaaccatcattctcagcaaactaactaacacaggaacagaaaaccaaacaccacatgttctcactcataagtgagagctgaacaatgagaatacatggacacagggaggggaacatcacacactggggcctgtcgggggcgggtggggggcaaggggagggagagcattaggacaaatacctaatgcctgcagggcttaaaacctagatgacgggttgacaggtgcagcaaacaccatggcacatgtatatctatgttacaaacctgcacgttcagcacatgtatcccagaacttaaaaaaaaaaaggagaaaaaaagaaaatacaaacttaacgctagagtaaaaagtaataccaattcttagtaacttcaaaaaaaattttaactatatgaataatagcttcataataaattaactactcccttaacacaattattaatgcaaatttgcttagtggattaaaaaacatctgtgtcatatctgccatcctctcaaacaacatctaccttctctaaaacctcaatttgatctgagccatcccaactctcaactactcctccacactgcctgagatgaaaaacggctgggattgaatgactgccaaaatatattaaaccaatctaactgcagggtaacggagtggatttctgcctgaggtagtttaagttggttcacatatctacaaacactattgcaaacacccttcccaattattatatacacactgagactggcaccccatgatactgcatatgctgaattcctagaaaaataaacctcaagtagaaaatattcctaaaatattcacttttgtttaaaaggaaattacttatctgtcctggtaaaaagacataaaatgacaaatatacaataaacattaaaattaacagtgttaggttaaaaaatcattatccatgatttatttttaagtacatctatgtttttgctagattagagttaacataattaaatggaactttaagcaattattacagttcatctccatgaggtatttgtgggtttttttgctttttgtttttttagatggagtctcgctctgtcacccaggctggagtgcagcagcgtgatcttgactcactgccacctctgcctcccaggttcaagtgatgctcctgcctcagcctcccaagtagctgggattacaggcgcatgccaccaagcctggctgatttttgtattttcagtagagacagggtttcaccatgttggtcaggctggtcttgaactcctgaccacctgatccacccgcctcggcctcccaaagtgctgggattacaggcgtgagccactgcgccaggcctaactccatgtagtattaacttttcttctcttctgattcttgtaccaactgcatcttttcttttaattccttctgatctttggcatactsttcaaatactggttgaaaaatatatactcctccagcaattccaaggacagtggcaaaaagcagttgtgcaaaagtcaatctcctaaacattgctgcaacaaatacagctcaaggaaaagctggttttggaaagtcacactccacacccaggaaatctcttcaaatctgcatacaaaaatggaaagcaaagccatcacttagtacaatgtccttttaaaagatgttatgtcactactttgcactggagtgaacaatatttttataatatgttactaattaaaacaagaatataaatacataaggagtacaggaagtgaattagggaagggtataagacaaaactaaaaccttttctattacagaatgttctcaatggttttaaatgcatactttttctttttttttttttttttgagacggagtctcgctctgtcgcccaggctggagtgcaatggcgcaatctcggctcactgcaagctccgcctcctcggttaacgccattctcctacctcagcctcccgagaagctgggactacaggcgcgtgtcaccacacccggctaattttttgtattttttgtagagacggggtttcaccgtgttagccaggatggtctcgatcctctgacctcctgatccgcccgtcttggcctcccaaagtactgggaatacaggcgtgagccaccgcgcccggcctggttttacttttaacaagaggagtgggccgcacgcggtggctcacgcctgtaatcccaacactttgggaggccgaggcgggcggatcacgaggtcaggagttccagaccagccaggccaatatggtgaaaccccgtctctacaaaaaaacacaaaaattggccaggcgtggtggcgcgcctgtagtcccagctacttgggagctgaggcaggaaaatcactggaacccgggaggcagaagttgcagtgagcccagattgcgccactgcactccagcctggactacaagagcgaaactccgtctcaaaaaaaaaaacaaaaacaaaaacaaaaaaaaaacctaacaacagcaacaacaacaaaaaaaataggaaccattcggcctgtttccacatctgtacaacaagctaaatcatccctaccctgcctacctcgttgaacaggcattttttgtgagagcaacgaacctgaaatgttaacaccaacactgacgtctacaattaccgttaccgtttttaataaccactcaggtacctccgactgttctgcgcctgctccacgtcactaaactcgctaccgcctgctcccctccagagaccgggggccttccagcagttttcggacccccgagcacagagaccgccaagccaaaggcgagtagcaatccctcggttcggaaacggcgaaaggaaaccgcaaggaggccaccacgtcgggtgggagctacgaagttgcccgttcccggttacttccgggcttgcgagcgacgactgctctcaaaggccaaacttaatggatggacgagcagcgcgctactgcagctttcttccgccttaggaaggtggcggccagggatgaggaggcccctaagcaagtgcggaatggagccggggggcggagatgccagcctcactttgcatggtctccagaaccgctcccacggcaagataaagctgcgaaagagaaagtctaccttgtacttcaacacccaggagaagagcgccaggcgccgcgggggtgagtgaggggacactgtctggagagctcctacccccatctaaaaggaaccccctccatttcattaccagccagttgcccgttgagctctgtgttgccagatcttgagttttgaaatgctgggaaatgctggaaacacagattttaatataaattctgatttttaaatgttggcaactaaattcaattttttaaaaaatactctgtatttggccgacaggctgtccatttgtggtcaagagcaggactttggagacatcacacagacccgggtttgaatcctgataagtaatttacaactttattyggacaaggcagtttaatttctgggcctcaatttgctcgtctgtaaaatggggctaataatacctatcccataatattgtttggaggattaagtgagatgcatgtgaagaaattaacacagtgcctggcatatataatagtaatcatcaatatatatgtacagaggaccattttatattgcacatatacaaagggctgcttcccaaattagtaatttgttagctggtttctttcattagatacacacatagtatgacctaattaattagcctaaggccttagttaacccactcttttttttttgtatttattttaatattatctttacacaataagttgcaagaaaagttggttaaactaaaagagtggcagtcacccagtgatgacgctgtggtgcttgtataaccaaccaagttggctttaagaatggtgtggagggaccagaggtcactactgtgccttacaaggagccaaccagagcagcagattttaagttttgcaagtggaactgcctgacttttgtgccactattacctgttttgttctgtttttcagatcttcttggagaaaatatttatctgctcttgtttaccwtagctttacgaatattaaactgctttttagtgcagacaagttttgttccagatgaatactggcagtctcttgaagtttcacatcacatggttttcaaatatcctttgtggtttcttttccagactatgagtgtgtattcatcttggaaattgtgctcagtttcttttagagtagtcccccttgctccctcgtcttcagtagatagtttccaaaatccctagtggatgcttgaaactgtagacagtaccaaactctatatatattgtttttatatatgtaaaaaatacacacacgcttatgataaagtttatacaaattaggtacagtaagagattaacagtattaaaatataacaagtataacacaatactataataaaagttatgtgaacttttatgtggtctctctcaaaatatcttcatattttcagacagtggttgactctgggcaactgaaacatggaaagagaaaccacagataaggggggactactatacatattttcagttttccgtattttccccaaataattttaactcatcaaagtataccattattttatacaaatatttctcctgtatctttcttttatgttaatatacttgacacagccgttagcatacattcccacagtacttagcacttggaggatacagagaaagtaaaaaacacattactgccttgaagaagttaagagtttagttggccaattgaatttttaatgcaaatatccagtataaaatgctgttttaagactgccacaaaataaaatattgttttataaatggaaatgaaaatagattttgccaggtgaagtggtgtgcacctgtagaggcaggaccacttgagcccaagtttgagaccagcctgggcaagagagtgagaccccatcttaaaaaaaaaaaaaacacggaaataggtttcaatattattggacatttactccttaatgttactaattatggttatttgacttgggaatggacagagagactgaggagttacacttatcccttaatctttgcaagcatttacaagattcttcatcttttagggaaagatagtgttcagttgctggtaagtttaaataaaagtaactaaatgatattggggccatggaatttgtttttaaaaggctactgttgctgaagtccagccatatctgggaagcccatgatactacagacatactgtgatgtgtaactctttagtttgtgctgaaatacaagactgagcatgaaaatatcctgctatgaggaatcctgttatgatgtgcagattttcaaaatgactatattatgtattatttggacattagaagtatacttctttcttttttttttttttttttttttttgggacggagtttgctcttgttgcctaggctggagtgcaatggcgtgatcttggctcaccacaacctccacctcccgggttcaagcgattctcctgcctcagcctcccgagtagctgggataacaggcatgcaccaccatgcccggctaattttgtatttttagtagagatggggtttctctgtgttggtcaggctggtctcgaactcccgacctgaggtgatctgcccgtgcggtggctcacacctgtaatcccagcactttgggaggccgaggcgggcggatcacctgaggttgggagttcgagaccagcctgaccaacacagagaaaccgcgtctctactaaaaatacaaaattagccgggtgtggtcgcgcatgcctgtaatctcagactttctggaggctgaggtaggagaatcacttgaacccaggaggtggaggttgcggtgagccgagatcacgccattgcattctagcctgggcaacaaaagcgaaactccttcccccatcccccgcaaaaaaagtatcacttgagagcaccgttgtattttgtgttttttaccttgtaagaagaccgtgtgatatgattttatgaagtctgtatacatctaaacccactgaggatttagtgttgaaattaaaactttaaaatttttaatttgacaaacatttaatgatctgcataatcatcgtcctatatagtaattaggcatcaacagtaagtaggattgtaattcctaggctattaattgctggggtcagttgccaggagatagtacaagggcaggactaatggtgtaaaagtttctctagcctcactcccatgatcttttaagctgtcatcagatgagactcagagtttgtgctcyccccgatttctgtcagtgggggttaatggctcagcattccaaaggcagtccaaatcctgacgtgttttgtgtagcttagaaagacacaggttctagggtatttgttttaaggtggggttgtactctccccattgcaatatttgcttccgttattgagaaattagggttaaaccagtgaaaccgatgcttcaaatgggaagatgatggggaaggagaattcagagcagtagcagagtttcttccattaacaacaggcagaatttaggagccgcaacctggcttttcttctcttacagttatctactagtttatagattatgcaaggtatccataaagtctggaatcacaagaaaatatacataatctcatcaatgacagtttatatcccaggaagtaggtcagattacaaatgaagaggtcttcaagatagaaaaatttcctgctcctccaagacctatccactgccctccatctgtagctgacccaccaggtcattttgtgatgtgaaggaagcctcccctgacctgctccaacccctctaaaaggaactcattgtcgtatctagaacttgaccctgtagagattcattaggatatgatcagtcattcatactctcatattgattattttaagcaaattatatacataattttgaagctagaagaggttggagaagtgaagtaaatagaccaaggtcacaacgtgttaaaagcagaactagagctaaatcccaggtctatttactcacagcctagtgctcttcccagatggctcctctacaaactgcataaggcttatgcacagctaggcatggtggctcacagttgtaatctcagcactttgggaggctgaggtgggaggattgcttgaggccaggagtttgagaacagcctgggcaacatagcaaaactctgtttctacaaaaaatttttaaaaaggatagatggcttagagctgcactgtccaccatggtagccactagctacatgtagctgttgaagacttcaaatgtggctagtccaatttgagaagtgctgaaaatgtaaaatacatactgaatgtcaaaggcctagtacaaaaaaagaataaaaatatttttataatttttattgattaaatgttcaaatgatgatgccttagatatattgggttagacaagatgaaattaattttacctgttttggatttgggggtcatctctgttgttactttttaatttgccagctatagaatttaaaattccacatgtggctcatgttatatgtcttttggcctgtgatggcatggaacatgtaaaaagaaagaggaagaggaggggaaacctgaatggggaaccacagtaaggtttgttgggttttgtttcttttgaaatggaatctcactctgtcgcccaggctggagtgcagtggcaccatcttggctggctgtaactgccgcctcccgggttcaagtgattctcctgcctcagcctcccgagtasctgggattacaggtgtctgccaccacacctggctaatttttgtatttttagtagagacggggtttcaccgtggccaggctggactcaaatgatctgcctgcctctacctcccaaagtgttgagattacaggggtgagccaccaagcttgccaacagtagggtctttgaatagtcagaagacaacaaaagggtatttggctcctgtagcttaggggaggagtcaggagtgtaaagaacagaagtatggaatgaggagctaccaacataggcctagtgctcaagttacgcctggcatgttcttctctttacctcactccactgctttattttactctttagcaggtccttactgtaacatggaaaattatggcatcaaaaatctggagaaactgctaatgactgggagttcagaactccgcttattgttatgcgaaagtctactttgttttaaattcaagatttctacttaaccacccttgaaaaacttctctttattcggggtaaatgtctctagctcttaacctcataatcatagatagtatcctctagacactttgtaatttattaatatccgtcttaaaatgtggatctccaaactgacacaataatgaaggcagagtaactagttcagaatatggtgggtccattaacttacatttctcagagcacaggaattcttttagctttttaatagctacctcacactgttggctcatattaagtttgtagccaaattgacttttcatatgaactgctttcagggggcctgggaagtaaggatgaagcttatagctccctatgcagagtaaacagaaggtatgtacatgagtgccttttcctgtattttacagggcacagtttatgtgaaattaagtactgggtacctttaactttccaattttagcatttatttacacattgtggacaaaaagaaaataaagtgctaaaagccactgacaactaaaagtaaagcagctcctataatgtggacttaatgaagtttgcttcaacaaaaatatgaattaacagccggcgcggtggatcacgcctgtaatcccagcactttgggagggtgaggggggtggatcacctgaggtcaggagttcgagactagctggccaacatggtgaaaccccatctctactaaaaatagaaaaattatacaggcatggtggcgggcacctgtaatcccagctacttgggaggctaaggcaggagaatcgcttgaacttgggaggtggaggttgccatgagccaagatcgcaccactgcactccagcctggatgacagagtgagactctgtctcacacacacacacacaaaataaaaaaataaataaactcacgtataaatttttagaaacacatcttttaaacaaaccaagattaaattgtgctctaccagcagttgttattttgttagtgttaactatgacacctttttttttaactctgagagatgctagtgcatagcattagcatttctaactataatttagttgtaatacatttagtctttatttcagttttacacttaaatttactctttaatgtcatctgaataccatgttcctataattgcagaatatttgtgcttttttaaaaagtaatttgttagccaggtgcggtggctcatgcctgtaatcctagcactttgggaggctgaggcgggcagatcacaaggtcacgagatcaagaccatcctggctaaaatggtgaaacctcgtctctactaaaaatacaaaaaattagccaggcgtggtggcatgcatctgtagtcccagctactcacaaggctgaggcaggagaatcgcttgaacctgggaggcagaggtggcggtgagccaagatcacacagctgcactccagcttgggcgacagagcaagactccatctcgctgggcacggttgctcactcctgtaatcctagcacgttgggaggccgaggcaggcggattgcctgagttcaggagttcgagaccagcctgggcaacatggtgaaaccccatctctactaaaatacaaaaaattagctgggcgtggcggcgtgcacctgtagtcccagctactcaggaggctgaggcaggagaattgctggaatctgggaggtggagcttgcagtgagccgtgatcgtgccactgcactccaccctgggcaacagagcgagactctgtctccaaaaaaaaaaagactccgtctcaaaaaaaaaaaaagtatttcttattatcttattttatatcttattatcttatacataatattatcttattatctatattgcaggatagagaagcagcataacttagtaattaaagtcaggcagacctgggtttataatgccggctttcatacttactagctgtgcagccttggaaaattagttaacctctctgtgcctcagtttcctcatctataaaacagttcttgactcagaagattgttaggactgaatgagttgatacatataaaatagcatgatacatagtacacagtgctgcaaatatttgaatttttaaaaacctgttgttgctaatgaatataaatatacttttaaaatagaaacttggccgagcacggtggcttacacctgtaatcccagcactttgggaggccgaggcgggtggatcacgaggtcaggagatcgagaccatgctggctaacattgtgaaaccccgtctctactaaaaatacaaaaaaattagccgggcgtgggaggctgaggcaggagaatggcgtgaacccgggaggcggagcttgcagtgagccgcggttgcgccactggactccagcctgggcgacagagcgatacgtctcataaaaataaataaataaaacagaaacttaacacaattaaatgactggctattaatatttacattaaaattagggccaggcacagtggctcacgcttgtaatcccaacactttgggaggccaaggtggaagtatcatttgaggcaagattagctgagtgtggcagtgcatgtctgaagtcctagctactcagtagactgaggcaggaaaattgcttcactcctggattcaaggctgcagcctgggtaacagagtgagaccctgtcaatcaatcaatataataaaaaataatttaaaaatatatttataatatatgtgtgtgtatatatgtcatatatatgcacacatacagagaatgagactggtaaatatcatatttatatataaatatatatatttatatttataatatattttatatataacatatgtgtatatatgtcatatatacacacacatacagagaatgagactggtaaaacttaaaactacattgattattttaatgagaatataatttttgtagaaaaggggatgtagggatgtagttttgtggaagaatagaaaaatatattgcctatttttgtactaagaatggcttcccatagatagttggatcagcttgttgacttttatcataattcagtttgaaccaacagatatttttaacatcctgttcttctttttaactgatgaagatttggattcctagacttgcccaagcacttctgtcygctgtagcagatgtgagactttactcattaaygaagcaactagaaaatcaggaagtggcaagatgggtggtaagtcctaaatactttagaagctgtatgccagttatttcgttcctatgggtataaagcacatggaaacattgattcccaaaacaattttagaagataattcatacaactttatagaggtacttccataaataagaacagtaatatgcaagtggcacctgccatatctttccttcggattaagccctgcacagtgtaagccactgatgccctcaaaccctatgagagtctaaaccctgggagacaacctttggaagccccttcactcctcaaaactgtccttgcctctctttccatagaattgagtagggatcgttctaaattaccagctacctcacaaagcatcttagctatttacaacccttgttctgttcctctagccagcctctatctgaggtgcagcccgagaaatctttttgcactgaaactctcacttctgaatgggatgttggaagtattaggttggtgcaaaagtaattgtcgtttgtgccacaacaatattaggttggtgcaattactggactcatgtaaggaagaaagtatagtatgcaagactatcttttgtcgtttgacttatttcaaggtgggaagatagattcctgacatctcccactccaatcttgaatggatttttcccatttaaacaataccctgatgagggattggattctgtagtactgtcgttaattcacttggctctttgtaaagttaataagcttatatgagcctgtttgaaagtcttaactaccttttttatattgtttctattggaaaatacattctaaattccaagtaaccaatttagcaacatatttctgaaatataatttattaataaattagaaagggaacatttctgcaggtattctattcctttgcattaaaaagaaagattggtttagcaactaagtccttgctaattgattcagcaatatggttagcctcattattttgtgcttatactttatgtacattgcagaaggctcaacataaaatggtaggcaaaagtcatgatggctttgaagtccttcctccaaagatacagcactagggccgggcatggtggctcacccctataatcccagcactttgggaggctgaggtgggcggatcacaaggtccggagttcgagaccagcctggccaacacggtgaaaccctgtctctactaaaaatacaaaaattatccaggcgtggtggcagacayctgtaatcccagctactygggaggctaaggcaggagaattgcttgaacccaggaggcagagattgtgccactgcactctaacctgggtgacagagcaagagcaagactccttctcgaagaaaaaaaaaggatacagcactaggttcttctagtttagggaaaacctttactttcatgaaaattgggaacattttttaaaggctatatttggtgagatgggaagctagtgccacatgcttaacaattgcctcaactaacaagtttcttttaacacatttgttttgtagacttaatggtgctctgtgtgcatgttcttccaaaaactgattcattaatttagtcaatctccaaattaaaatttaataatgtctcctgacttttttttcctctttcctsttttgtcttaatttttcatcagcgttccaaaacagggagacattccaaacaagtgcaacattccaaacaaggtcaacaaaaaaacagtcataatacttgtgtcagtactataagacagtttgagaaatattgattggaagaatctagttatgaatttcaatcatctgtaaactctaccatcaaagaatctgttttttatgtgtttcattaatggaaagtgggattttaaatcaaatgaagtgccataaaaatgcacctgaaagtataaacttcttaacatgaacaaatatagatctgctattatcataaacctgtgtttcatgtaactttctaaaaacgacgtttgggcatgcctacttactttaacatcatctaccttttgatgtccttttcacaatatttagacttgcttgctatttagaagataatatgtactaaggttttccatttccaatttcatatatgtttgctctgtactttttcttagtttttttgccagttgtgctcctggttcacatggtattgctgtaccagaacccttacaaacaccatggaaactgttctcactataattgctcttttctactatcctttggaaggttcaaagtctatgaacaggtaagaaaaattattgttaataattatgttcaaaattctacttttgaaaaatcttaaatatcaacatattgtaatgtctagtagaccccctaattttcatgagtcatgagaaccacaaattttcagttgatatattatagcagaaaacagataatactcaaacaggataattaaggagagtttaacaaaaggaatatttgcaaaggtttagacaatatttagaaaagccaataaggaaacaccatartacccccagcatggttatagtaggaagtctgtattatctctaggccccaaggagcaaggagaagaaatggttactggaatctataaaaagctgtaattgtaagagagtgccccagcagggacaggcacagccagcctttagcaataatgaggagacagccagggaactaaataatcctgacccaactcttctgcctctcaacccaaaacagtcagaagccagaaagsaaggtagccactgatgctgtccattcaggtcagctttcctgcgtgcagactggataaaggctgraggagaagagttttggaagggcaaataggaaatacttggactttatttggcttcctttaaactggggaaacaaataccacgcaatgggaacatgagtgaaggcayagaactgtaaatgggctccatttacagttacagttacagtatattcaaggcagattgtccagagtagttatagagtgttgtaggatgcatggaagaagataagaagaagggatgaggctggaatgagactttgaatttggattttattctgtaggtaatagggaaccatttgaggcgtttgagtagcatgacataatcaaatctgattttgaaaaacttcttttgtaatagcagtatttaggatatactgaaaggagaaaagccagaatttgggatctagttaaaattctagtatccattcttcctacacaaaaggttgttaggatgatcaaatcaaataagatcatttctgtcttagactctcttaactacaagaaaaagcattcactcaagttacgtatatgatgaggactttattttaaggctaaaagggaaaatgggcatctcaagccttgtggctaggactggaagaaaactgtagaatatctgagccacacaaatgaattgaaatgttatgcagaatccaaggcagttttggggaatggactgttttgttgtgcctttatatcccaaatagcctatgaatcctgccttagtcttccatcatttaggggcttagctagtctctccacttctgtttttgctagcaattacccagatttctccatatctcacgttcagyttgagagaatcgaattaggtccattaaatctcattgtctctatctggacataactttatttcacactggccagccttagattggctacctgggcccaggtgcccttccctaattcagtcaggaagcgcaagggtcacatggtacaaaaggactgctatataagcatttttccttgtataagcatgacagatactattccagacctgacaataaaatgacattttgcacactcctttaaaaaatgcaactattggccgggtgtggtggttcacgcctgtaatctccacactttgggaggccgagacgggtggatcacttgaggtcgggagttcgagaccagcctggccaacatggtgaaaccccgtctccactaaaaatacaaaattagctggatttggtggtgcatgcctataatcccagctactcgggaggatgagacaggagaatcacttgaacccaggaggcaggggttgcagtcagtcgaggtcacacgattgcactccagcctgggcaacaagagcaaaactgtctcaaaaaaaaaaaatttgtggagatggggtctctttaggttgcccagctggtgttcaactccgggatcaagtaatcctcccaccacggcctcttaaagcgttgggattacaggcatgagccaccaaacctggcctaaatttcaagctcatgtatcaaaatctggatttcaactttctcttgaaaaattggaagttctaatagtattttgggctaggattccttcatgacaataccatggttcaaacttagcctacatttctcatttttattttatttttttttttcgagacagtgtctctctctgtcgcccaggctggagtacagtggctccatctcggcccactgcaacctctgcctcctgggttcaagcaattctgcttcagcctcccgagtagctgggactacaggcgcgcaccaccacgcccagctaatttttgtatttttagtagagatggggtttcaccatgttggccaggctggtcttgaactcctgacctagtgatccagctgcctcggcctcccaaagtgctgggattacaggcgtgagtcactgcacccagccccatttctcatttttatagtttactgggtctctgtaagcatttgaatgtgttatccttgagcttacatcctcatcaacattacagaattcattcttttttttttttcttttttttgagatggagtttcattsttgttgcccaggctagagtgcaatggcatgatctcagctcattgcaacctccacttcccaggttcaartgattctcctgcctcagcctcccaagtagctgggattacaggcacctgccaccacacccagctaatttttttctatctttagtagagacagggtttcaccattttggccagactggtcttgaactcctgacttcaggtgatccacccacctcggcctcccaaagtgctgggattgcaggcctgagccaccacacctggcctacagatttctttatagttatttttattagttaataggtatataatggtaatataggttgtcttattttgctttcttttaattttttacaggactaagtatttttccacataataatatactatccatagtcctcatgattaaattatcaaattgtctctttcaaccattagtttagagaagtcctgttaataaaaatctgtatttctatccatgatcatacagtttatacagtaggccttttatcagttgtatgcatatatatttcacttggctaaaattaactttcaaaacaaaattctaaatactctgagcccatcactgcctaaataatcctgtttctttaaatgctcatgctttttcttagagaaagcctctctttatgactttcttatagctccttaggagaaacttgatcatttttttttcaatcaagaaagtaattggcaaagttatgaggtaaaaagcatgctttttagcacacaagactggcattaagacatatgataacttcttatttgaaaatactagaattagaagatgagcactgaaaacggctttagatattaccttttttaaaagataagaaaaactaagacccagaaagcgtaagtaacctgcaaaagttaatatagctatttaggccaggcactgtggctcctgcctgtaatcccagcactttaggaggctgaggctggcggatcgcctgaggtcaggagtttgagaccagcctggccaacatggtaaaaccctgtctcccactaaaaatacaaaaaattagcctggcatggggattagcctgtaatcccagcactttaggaggctgaggtgggcagatcacctgacgtcaggagtttgaggccagcctggccaacaaggtgaaaccccatctctactgaaaatacaaaaaattagtcgggcatggtggtacacacctgtaatcccagctactcgggatgctgaggcaggagaatcacttgcacctgggaggcagaagttgccgtgagccaagatcatgccactgcactccagcctgggtgacagagtgagactctgtctcaaamaaaacaaaacaaaacaaaaaaaagttcatatagctatttataccaaaaggaaaatgtcaaatcacagtgtaaatgatagataacttcaagttaatttcccacttgtcttatcacacattttcctcttatagtgtcaaatactcatccctggtggcacttgccttcataattcgtcccacagctgtcattctgtggacacctttgctcttcagacatttctgtcaagaaccaagaaagcttgatcttattctacatcattttttacctgtagggtaagtgtggcaataatccatccatttattttagtagcctacaaatcacagattacgaacaagattttacatctttcagttaattattttatcttctaatgtcartgagaactcttagtccaaggaaatagaataatgcaaaacttatattttttatttatgatcctgattataactattttaatttgcttaactgagtgcttttgtaattatttctaacttagtgttttccaatgctttatttsctaaatatttctcacatatattttagagatacttgattcttttacatttgtataaggctttataattcataatgtgttttcacatattayctcataattttcataatacttcagtctaggcaatatatgtttttattttgtagtagagaaaacaggaggctcgcagaaatttaaaatgtattagtcaaagtcattgggctggttgctatactggtattgaaacccacatcttctaactacactatgagctcctaggatgagttgtatcccaagtatctagtagactaccccgaataattatttactgaagggatgactgcattctgactcttacaacagtaatctttttaatatacaatcatgcacygcataatgacattttggttagcactggactgcatttatgacagtggtcccataagattatattaccgtattttagtgtactttagtttctctgtttggctatatatatttttttatttgagacggagtctcactctgtcacctaggctggagtgcagtggtgcattctcacttcactgcagcctccgcctcccaggttcaagtgattctcctgcctcagcctcccaaacagctgggattacaggcgcctgccaccacgcctggctaatttttttatttttagtcgagttggggtttcaccatgttggccagctagtctcaaactcctgacctcaggtgatccacccaccttggcctcccaaagtgctggaaatacaggcatgggccaccatgcccagcctgtttagctatagttagatacacagatacatagcattgtgttgcaattgcttacaatattcagcatactatcatgctgtataggtttgtagcctaggagcagtaggctataccatatagcctagatgtctgtaagctgtaccatctaggcttgtgtaagtgcactctatgatgtttgcacaatgatgaaactgcctaatgatgcagttctcagaatgtatccccattgttaagcaatgcatgactgtactagtattcactagtcacaagtatttttcgggtagcaatctgaaaaggactaaattatcttgcrtctcagttgctactgttgtcrtttctcagatgtattaataacattgcattaaatgtattcattcattcaggaattatttaatcctactatgtgccaggcagtgttccagatgtaggagatgcatcagtttaaccaaaaaaagtacctgccttcatgaagtttacattctagtagggagagacagacagctaaaaagataagagtaaatatatatttgtcaagtgatggtaatacagggaaaaataattgtgggataagaaggatagaatgccagtgcttggggtaatgggggagctgttatttttaaataggrtagttgggaaagatcaccatgataaggtgacactggagccaaaacttaaaggagttgagagagtgaaccatgtagttacttgatgagagagtattccaggcaaaggggccagccaagtactaagtatgctgggcatgttcaaggaacagcaaggagactgatgtggctaaaagagagtgagtttgggagaatgtaataatgaggtcagagagatagcaggggctcagttcctatcggctttaccactgagggagatagaaagcctttttaatctcatcagcagcatgataataacttattcatttaataagcatttaacctactttgtatccagcatttgataattcagaagtgagtaagatacagtgtctgctctcaaagtcaaagtctgtgggggaaaaagatataacaatacagatgctccttgactcagggttacatcttgataaactcattgcaggttgaaaatatcataagtcaggcaaggcacagtggctcacacctgtaatcccagtgccctgggagaccaggagttcaagaacaacctgagcaacataatgagaccccatctcaacaaaaaaatttaaaaattggccaagtataggtggcactaggcacgcctgtggtcctagctacttgggaggatgaggcaggaggatcccttcaacccaggagttcaaggttgcagtgagctatgatcattccactgcactccagcctgggaaacagagtgataacctgtctctaaacaaaataaataacaaagaaaatattctacgtcaaaaatgcacttaacacatctaacgtactgaacatcacagcttagcctaccataaacgtgctcagaacgcttacattagcctacagttgagcaaaatcatctaacacaaagcctatttcataataaaatatttgaatatctcatgtaattcattgaatactgtactgaaagtgaaaaacagaatggctgtatgggtaccattttaaagttgaaaaatcgtaggttgaatcatcatcagttagggattgtaattcttacccagtgatttaaagtgttctagtggttgggcacgatggctcacgcctataatcccagcactttgggaggctgaggcaggcasatcacctgaggtcaggagttcaagaccagcctggccaatatgatgaaaccctgtctctgctaaaaatacaaaaaaattagctgggcattgtggcacatgcctataatcccagctacttgggaggctgaggcaggagaaacgattgaaccccagaggtagacgttgcaatgaactgaaattgcaccactgcactccagcctgggcaacagagtgaggctccatctcaaaaataaaaccttacatccagattatatataaaacttttaaaaatctataagaaaaagataactcatagaaaaattattgaaaaggtttcatcaggtacttcaaaaaatattaaaatggccaataaatataaagagactcatttcatttgttatcaaggaaaaacaaagtaaagccaccatgaaatactactatactatacatccacccaaatggctaaaatgatgtggaacttatatattcctgtgggactgcaaactaatacactattttggaaaacttttaagtacttacaaaagctaaataaatacatagttgcacttacaacttagggcaggggtcaccagtcccaaggctgtggactggccccagtccatggcctcttaggaactgggctgcacagcaggaggtgagcaagcaagcaagcattactgcctgagctccacctcctgtcacattcttacagaagtgtgaaccctactgtgaactgcacatgcaagggatctaggttgtgctccgtatgagcatctaatgtccagtgatctgaggtggaacagtttcatccagaaaccatgccccactcccacccccgcaacctgtttgtgggaaaactgtcwttcaagaaaccagaccctggtgccaaaaaggttagggaccgctaccttagggcccaccaattccaatcctaggtatatgtctaacagaaatgcayatatatggataccaaaagatgtgtaaaagaatgttcattgcagcactattcacaatagctggaaatggaagcacagtgtccatcaatagaaggaatacatacagtgtggtatacatagttacaatacacagtattgtaaaggaatgaactacagcacgcaaaaaaacttggttcratctcacaagcacaatgactaaaggaatttagacatgagyacatatggtatgatcctattcttataaaattcaaaaaaagataaaactcatctatgttatcagaaattaggatagtggttacctttgggaagaggaagggttacctttgggttacttttggggaggaggtagggactgactgattggagggacaaggtggtgctgctaatactctttatcctgctctgtatggcasgtacacagttgtgttcatgtagtgatgattcatagagctttaccttcatagcgtatttttctgtatatgtgtttgttggaggcagtctctgagatggcctccagtgatcccatcctcctgctatttatgtctttgtataatcccctcccccttgaacatgggctagatttgtcgactcaattctaatgagtagaatacagcagaagggatgggatatcacttacaagactgggttatgaaaagactatggtggccaggcacagtggcttatatctgtaatcccagcattttgggaggccaatggggaagtactgcttgaggcccggagtttgagaccagttgggtaatatagtgagaccccatctctacagaaaatccaaaaattatccagtcatggcggcacacacctgtagtcctagttacttggaaggctgaggtgggaggatcacttgagcccaggaggtcaaggctgcagtgagccatgatcacacactactgcactccagcctgggtgacagagcaagaccctgtctctaaaaaaaagaaaagaatacataaataaaaagattatggcttccatcttgggtgcctgtctcactcactcttggctgacttaccctgggttaagccagttaattatgtcatgaggcagctttaaggaaacggccatatgttgaggaacttagccccaccagcaaccatgtgagcaaatttggaagctgatctctccacctgtaattgaaccttcagatgaaactgtagcccctgctaagagcttgactacaattcatgagcgacctcgagccagaggcacccagctaagcaacacctaggttcttgatccacaggaactatgaaatggtaaatattcatagtttaagttaacaagttttggggtaatttgttatacagcagtagtctttcaataatctttttattaatatattttttacaatattaatcgattatataatcttatctactgatctttttcagtagatacctttcaaaatgtgtaaatctatattcagttggtgaaactgtaaagcatttttatagtggcttttgatgcaaggcacgtacaaagccatatgctaatagtggattttcagcaagctccaaatgtgaatcactatgctatttttgtttttcagctttgttactttgagtttgtctctgatgattgatcgtattttttttggccaagtaagtaaaagtatattaagctaacagctatttttatttttaatccattaatactttagaacagaggcaaatgattttttaaatgatatgggatacattacaaaagacttctaggcatatmctaataagcctttggttcaatttgttgtgctttctacataaaagaattagtactcctagctaatattcaggagagtacaytttaaggcagggaattattaagtgagcactgaatgttacctgttgctgtttctgtcattattgtcagctttacgctgtaattcaaattgtaatgttttcaaagctttatcttcacaggtaatatgtcacattgtaaagtaccacacagtccraaaaatatgtctactatcctctttatctcttaactggatataaaacttggatggagctggaggccattattctaagtgaaataactcaggaatggaaagccaaatatcatatgttcttacttataagtgggagctaagctatgggatgcaaagacataagaatgatataatggactctggtgactcagggtggggaagggtgagagaggggtgagaaattcttatttcgagtacatattgggtacagtgtacattgcttgggtgatgggtggaccaaaatcctagaaatcacctctaaagaacttattcatgtaaccagaagccatctgtaccccaaaaacttgaaataaaaacacaaacttagactgccaaaatataagtttgattctcactttgaatctcaaaaatctagttttacaaattaacaaggaacacattaatacttaaagaagaaaaaataacagttaagaaggatttcatacagtcattaattaaaattattaggccaggcatggtggctcacacctataatcgcagcactttgggaggccgaggcaggcagatcacgaggtcaggagattgagaccatcctggctaacatggtgaaaccccgtctctactaaaaatagaaaaaattagccgggcgtggtrgcgggcgcctgtagtcccagctactcgggaggctgaggcaggagaatggcgtgaacccgcgaggcggagcttgcagtgagccgagatcgcgccactgcactccagcctgggcgacagagcaagactccatcttaaaaaaaaaaaaaaaaaaaaattattaatgtaaactattgcctggtttttagacttcaattctgatttaatgtcaaaattgtatcaatcccctaatgccaaagattactacttggcactaacacatttctatttatttttccttcaacggtgccagtggactctggttcaatttaattttttgaaatttaacgtgctgcagaactkgggaacattttatggttctcatccatggcactggtacttcagtcaaggatttccagttatcttgggtactcacttacccttctttattcatggctgctatctagcaccaaagagataccggatacttttggtgactgtgctgtggacactgcttgtttataggtaagattttatttgttcaaaaggctaaaattttttatgttaccaagaaatcaaattaaattcttcaaaaagtaaactttatgttttggaggtgccattaacttttgttagtgggaattatcttagaagatacaagtagtagtaattatggaggcactagagtgaatactttagatatgtagtttgcttaataaggattacactcaatttttaagaacttggactaattttatttgctttaaaaaaaaaaaaaacagaccaggcacagttgctcatgcctgtaatttcaatactttgaaggccaaggtgggaggattgcttgaagcaaggagttcatgaccagcctgagcaacatagcaagaccctctctctgaaaaaaaatttaaaattaccagggcatgatggcatgtgcctgtagtcctagctattggggaagctgaggcagaaggactgcttgagcccaggaatttaaggttgcagtgagctatgattgtgctactgcactccagtctgggtgacaaaacaagaccctgtctcagtcaatcagtcaatcaatactaccaaaattttaaattgaaggaccacagaaatacattctaaaataaaaatgtatgtatccttattccaaatttgactaatttcacttacttggattgaaatagaaatcccgtttttagaatgtaactgtactttgtaatttcaaattgacatcatattttatgattagttttaccatatcrtaatcaccttataactaaaaaataagatgaatttctgaagcaagaaattcagtctgaatacttagaaaataaatagatcaagttaaatatattttatattaaatatattactttctcaatctatcatataacatgataattaatattttttaataatatttgtttttattacagcatgttgagccacaaagaattcaggtttatttatccagttttaccattctgtatggtgttctgtggtaagtgcttttgtttgttatagaaaataaattatatagaaatagtctaaagacaacacatcctcattaaactatgtctattttcaactaggttaataaggaattacttaattacagattaattatattactgcaatattccctttttgtagtccaaatatcttttttcctatatcctctaaagtgagataaaaacataaagatcctagcccagtgcagtggtgtgcacttttaatcccagctactcagaagcctgaggcaggaggatcacctgagcccaggagtttgagaccagcctaccatatggcaagtccttctctcaaaaaacagacaaacaaaaaacccacataaatatccaatacccaaagcagtttttggtggtggtgtttctatttggtggtggtgtttctcactaaaaagtaaagtaacatgtctgtttttagattagctattttaagtttatggttaaactgtaagggtcttcattttcacaaaggaaaaatgtatttactgctgttgaaactagtttttaatgcttttacacacaaaacatttacacttttaaaactcactctaaggcatatgcaattattattattatctttttagacagagtctcactctgctgcccaggctggagtgcagtggcacgatcttggctcactgcaacctccacctccctgtgttcaagcaattctcctgcctcagcctcccgagtagctgggattacaggcatccgccaccatacccggctaatttttgtattttaagtagagacagggtttcaccgtgttggccaggctggtctcgmactcctgacctcagrtgatccacccrcctcagcctcccaaaagtgctgggattgcaggcgtgagccaccgcgcccagcctggcatatgccattttttaagtaattaactcctgattttattcaggccttttctccatttttccacagtcttaacatgtatttttttgtcacttacaaaaatccttacatgactcaattcaggaaaatctgggtttttacattggttggtttggaaaaattacgaattgaaactttattaacttcaagtttaattcggaataaatgactgttgacttccttcaaatattaagaccttaaaaaaaatcacagcgttgagagagaagaaatgactagccaactggaactggaggctggaaaaaacctagggagttacagttttcaaacttattttttacttaaaaaaaaagaaaaacattgagttaggcaatgtttgaccaagtatacatcaactcctacagatctgagatgtataatctcttcaatttaagaagataaacatacaaayataaaatcaaatattaaaaatctgtatttttgatacatctgaagttctgaaatcaaagcctcagtctgtcattactttacagtgtaaccacatacaaacgcaggcacatacaaaaatttagacatctaacagctatttggcaagccttaagaatagctggccccatttgtcagaggaaatctgttcataaatcactattcagatgttaaatggtttctgttytgttgggtttttttacagccacttgagtgtgtattataattaaatcaagcattggcagagtacaaaggcaaatgtttttgtgtgcctggaggggacggggaggttggttagtaacttggtttgatttctgttttcataaaccagatttttccagcattcctcttctgtgtcctgttgctttaccaagtatttacacaaagattgagttgtctgaatcctcattgccagtctaaaagattgaatctttaagtggcaagatccctgtaaccagggcctattcacagtttattgagataaaatgctgatgaggggtaaagagagccccttctaataggtaagaatcaccccttcttccatcctctgtctacttagaaggatccctaaaagacagcaacctagaaaaccccttgatctcctcacaggatgcattcttttcctccacaccctacctaaggttctagagtgggtcaaaaaactctaattcctaggagatttgtacttccactaacagtcagggctgtttaawgccaagaggttccaacagtaggatcagttctgtctagtgatgtcacctagacagaaatctctggacatttagaacagttctctttggagctcttgatgttttagtgacccagtttgaatctttcctaactacttgaaatcttgagttataccacaaatttcagccttattctgctttgtgtgacttgttttaacctatttttatgtaaacatgacaactctgtcagccattgctgtgtaaaaggccacctcaaaactgtagtggcttaaaactccatttattataatttacaggtctacatttcaactgggcagttctcatctccactgagctcacttacacagctgcagattgggtrgatagctctattgacctaggctgggctctcatgtctggggttcaactagctgtaggccaagtcttctcagctcttctgagttttctcttcctccaacaggccagctagggcttgttcacttggcataggccgggttccaagagagggagcaaatatgcaaggccctttgagacaagggcttggaatttgcatactgtcacttccaccacattcttttcatgaaagcaagtcactgggccaggccagattcaagaggtggggaaataaatgccaacctcatagtgggatgggacacaggaagaaaaataattgcagcagttttttcagtctacggtaacttctcttgcctaatttgaatttcccttagtcctataaaataggactcaactctagaaaatatattttgtgactggctctgatctttagtgaattgttcaacaatgtgcctcattttccttatctgtaaaagaaaggtgatattttagcaacactaattaaattcttagtttgaatctctcatttgtgctgacagagttcagcacccactactgattctgagttgagtgtctgcttatctgtttttaccacagtggctaatatagacttctctcttactgggccactttgtttttccatattcttatctttttttttttttttttttttttgagacagagtctctctctgtcgcccatgctggagtgcagtggcgcaatctcagctcacyacaacctccgcctcctgggttcaagagattctcctgcctcagcctccagagtagctggaattacaggcccatgccaccacagccagctaatttttgtatttttagttggggcttgaccatgttgaccaggctggtgtcgaactcctgacctcagatgatccacctgccttggcctcccaaagtgctgggattacggcatgaggcaccacagctggccccatattctaatctttttatcaaaattgcatatgtacattatttcagaagacattccacaaggaattaaaaaaaaaaattgttcccctgctctccctatttcctctccccaaaaacaatcasttaagcattctttcagctggttattttggtatttatctcgatatctctaaaacatttataatgccacttaaaggtctttgttttaggcattaactgttgaattctatcgaagatggaaagatggctttacttccttaacaaaatagcaacataaaattcttcctggccagctgccagtggctgacgcctgtaatcctagcactttgggaggctgaggtgggtggatcacctgaggtcaggagttcaagaccagcctggccaacagggtgaaaccctgtctctactaaaaatacaaaaattagctgggtgtggtggcacgcacctgtaatgccagctacttgggaggctgagacaggagaatcacttgaaccctggaggtggaggttgcattgagccgagatcggcaccactgcactccagcctgggtgacagagcgagattctgtctaaaaaaaaaaaattcttcttgataccttcatctgtgcccagtaccctcattatggttagtagttcaaagtctctctttcccagccccattctactgtatgtcccattccagaattgaaccaccttttgttgttcttatctaaacactgaaactaagctttctcaaagagtatttaaaaatagaaacagtaactcagatatctctctaattggtaaaatgtggtagggattttttttcttaacattaggtttcctgataattcttgtcaaaaccaggatggaatcagcaatgtacagtctcagatactcccatcctctctattaccgtgaaccttaccttggtaagaaggaacgtattagtgattgctggaaaatacagaatgccacgctagatatccaaaatttttaaagtgtgtatatcaagctaaataatacatgatgattaagagatatggctttataaaggaaccacctcatgaagtatcttcttatatgctcaggtttttagattttatcctgaagagtagtcaactgagatgtaatggattttaaacatttctgtaacagtagtctgatgaacatgatctgataggagcccagtgtatttttttattataaaaataaatgccgatggtacaaaaatagtgtgtcatcctcaagtcatctagtcccattccccagaggtaactattgttatcactttcttaagcagttcttccagaaattttctgtataccgactttcaagtatctttttgtaggcccagataacaggagcaaattaagtatttaggggtgatgtttagcatccagttagcaatgggttgttactatgtgaaaggaaggaacctatactttagtcactggggtacacacacagtcttaaatcttcagtgattgggatacacatcatttacgtggtggggatgatcactttctgaagctaggtcatttgagggtggattatttcagtgagaactccatctccaaatttgtgcgtgccattaagtagacttactggatgtcacctactggaatcttgttcatttgttttaaatattgatgaaacaatactactggtctataagaaaaccatggaccttaggcttctcttgtggttcactcagtctagcattggaactggaaaatctttccaacccttcctttagcaactcatttctgaaatcccctttggaagctttcagtgccagaaggtttaaaaacccctcagaggccttaaattcaggactcttgacttatactctaaagttgggttcttttctaacatgtgcacaagtcatttgatgataactgaaattataaagatattttctttatatgtcaaatgcatagtaatgcttataggatgctaaacatgtaaataaaggcagttctggctgggcgctgtggctcacgcctgtaatcccagcactttgggaggctgtggcgggcagatcacctgagtttgagaccagcctggccaacatggtgaaaccccatctctacttaaaatacaaaaattagccgggcatggcggcaggcacctgtaatcccagctacccaggaggctaaggcaggagaatcgcttgtaacccaggaggtggaggttgcagtgagccggtatcatgccacttgcactcccgcctgggcgaaagagcgagagtccatctcaaaaaaataataatcataaagacagttctattttaaataaggttttatccccaaacttcatttttaagttggaacctgaaatatttttttcttagaaataatactgtgacatgtagtaaggctcccagaatattacacaaaagctcatcggatccataatactgttgaagacaattttgaatggcaactgtttcagtatccactgtccccaagaaaactaagctatcacctgactctccctggcattgttcagctgttccttctcttcccagcattttctttatattacttctctaagtaatatggagattcagttctcactaaaatgatccatcctaaaatgagctaagctcagagagttaaaatcaccatcatgtaaggcaagcattacctaacttaagagacgctctgtctcaccagtactgaagatgctggaaacacaagcatgttatcttccagcattctacccagagtgctattttcacagtcttgatcaccaagtattcccattttgtgtcacccacctatactattgtattcctagtgccatagtttcttttttttttttttttttttttttgagacgacatctcgctctgtcaccaggctggagtgcagtggcacgatctcagctcactgcaacctatgcctgccgggttcaagtgattctcctgcctcagcctgcctcagctgggactacaggcatgcgcctccacacctagctaatttttgtatttttagtagagatgggttttcacgatgttggccaggatggtctcgatctcttcacctcgcgatctgcccgccttggcctcccaaagtcctgggattacaggcgtgagccacagcccccggccttgaatgaacaaattattaataagtgaatcactttacacatgctcaccttgtaagtatcttcaaataattgagaacaaactgtatcttctcgggccttgctgtaggatgggcttgctgtagtttggacgtttgtcccctaaaccttagttgaaatttgatccccactgttggaggtggggcctaatgggagatgcttcgatcatgggggtggagccttcatgaatggcttggcaccatcctggagtagtaagtgagttctccttatattaggttccatgagagttcccccgagtgctggctgtacaaaagagcctggcaccttccactttcttgcttctgctctctcaccatgtgatctctgcacaaactgactccccttcaccttctgccatgagtggaagcagcctgaagccctcaccagtggatgcttcttgtacaacctgcaggaccatgagccaagtaaatataaattagccagtctcaggtattccagtatagcagtacaaacaaagacaaggctttaatgtagctttttgtatttgagcctactaaartagatgttgttttagcctaccaacctaagttaagtgcttcaacttatatttggggatctgctgtgtctgtgattggggttattacagatggttgaacttttagaatcctattttttaatttattttgagacagtttcactctgttgcccaggctggagtgcagtggcgtgatctcggctcactgcaacctctgacaccacgcccggctaatttttatattttagtagagatggggtttcacctctgttggccaggctggtcttgaactcctgacctcaagtgatccgcctgccttgtcctcccaaagtactgggattacaggtgtgagctaccgcacctggccctattttattcatttttattttcgtagagacagggtgtcacccaggctggagtgcagtggcgtggtcatagctcactgtcccctcaaactcatgagcacaggtgaacctcctgcctcagccttcccagtagctggatctacaggtgcgcactatcacgcctggctaatttttttttattttaaatggagtctcactatgttgcccaggctggtcttgaactcctggcctcaagcaatcctctcatctcagctattttatttcaaataaagctagttctaattatcattccttttagtaggttcctcattttaccatttcaaacatcttataaatgtagatttaagtgataggcttagttttcttaatcttgctacatttttcaccacaccacttttcagattattctttaatcagaactatttcaagtagattaaaaaatactaggtgacatggacatgtgatattccaactcatgaggtatgaactgtggatgatattaacatattcataggaggaacaaaataaaaaacactgccttggtcccattcagtattgtactaacattttgggcaaaccaaggtttggatgaagaatacccaagttcaaaaagaactattatctagttctataaaaagagtgtatgtaaattatgaacaaaatgtcatgcttactaataagcttaatcttttccagtggaaaggcctgttctttgtattctcagtagatcctaatatgtccattaatagtggctgttgctgaagaaaaggactatcagaggggagagagacttttacttatccttttatacccgtctattcattctacttggttttttcctttggttttttgttttgttttgccccacagaataatccctttcataaatcaaaaaagaaaaattgttcagcatctccaaattgcctgactgtagtgggaaaacaaaatttcccactgttgtgggaaaaaaaatgtaagacatagcaccttttcttccactcatatacttacggaaaatctcccaggtgcccaatggcttattttcctaagaggacacattattgaaactcgtattacacactaaaataccaattattagtgcttgggagattaaagaggtaggtaaatggaataattaaaagtcctatttatttagcaactactatgtaccagggcagtcactggacattttttctaacacttgaataaggtactattatcccaatgaccagcaaagtaaaacgacttgtgctagaactggaattcaaatctggacctgttggactccataaccatcatctttccactatacctcaataccttttactagaaaaagtcaagacctagatgacagtagtgaatggtgaatggtcagagatatgacttattgcttatttcttatttgtctataacagtattacagtttttgctatttccattaaaaattacagatgtatttgcagttaacataacaaaagattgtcagtgttaaggttcaatatgtctatcttcatataggatactcattaacccacctgaaaacatggaagaaaccagctctaagtttcctgtttttatcaaatttgttcctcgccctttatactggtttagttcatcaacgaggtactcttgatgtcatgagtcatattcaaaaagtttgttacaacaatcccaataaatcttcagcttcaatatttataatgatgccttgccactctactccttattacaggtaataaaagatgttccactatatgctgttaagaaactgaaactgactactttaaaattccctttcagattcctggatttgaattaattggtcactgatcaaatgataaattttaaactcccacatatttattcactgatggattttaaaaaccacttgaactgtgtcaaagaaaatgttttaaataaactttttttcttttttttttttttttgagacggagtctgttctattgcccaggctggagtgcagtggcgcgatctcggctcactgcaagctccgcctcccaggttcacgccattctcctgcctcagcctcccgagtagctgggaccacaggtgcctgccaccatgcccggctaattttttctatttttagtagagatggggtttcaccgtgttagccagggtagtctcgatctcctgacctcgtgatctgcctgccctggcctcccaaagtgcggggattacaggtgtgagccaccgtgctcggccgtaaactttattattctttaaaaacaatttacttacacctaattctgatttaaatcagtataaaacaatttgtaggtatctgatagtcttcttagtaaagaaactcatgtattacttaccttactacaaatctctgtgatacatctttacacaatttgaattaatcttaaaacatggattttaggccgggcgccgtggctcacgcctgtaatcccagtactttgggaggccgaggcgggtggatcacaaggtcagaagatcgagaccatcctggctaagctgggtgaaaccccgtctctactaaaaatacaaagaattagccgggcgtggtggcaggtgcctgtagttccagctactcgggaggctgaggcaggagaatggcatgaacccaggaggcggagtttgcagtgagccgagattgcaccagtgcactccagcctgggcaacagagcaagactctgtctccaaaaaaaaaaaaaaaaaaaacatggattttagtccagatttactactggattattgccctcatcttaaactagacttctttttttttttttttagatggagttttgctcttgttgcccaggctggagtgcaatggcgtgatcttggctcactacaacctctgcctcccgggttcaagcgattctcctgcctcagcctcctgagtagctaagattacaggaatgtgccaccatgcccggctaattttgtatttttattggagacagggtttctccatgttggtcaggctgatctcgaactcccgacctcaggtgatccgcccacctcagcctccccaaagcgctgggattacaggcgtgagccaccgcacccggccttaaactagatttttaatctctttggacatcagttgtctcacctgtaaaaaattagggaatgcgactagatgatattctaatgcttgaattaagtgtttctgggaaatatactaaaattgcctcaactatgtatggcctttaaaaagacatccatttgttcctgtgctttatttcaggaagctgtattagttactaattacccagtaatggtataggggcaaaggagccggatttcctacagaaaattatataccaggctgggcgttgtggctcacgcctgtaatcctagcactttgtgaggccgaggcgggcagactgcctgagctcaggagtttgagactagcctgggccacatggtgaacccctgactctactaaaatacaaaaaaaattggccaggtgttgtggcgcatgcctgtagtcctagctactcgggaggcggaggttgcagtgagctgaggtcataccattgcactccaacctgggcgacagagcgagactcaacctaaaaataaataaataaatacataaaatctataactatttaactcagtctggctttaaacaatctggagttaatgtctcctatgcacgttcaattaatttaattacagtggttatcattttaggggaatttaacacttggaatactcctatttaactaatcattaatgccagtaattaatatacagtttagaaaaatggagatcctagcaaaaaccacaggctaaaaggaagacatcaagtatcctttcaacttgaggattccctactatatgtatatgtggctgaaaaagggacattcactctccrtgctcacattagggataatactgaggagaacaggaatcctagatgtaccaagatgttctttatacttaactgtagtcagttgatgtcttaggctttgaatagttcaccaagttctccacaccttttcaaagcacacaagagaggaaagtctgatgcctattttgcatcagacttggaagtagagagcaacatctgtcccttgattaacatccaaataagtaatggctttactgtggcatagaaagactagagtaggccggcagctttttctgaggaatttctgcttccctttgaaasaagaccttcatttccaataaataaatcactattaggtcttgtgtacatttaatttttatgcatttcataaataaacctcctgcataattactaactccatttctaactggaaattttaaatgtttgtatcagtgaggtttaatttttcctaaggcaattataaacatggctttttgcatgacctaagtaactggcttaaattgtcataactggtattagaaatgaatccatcttttttatactctaatcttttttttgttttgagacagactcttgctctgtcgcccaggctggagtgcagtggcrtatgatctcagctcactgcaacctccgtcttctgggttcaagaaattgtcctgcctcagcctcttgagtagctggaactacaggcacataccaccatgcccggctaatttttgtacttttagtagatacagggtttcaccatgttggccaggctggtcttgaactcctgacctccagtgatccacatgccttggcctcccaaagttctgggattacaggcataagccactgcacccggcctactctagtctttctatgccacaataaaaccattacttatttggatgttaatcagtggacatatgttgctctctacttctcaatcatcttaaataaaaaaaaaaaacacttcaaacttgccatgtggctgggcgtggtggctcacacctgtaatcccagcactttggaaggctgaggcgggtggatcacctgaggttaggagttcaggaccagcctggccaacatggkgaaaccccatctctactaaaaaaatacaaaaatcagccaggcgtggttggcgggcgcctgtaatcccagctacttgggaggctgagacaggagaattgctgggaggtggaggttgcagtgagctgagattgcgccattgcactccagcctgggtgacgagagcgaaactcttgtcttcaaaaaaaaaaaacttgccatataagtatgtgatccatcccctatcagagcagaaagggaagagagaaagaatcctttctgattatgatcacagtttcctactttatcaaatacacctatggagaattactctcctattaacaagttaacttacctggtcctgaggaccatttatgtttccggaacagaataccaatgctacagaatgttgagtccccctactgacctacttccctccttgaaatggacttctatgcactagtttgggcttataggttatactgctgctgctgcataggtacatggtataagaatcatgttttttttatctttgagaaaatgagttaaaggcttgcttcttcacttaactgcaacacagtttacagattcagatttcacattttgctaagtataaatgacatatcttaagactaatgaaaactttcatgttttacttgtatttattatggtaactttycttttcatagccatgttcactgcccacttcccatgagatttctccagtgcccgccagacctgactggaaaaagtcattatcttgatgaagcagatgtattttacctaaatcccttaaactggttacatagagagtttcatgatgatgcatcattgcctactcacttgatcaccttcrgcattttggaagaggtaagtaaacatgaaaaagaggaaaactcagtattttaattttaccccagstttaggaaaccctcaggtaaatagataatataacctttttatggtctgtttcaacccacatttcataattagtcttttctccagtcaaaattagccccagttctgtaactatcaaagtattttacttcctataagttaattcttttattaagcaaaaagttgtagacagcaattagaataggcaattctaaaattgactgaaacagtactcagcaaaatgtagcctttatttactyaaacatttatttgcttctaggaaataagygctttcctaatttcaagcaattataaaagaactgctgttttcttccacactcacttgccagagggtcgaattggaagtcacatatatgtctatgaacggaagttaaaagggaaattcaacatgamgatgaaattctgaactttcctagataaattaacattgctgggtggaaatattcagatgctgcttaaatacttcggtaaacactgggtaagattcatggaacttagaaaaaagctgtatgaactgctttaccaaatatcactactgaggaaatgtataaaataccacatrgtataaaattacatgttaatacaatgccagattttaaataaagacctttagttttcctcatggtgtagttttattgtttcttccacgatattcagatgtgcaaaaaatttcacaagaaaacaagtcagcaagctcttaagagggcagcaaattcttcacaagtcagagggctcttgaacccacaaaaagacaagaagtgagtgtaagattataaaatgttaatgatgaaattccagaacaatgtacttttctcaagctctgctgcaaatttaacacaaacatcagtgttaattacactttgtcatgtatgactgagcttgctttaagctcttacactgaaaggaagtctcatttcatgcacaaaatctgttgcatgcctggcttccttaataaaactacagttgaacatttccagtgtcaaaaaaaattcaacgaagctaaactacaggaaaatgcaggttagtagacttttaactaatgcttctgaggaataatataaagttatcaaactgatacttagaaacaaaagaaaagacattgtcatcttggtaatttcattagtttcaataccaaacattatacaaagcataaatttttctcttacagttgtctaatttaactcaattgtgaatcagtattgaggatcaaaaggtaattgccccaattctatttcaagatttgccatttgtcttccattagtgcgaccatatttatgccatttaccttcccttttataaggctgtggctgaaggtgcttctgctcttgttttcgatgcctggagttttcaatatttaccatacgttgctttttatcaggtcgactgaaagcagtaaacacatttttcatctatgttagagttcaatgtatttaaatttaaaacaattttaaatgttttctccattaatctatgatctgaacactgataaaagatattaaatatctgaattacaatcctagtatatccatataaaaataaaggagtctgtattagtttttttgtcctatagaaagaaaaaatagacaataactctactggcaaaaaagggaaacactcaaaagataacaaagaaaagaaatgtgacaataaaataatgagatgtgtttccattatttttcctcctttcctataaaaatcagtccctccccgctggctttatcactcagcagaaatacatacacatctctcacaaacaaagcaaaacaaaagtctcaactttttcttacagcaaaagctcacaacacctacaccgctttccttaatgtctatgatcaggcttccgtcactacttcactggaagtccatactgtcatcccctggccgcccagtttccaagccaagaaaacattttccgcacatcaactttttaaaaagcatgacacatttattccttttacttgagatggcttttggattttcaaggtaccactccccactcctgtccttagccttccctacaaccccatggatgttggtgttctcccaggagtctgataaatatacagtctcggcaaaagagatgaccatagaactaactgccaactaaccctctccacttgaatgtcagtagttacctccaaacacaattctcatctccaattacccttgccccaaaccttgaattccctatctcagtggtactactatccaacaacagatgacccaacccagaaatctagaagtcactgttactttctacttctccttcacaagaaatatcaatgttactattttccaaatgttttttcctttcctctcctactagtatagtcccagtttagatgttcatcagctcatgtctgtattatattgaccaccttctagcttcatacctttcccatcaatcctctaggctgctaccaatacattagtcccaccgtatccacggctttactttctgtgattgaggtttccgttacctgtggtcaactgtggtctgaaaatgttaaatagaaaatttcagaaataattcatcagttttaggcggggtacagtggctcacgactgtaatcccagcactttgggaggtagacatgtgtggatcacttgaggtcaggatttcaagaacagcctggccaacatggtgaaaccccatctctactaaaaatatgaaaattagccgggtgtggtggcacgtgcctatagtcccagctacttgggagactagggaggagaatcacctgaacccaggagacagaggttgcagtgagctgagatcgtgtcactgcactccagcctggctgacaaagcaagattccatctcaaataattaaaaaaaaataattcataagttttcaattatatgcctgttctgagtaatgtaatgaaataatgcagttctgctccatcccacatgggatgtgaatcatccttttcttgtgtatttacactacccacccattaatcacctagtagcagtctgttaatcagatatactgttatcctaccacagtgtttgtgttcaagtatccctaagataaggattaaggatgattaagtaacttaataatgaccccaaaatacaacagtgatgctggcatttggatatgccaaagagaagctataaagcgcctcctttaagtgaaagggtgaaggttctcaagagaaataaaagtatgctgagattggtaagatctatagtaagaacaaacctatgtgtgagattgtaaagaaggaaaaagaaattcatgcatagtatatatagaattatgttctatccctggtttccagcatccactgggggtcttggaacatatatcctgaagataaggggggactactgtaatctaaaatacaatataatcttatcccacccgccttgaaaattcttcagaagttctccatgtcctacaggacaaaacctttagcataaaatggggcccttcatggtctgcatctcttatcctccagctctaccctgcttccttaaagcagtgtatcttcacatctccaaatgaccttccttttaagtgaaattcccttccctgtctgcatagcaaatcctcatttctcttccaaaagctactttaaaaactaagttcagttcaaaggccacctcactcaagaagcctttccaaacacctccagacagcctgaggccaccatgccccataccttaatttcatttatttacttagcttgtgagctcctttgaagcaaaaatttttcacttgtctcctcaaggcagcttcacctttgttcattataggactagataccagcttaatgactaaagacaccagaatcagtctcattattttatagacacattatatttattcagaaagattaagtatttcaaaggtaaaaaatgaagctaacatttgaagattaggtaagtttcatgttacagaatataaagatgaaaatggataaaaaattattatgaagtacacacattagaatttgacttgcttagtttgcctctttgtgcctctacctttatcaaagataattatgtgactaagtatcataactaagctggtacatggaatggacaagtgaaaataggtgggacattagaattattatatatgagctcttctgacttcagagtaaaatttgtgttgctcattcctagcttccaaaagtgaataaatacataaaagattaaaggaaaataatttcacttaaggtgatcttttcatataaactataatgaaaagaaacaaacttggccaaagtaggattttatatattcttaactgatttttaagataaaaattaaaccatttgctcaagtcaaagtgatcacgttataatgaaatgttccatttgtaacagctaataatttttagactccatctttcaatttattctgaattctctcagtggccataaagcacaactcttagaaacggtaaccttacaagaaactcatcaaatcataaaaatgctatccaatctacaaatgttacaaactactgtaatgacacggttttatgtaaaccgacctgggtccatatggaggggaaaaagtgtgaccaaagaagtgtctatatatatattcatccaacttctcaaatactccatcattatctacttcatattccttcatgtttctaagataatctttaacatcattaacaaagtcagtgaagagcttctgatcatgtataaagacaccgtttaggaaaaacttattgatgaactgatcaagttcgttccagygacaaaaagtatccagttcttttaacatgtacctttgaattatctgtctaaattcatccatccttataggattcaccactgtgttaaaaaggctcatggactcttgttgagcacaatcaaatacaccagaacaagcctttctgaaagaatgagaattttctctacaatcatgcccaggactgcatttctttgaatttgtattttttctgaattctttaaagtgaactggcttttctttccttccatcwttttgcatagtagggcctctattatgatggttttctgtaggtgccttatactgtggatgtaaatagtcactaaaaactgttcttggtttttcagctgcttcttttgtagcayyaaatcttttattacccttttcatcaaagatattcttggtggtatctttaaagtgtctgaaagtggatttaactgaatctgagaattttttcagattttccttcacakcttctttagcctgcttaattttctctttatgatgccttacaaactccttggtagaattcttcatggcatcaaatgtttccttaactgaacccaaaaatgtttcctttgacttatttttarccctgtggcttcctctgccccctttcttttttccatctgttccttgttttccattttgatcttttgcctcaacatacaatctttcccacaaatcagaacgctgctgttcgaaggttagcttccgttccagctcagtgagtctttcccgtaagattgctatttcctttttttcagtatatacattgggagaatctgacttgccatgtaactgactaccacttaactgctggagttccccccttaaagccgtagttactagtcgttctctctccagttctctctttagcatctttgcttctgtcarcagagtctccctttgactaagaaagctgtgttttttctgcttttcctcttccaaatgctgcttaagtttctgattttctttaactaattcagtacttgtccctttatcttccaatattctaatctgttctcttagtttgtttaactcttcctgtaatgaggataaggctttttcttccttctccarggatactcttaaatactgattttctgtagcaaggttcgttttctgagtttcaaaggacatcttctctgcttcagtaagtgtccaacaccttgcaagattttctttcaatgactacatttttttttgaaagagaagaaataaaatgtcaaatgctttaaaagctgaatttaaatcttcaagatataataccccataagcttttgtgtctttacttctacagatacaaccccccgggtagtattttcaatagtataaacattgggaaatacaaggttcatatgcaagaaaacgcagagcagagagctacatcaaattgagaactacagcatggtgtaagaatttttttttttttgagatggagtctcactctgtcgtccagactagagtgcagtggcgcaatctcggctcactataacctctgcctcttgagttcaagcgactctccagcctcccaaagtgctggcattataggcatgaaccaccgcgcctggctggaagaatttaaaagacagaaagttagctagagcttgcaggactaaaggcttttctgaatcaggaaaagagattaccttttataaaaggtaaaattattagctgggcgcggtggctcatgcctgtaatcccagcactttgggaggctgaggtgggtggatcacgagatcaagagatcaagaccatcctggcctacgtggtgaaaccccatctctactaaaaatacaaaaattagctgggcatggtggcatgcacctgtagtcccagctacttgggaggatgaggcaggggaatcgcttgaacccgggaggcgaatgttgcagtgagccgagatcgcaccactgcactccagcctggcgacagagcgagactctgtctcaaaaaaaaaacaaataaaaaataaaagtaaaattacatcgagagctgacttacggcttcaaaaattgtttgtactcagtgtacccttcaaaggatgaaattctaacaatcttagtcctatttgaaacattttagtcctatgcaattaacatttctaagtaagtacagataagccataaattctataaccatgttagaagacagactgaatcttgaacatttataactaacttatccaattttatggtaaatttttgaagttctgtaatctgtacagattaatataactctgaagattaatctatagattactataactgaaagtcagcacccgtggtagaaatcatggtcaattcggcttatagaattttactgcttcaataagggtatccttgactgatttgaattttcttttacacatatgcattagtaacaaaatctaaccaaaaacagtcaaaacttaaacaatatggttcaacaggttctta

SEQ ID NO: 95928 - DNA, 178723 bp, Homo sapiens
aggaaatctgcaaatattaacatcctatgaaataacccctgtccaatagggaatggaaactaacgaataaatactcccttcttggtagaacaattctgaggtacattctatatgactcctgaagggtccttagtgatatcgagcccaaatcaggttaatcatgtaaaggaaactaaaaaatttacaaaatcactgcatgggtcttatgccattccttgttttactcttttcagtccctcactcatgtttcctaggctcagtcgcgttccgataaatgtttaataactgcctctccaggaaaataaaatgatcttggtttgtagtgtttgcctatttctgtgatataaatacaccataatttcaagctaccaacatgacatcaccaaatctgcagttggatagaggtgtacacaattgtaccttggatgccagtatgagttgagtccagcacactactgcttgggagtgtgtctcaaaaaaaattactgcatgcaaacatttgtctcagaagatatagggtgaaacaaaaaaagacaaaaagctaccagtctgagccaattaccagacaatgatgggtgtaccgacattagccatggataccaataagaagagaaaaaaaatcttaggtagaagaggaaagaatttcaattgtataacaaactggtgataggaagaagttgtaggaatgggcagggggtatgaattttagaatactcagaagtctctagcctttgcaactagatagacaataatgctatttccagagacacagaatacaggattataatgagttcattttgggatctatttagtttgagacttttttcatgataccaagaaagagacagttagtgggaaatacaggtctgaagcttaggtaagagataagggtgtggaagctatagcaaggtattgtgaaattttattgttgataactacttatattcctggaatatcctgccgcccttcctctggctccagtcagacagcagtgaggttttctgattactgccctcaggctagaactgttactacagaaatgaaaagagaaagataagtcaatgctcagcttataagttttaaaatagagctttgaaactcctggtagaaaaaaatatgttgacactgggtatgatggcacatgcctgtaatcccagcactttaggaggccaaggcaggcagatcacttgaggccaggtgttcaaaaccagcctagccaacatggtgaaacgctatctctactaaaaatagaaaaattagccaggcatggtggcacataccagtaatcccagctactcaggagactgaggcaagagaatcacctgaacccaggaggcagaggttacagtgagccaagatagcaccactgcactccaaacctgggattataggcgtaagccaccgtgcccagccataacaaatctctttatatatctgcatcctattggttctgtttctctagggaaccataatacagggtctttaatctgtcagtctggaacagttcctccaactttcttgacttctatgtccttgacacttttgaagattacagggcagatattttgtagtacgttccttaaattggatttgttttctcatgattagatccaagttatggaggaaaagcaatgggttgcaagattttggtttatcaaatgttcactttgatcatttgattaaggtggtatatttcagccttttaatctatgtaactaagtactttctggaaatatatgttgaaccctgtaaaaatctcatttttcattgaactttgaatgtactcatttattataatttatatctgtaatgaacwcatggtaccagaattattcattggattataatctgttgctatcataatttattttagtgctcaagttaggccatctttggccagtgggagcttttttcaggttggttcctgtgtccttttattctgtctccatcattactttcattattttctgggataacaagatgtttcaggctcaacttttatttgccttgtcctagtcctggaatcagccatttttccaaggagccctggtttcttttagtaaaaagttaaaatatggatgcaagatatgctcattgcttttggggtgtcattgttcccaggccctcttagaatacaaatgtagaaaatatttgtgtgtgtgtgtgtgtgtgtgtgtgtgtgtgtgtgtatgcagcagaggtttacatctacatttatttatatactatatatatatgttaaaaacttttgagttcatatcaacaccaccaatttcattataacaacacaagactcattcaagttttctctttccattcttgtaacttcttcaacagtgactaatgtggttctcattatcattcatatattcacttattggatcacttgtctctacaagtaactaatttcccatttctgccatcaccagtccaccaagcaaacccttccttgaacacacctgggtcccactgccttgcacctggccgtctttctcactacctcccaccccttgtggggtgaggagggcattttaaaagatgaccatgatacctgaactctcttctttactccttcctctgccttgtaacctggaacatagacgtaatgattgaagcttgagccactctctggactatgaggataagggtcacacctacaaacatcagagcagtgagctgtgaagtgcctgaatttctgaccctttggcagagcaaactagccatattaaccctgccctgcccactgtctagacttttacatgacagccatataacatgaatctttaaatcttattagtttaggtaacagccaaatgtaattctacttgataaagatgtccacagctagaggccagcgggaacacagatacatctactaattccaggagggagtgatgagaacctttatcaccaagatgagggagcacaacagcctgttagaagtcagaatccagcttagcaaaaagagggtcaggcaagaccaatgaattgattgggactatgtattctactactggaggcagaaacttagttcatttcagaaaatcaaataaacatttcttgcactactgagctctggatctgagatgggctctatgaagaaagtagctgaaactatggtaatggcaatggcaatggatgaggtccagggagtttccagtggaagaaaaaatgaaccttaaaaatctcaaacattaactattagaaaggaagcagccaggggatattaagagtaagagagaattaaaggagaacttctgaacaagacttttttatatcccttagggaattaattaccaacattaaagtgcatttcgtatcattacctttcatattgttacattccacatccaattttgatcccagggggtgatattttaaaaactagaaacaatttctgcatcacagtgaaatctataggcagagttaaagaggtttacgtatacagactactagaaagtctagaccaggtttactggttttcattcatttcttgcttcttaatcagtttggaggctcatgtaaaggcagatttgaagggagaaaagactcaagaacaagagatagaaggggtgatgctattggaggttgctagaattgcctggattttggcttgggatgatccctagcacaggtatgaggcacagaatcaattgttatgcaccatgtcacattcttcacacgtgcctcacatggttatacacacactcaaaccaaatcaacatgaacctaattgaaggcagcctaggtagacaaaacgccttcatgagagttctgcgcagttgagtgatatgtagaggagttcttcattctaaacagctttctcagtggtggttggttattggaccaccagctgatatcaccatcccgatttgagcttcctttaatttcaggtgcccctcctagctgttgaccgggatacaataattactctagttcatcttgtattggtagctgtttaattcttcatgatttcatattcggaaagacagaataagaaatcatgagtcaaatcagtggtctttagaagtatcatcactaatacctattggatacatcaaatggccaatttgctttactttataatcccttggggatttactgatttttttttttttaattaccagttttaggctgtgtatacttctcatatattcattaaattttagtagcagtaacggaagctgtttttacacgtttgtaattgtgccctgaaatgacactgaattaacttaaattcaaatgacttaactaacttaaaattaaacataaaaatgtgtatcatgagagatgagggaaatattcgcaaaatagaagggcacacaatattttcagattattttattcttaacccacaaatcccacagatatgtgacaacttaaaaaacaaattaatgctctcatggctttttcgatttaggtaagccaacaattcctgaccattctgtaattttgtagtcatgtttgattaagtgccatctctttccccctaatacggataaaatctgaattgtgtattaacagaattttgatacatattatatgaatgaaatggatcctaccaatcataaagtacgacaattgaggtggagtcttgttctgtcgcccaggctggagtgcaacggcgcaatcttggctcactgtaacctcctcctcccaagctcaagcgattcccttgcctcagccacccaagcagctgggactccaggcgcccgccaccacgcccagctaatttttgtgtttttagtagagacagggttttactatgttggccaggttgggctcgaactcctgacctaaggtgattcaccgccttaggtttcccaaagtgctgggattacaggcgtgagccaccgcgcccggccaagtacgagaaaaatcttaygtaacaaaccagtaatatgggctatagccttgttcccacgtagcatcttaaactgttaaaaataaatcagagttattctgaaatcattgaggaaaataaaaattagattttgagattgcagaattctgcaaatttctgcaaatgtataaaaacaacatgatataaattgtggcctgggtgttcataattctccccagactcttttatggatgccttatttggtggaggtcttcctgtaattatggaattataaagcccatcagacaggaatattaaaaagcatgattattccataaccttattccacaggaggagttattccacaggaggagttattctacaggaggtcctagttcactttatttttccctcttcgtcactgccttctggtggtgctgcggatcaacgcccagctaaagcaggtttagagggtcagcctggagattggattgttactggtgggatttaaagatggacagaccataggacaacaaatagcttaggaactggcactgtttacaaatcctagggagagaatttcagatcccgagtccaagactgctgcgatccctccaggcctccccatttgctgccacgctcaggctttccctggcggtccccaggtccagcttcttatgggaatgacacccttaaccgacaagaaagcgctatgattttccgtttgggatttaagcggggattaagctcacggattcccaggcgtctagtcagaggccgaactctgggtcggatctcagcgagacttgttgctgaggaacactgcagcttggcttcccggcgcttcccggcgctccctggctccccggcgggcccgtcaaccacccacctcccgggaagggaccgagggcgcgccccgccacgcgcgctccccacgccatggtccccgccgcgcgcgctcatcccacccgagccccgccgcacgccctccccactccccgagccccgccacgcgcgcccccgcccagccccaggagcgcgcgccgccggccttttcccgccgcgctgccgggtgccgctagtgcccgctcgccgcgggaggcgctgctgtcgctgagggagcgcctcctcctcttcctccaactcttccccgcctcctcccgcttctcctcctcctcctccacagttgcctgccctgggcgggggcgagcgcgtccggtttgctggaagcgttcggaaatggcaacttgcgcggtggaggtgttcgggctcctggaggacgaggtgcggggaccgcggggctgcggggcgggcttcccttcgggttattcagcagccggacccggggaggtagcggcggcggccacgaccggaggctctgctgtcagcccctcctccctcggcgcgagcctggggagcgcgcgaggcgccgcggggactgtgggggcggctcggcgcgcgggcgctgggggctcgctggagggagcaagcttgtcgggtccacacccgccccttcccggagcggccgccgccttacttgtcagtttccttcaggaagtgttgaggagggggctaggcggtcggcgggggacccacatcaccgcgccagccccttcctgccacccccgccgggtgtgcggagctcccaggcgttgggagacggtcgcagcatccccgctgttgatttgcttgctctggcggaggccgggccgacttaactttacggacttcggtctggagagttccaagtgaattgtcattcgctggtttgtttttttcttctttatctgaaatcctttttaatcccctaactagagacagggatgggagagcaggaacataaattttcctcctcctctttagcaacaagtgtctagtgtgagaagttcatgctttatttcaccggtcgtcgttgatgttaaaaagtgaagccaaaaaagtataaatactttataaagaagttaccacatctgttccctttgaaaactagattaagctctgggatttgaagaaggcaaagctgtttsttttcagctaaataactaatgctgattatgcctatgcttattaaaaatattgtacgaccatttggaaaggttgttccgtcgtaaatgatatgtggcttctgtgtgttcttggagattgtctcaaaaatgcaaatgggtgggagatgaaaaggctgcatgtagtctaacagtgactggttccgagtgaaaaaaatcaaattttttgctttcttgttggctgactaagctgccacatgtaccttttatcaagatgagacccagttaactgaaaatccatcaacctaayttatactgcttgcttaagtattgtaatatttaagttgtatagttccttctcttagtaccttggtgtcgtcaaacattttacacttctcttgagagttctttgtttataaagggtgggcaatttgttaatgcagttatttcaggatattttgagaatgcttacgtgatgcgattagaatttaatttcctagctattgctgccagaagagaaataaagtgatgatggacaaatggtggcggctcatagtccctcagaaacaatagtcaatgtgttacagctaaagatatcattctagctaatggcacctttattctgtagacgagatcagaagataatacagcacttcacctgtggtcgctttcttatcagtcagatttccctgcttgctacgtagactgcccagtgcagttgacttcaaggtggtgtccaacccaatcaggctgaccttggactttctttccctgctatattcacaggtaggccctgctaattgcagatttctcatctcaccgccttccagcagagccagttgatcttaaagaaaatagtgccaaaggtatcattcaccatctgttttctccctcttggtacatgatcagtgtttttaattatctactttagtaatttctctgttttcaatcatcacccctctgcccagctgaaataaaactaattgtggcagttaatgggtggtcggtaaggaactggggccaaaggccagaaactccaccctttgaaatgtggatttcctgaacttgctgaaggatttgtacttctaggaagtttcatggactgtggcctatcccattcacattctgggagttctggctgtcagttccatgactctaatttgcttctgtccccgctctattttgtccacattgaggaagggagtgagataggaagataagagacatgatgatgaagagtcttccacttcttccattgtaattggattattcattcaacagacattcatttactgtttgctctgtaccatgcattgtgctaggcaccagggatagagagggaaaaaagacagtctcagcctcggactgagggaaagataaaagtcactttttttcttgtggaggttgccctctccactatcatttgccatttattttctggtctatcacaaaagtaaaagaaggattgaaaccacactcccccatcctccccacccccaaacaccccttttgttaaaggaagaaagcattgcagctatgtcacttctaaaactcacagactagtctggaaataggcagccctctgctgttgattaaaagtaaagtgctttttcattacaacaaaaggagaggattcttattttaaatttgaaactaaaacagggagaaaaataatttgaaatgggatagaagatagtgaaagaattgtaatttaatcagtatatagtgaatagtcgctgagtcagtgtctgagcatattagcactgaagtatgctaaaatgtagatcataatacctttctctcacttttcagtgagttttggctcttcttccacatataagtgacttatagtaagagatcaccctggctgcatgtgcaggattttacctttaaagtgttaacaaacaaaggaggaagtgtagtataatttataccagatttgctctggtcacttgagattcacagtagagaataacatgcactgatctttattggagagcagtgtggtggatgcggggactggaattgagcatcacttcccacctccttcccatgcacctccctgtgatatggaggtgggaaaactaaacactgtttcccacactccattgaaattaatggactggatccaaagtaggctccccagttaagtgcacttacttgagatttgcagagtggaaatgaggtggagcatattgttttgtttctttggctttttctgctgataagcacagtcatgtaaacatctaaattttctgcgaaagtattccagtatctggtaacttgctttgtacatattgataggaagtcaccgaagtagtggtggtagtggcttccagacgtcaagattgattatattcttgaagtcatcagttctggtgatgactcctgatcatctacctttctgactgggagaggtagtagcttcctggatgggtcagttctgccatgtttctgatcttctagaactgcagtccccaactgttttggcaccagggaccggtttcatggaagatagtttttccatggaccggggatgcggtccagtggtttcaggatgattcaagcacattacatgtatggtgcactctacttctattatkattacattgtgatatgtaatgaagtaattatacagctcaccgtaatgtagaattagtgggagccctgagcttgttttcctgcaactagatggtcccaagtgtgggtgacggtaatgggagacagggagacagtgacaaatcatcaggcattagattcttataaggggtacacaacctagatcgcttgcatggacagttcacaatagggttcatgctcttatgagaatctaatgccgctgctgatctgacaggcagcagagctcmggaggtaatgtgatcggtgaggagtggctgtaaatacagatgaagctttgctcactggcctgccactcacctcctgctgtgtggctggttcctaaggttggggacccctgctctagaagtccagcctagcacctactcttccagctcttccaaaaattttgtaagcatctaatcccctgtattagcttctttcttcttaaagcatctagaatgatttctgtttcctataagaaaggctgactgaagcaaggaaaagaaggaaggaaataaagaggaaagagttcagagtctccgctatcggtatggagagtgcagtttgcacatacagaataatagatgcccctggtggcagcagccacaacagtgcataagtagcagggtaagaagggcatattctgatacttctggacccactaaggctgagcagaaactgacccttactcagtctgggaacaaacttcccaaacctttatgtactacacacaaaggaggagaagcataggttaagcagcagctgtattagtaatttctcccaatctttcatgtattgtttttgccattagtgcttttttgcaactctttaattccaggatcattgtaaagtatttttcatggagcagggactaaagaagtgaataaatatagtgtatttttaaaataatttatttttaaattatgtatttacttttgagacggagtcttgctctgtcacacaggctggagtgcaatggcrtgatctcagctcactrcaccctctgcctaccaggttcyagcgattttcctgcatcaccctccagggtagctgggattataggcacgcaccaccacgcccagctaatttttgtatttttggtagagatggggttttaccatgttggccaggctggtctcgaactcctgacctcagatgatccgcctgcctcggccttccaaagtgctgggattataggcgtgaggcaccgcgcccgtcctattttaaaattattttaaaccatcagaaaagttgaaagtacaacacaaagagctccagtattcttctcatacagattctgcaactgttaaccttttcactgcaattgttccatcacctktttttgccattttcattaatctttttctgaaccacttgagagcaagctgcagacacaatgccccatcatctttaaatactctagtgtgtatttttctaaaacaagaatactttcctgcataacaaccatacccccttccaagctaggaaatggacactgatacaacaatgccattcaatccacagataccatccaaattttgataaatgttactaataatttctctttttccttttctggtctaagaacctatctgggaacatatattgcttttacgtggcatgtctttgcagtctcttctaatctgtaacatttcctcagtttttctttttttttttttttttttaatttttttttttattatactctaagttttagtgtacatgtgcacattgcgcaggttagttacatatgtatacatgtgccatgctggtgtgctgcacccactaacgtgtcatctagcattaggtatatctcccaatgctatccctcccccctcccccgaccccaccacagtccccagagtgtgatattccccttcctgtgtccaagtgatctcattgttcaattcccacctatgagtgagaatatgcggtgtttggttttttgttcttgcgatagtttactgagaatgatggtttccaatttcatccatgtccctacaaaggacatgaactcatcattttttatggctgcatagtattccatggtgtatatgtgccacattttcttaatccagtctatcattgttggacatttgggttggttccaagtctttgctattgtgaatagtgccgcaataaacatacgtgtgcaatgactttcttcacagaattggaaaaaactactttaaagttcatatggaaccaaaaaagagcccgcatcgccaagtcaatcctaagccaaaagaacaaagctggaggcatcacactacctgacttcaaactatactacaaggctacagtaaccaaaacagcatggtactggtaccaaaacagagatatagatcaatggaacagaacagagccctcagaaataatgccacatatctacaactatctgatctttgacaaacctgagaaaaacaagcaatggggaaaggattccctatttaataaatggtgctgggaaaactggctagccatatgtagaaagctgaaactggatcccttccttacaccttatacaaaaatcaattcaagatggattaaagatttaaacgttagacctaaaaccataaaaaccctagaagaaaacctaggcattaccattcaggacataggcgtgggcaaggacttcatgtccaaaacaccaaaagcaatggcaacaaaagccaaaattgacaaatgggatctaattaaactaaagagcttctgcacagcaaaagaaactaccatcagagtgaacaggcaacctacaacatgggagaaaattttcgcaacctactcatctgacaaagggctaatatccagaatctacaatgaactcaaacaaatttacaagaaaaaaacaaacaaccccatcaaaaagtgggcgaaggacatgaacagacacttctcaaaagaagacatttatgcagccaaaaaacacatgaagaaatgctcatcatcactggccatcagagaaatgcaaatcaaaaccactatgagatatcatctcacaccagttagaatggcaatcattaaaaagtcaggaaacaacaggtgctggagaggatgtggagaaataggaacacttttacactgttggtgggactgtaaactagttcaaccattgtggaagtcagtgtggcgattcctcagggatctagaactagaaataccatttgacccagccatcccattactgggtatatacccaaaggactataaatcatgctgctataaagacacatgcacagtttttcttatcctagacagttttaagaaggacaggccttggccgggcgcggtggctcacgcctgtaatcccagcactttgggaggccgagacgggtggatcacgaggtcgggagattgagactatcctggctaacatggtgaaaccccatctccactaaaaatacaaaaaaaaaaaattagccgggtgtggtggtgggtgcctgtagtcccagctactcgggaggctgaggccggagaatggcgtgaacctgggaggcagagcttgcaatgagtcaagatcatgccactgcactccagcctcggcgacggagcgagactccgtctcacaaaaaaaaaaaaaaaaaaaaaaaaagcaaggacaggccttacatcctacgatgtttctcattttgggtctgtttgggtctgtttagtgtttcttgatgaccatgttcaggtcacgctctcttggcaggaatcataraaatgatgctgtgttcttcgcatgcatcacaccaggggacacatgatgctgacttgtcccaacactgtcagtgaccttaatcacttggtcaccttggtgtctgccaggtttcttctctgtaatgtcaccttttttctctttataattgatagtattttcaggggacatatygtaagattatgccaatatcctatttctcgtcaagtcttcatcctcagttttagcatccattgatgaattctatctgaaccaaacaccactattttgttttatttccatctctgttagttggcattctatgtaagaagagctttccttttcctgtcatttatttatatcagcatagacttgtaaaatcccactttattcagcaggttgtaatcagttactgtcattaaatattttattgctcatactgtcccagtttgtccagtgggagccctttcaaggaggttcctaggtcttcgtaacaagtccccatcattctttgaacactttctggcagaagttgttccaggcttctcttgtattttgcttggctcagctatctacaatcagccattttccctagaagcactggtcctatttagtataaaatggtttttacatgctacaatttgggtacttggtgtgctcattgttactgggatatactcttggaccatctctgaacagttaagcgtgtgtgtgtgtgtgtgtgtgtgtgtgkgtatgtgtactctacacacatatataagtatacacaaagatctatagctatttctatatcaatctgtaaatacataaatttaaaaatcatgaattcatactgattttttccaattcaaacctaatacctgagttcctttatagccataagtaccttttctaacagtgaaaaaatttgacttttattatccttaatatatttgttcattgacttatgtgttcagtgtaactaacttcctgaccacgcagacatctcctctgccacttcagctcttcacatccttggatgccagtgggaatattgctattctctatgcagcatccctgtgcaacgccgtcctcccctcctcagtacccttgccagtgggcacccttctgatgcatctctgtatggtatctccctcctcccctcagtgccccgtgctggcgagcatgccaaccatgcacctctgtgaaattcaccctcactccacagacattttctgtagtggcctgtgattgactgctctgcgccmggaacagaaaaggagaaggaactataatttcttttataggtaattrggaattcatatatcacataggagtagaatctttgagctggaagagaccttgtaaataaatcatttagggtgagcaggggtatagaaaatgggattcttttgtgttggaattctggccctgtcacttacttggtgaatcttgcataattaaacatcagtcagagcaggatatttaagtctgctgattctcccatccccttgctgtctcagaaatattctatagcatttggagacatgcaggaaccagttgaacacaattgcttctcaatctatcatggttatctactccagagctgaatctttaagtcagatagctgatttgaattgctgaacccattgttctgctgaattctgtggcaattgatgttacttcttctttaggacttctatttcttctggcctccttgccaatagtatcaaagtttaagaggataaatgaatggggaggggataggagaagtctggagataaatgcagggagaaaggcacagcacaaacaaaaagcattttgataaggcttttctgaaagttgagtaaatatgtctgtagcccattattataactcatggctggactcaaatgtctggcttcaactgatgcgagacatgttggggcaatgaagagagtaatatgaacaaacaatcatggccgtcaataaagatgctttagtgaaagtattctcctttgggaaaaagagtcaacctaaataaatarcaactgcctttaactgaatacccactctgtgccaggcaccaggttagattttttcatactttagctgtaatcatcacaacattattgcagaagtaggaagtattacccccattttagagataaggaatatgagattctgatttgttcaagaaccttctcccagtagggagaagtgttatattcataacaaacacttggtccttccactttcctgctactaatacrcaaataaaataatttaacagaagagactttttctcaggaatatgatgaatgtgaatggaatgtgtgcaaaattaacttgtaattgttatgctctcatttccacatcttctgtcttttcttgataaagcttttaggtggacctctgaagtacttgatttctgtatttgcttaacaaatatttgatgaacactatgtatcaggcacgtgggtcagggcatgaggtataatgatatagaatatactttaccgattttatagccaagagggagagagaaacattaaataaattatcacacatcaatattttataagtgttattaaggaaaacagtgtaagatgaaagtatttataacaggctgggcgcagtggctcacrcctgtaatcccagcactttcggaggctgagatgggtggatcacttgaggtcaggagttcgagaccagcctggccaacatggtgaaaccctgtctctaccaaaaatacaaaaattagccaggcatggtagcatatacctgtagtctcaggtacttgagaggctgaggcaggaaaattgtttgaatcgggaggtgggggttgcagtgaaccgagactgcgccactgcactccagtctgggcaacagaagaasactctgtctcaaaaaaaaaaaaaaaagtatatctaaaaattaattaattttatatggtgtggagaagggagaaaatatcaaggaaattgaaactaaggatgaataggagttagcaggtgaagagtggggcaatagaasccywytgagtaaatagaaccacatgtgcaaaagatgggatggagacgaacaggaaggttggagtgctaaaacaagaggcacaacgtcagcagatgaggctggagaggatagcctgatcaggcaagcctggcatgccgtgttaaggatttggaattgkataccaagtagcatggaaatcaaatgcacgcacgcgcgcgcrcgcacrcacacacacaccattgtcgtcatcatcaacattatttttcatagttaatatttgttcctcatatgcttaacatttgtttgctagttatttctttatttcttcttgcttcttcacctttccatctaggatcactttttctgcctaaartatatcacctagaatttttttttttaagagatggagtttcactcttgttgcccaggctgaagtgcaatggcgcaatctcggttcactgcaacctctgccttctgggttcaagtgattctcctccctcagcctcccgagtagctgggattacaggcgccagtcaccatgccttgctaatttttgtatttttagtagagacggggtttcaccatgttggccaggctggtctcgaactcctgacctcaggtgatccacctaccttggcctcccaaagtgctgggattacaggtgtgagccaccacccccagccctagaatttattttactgactgtttgttggaattgaactttctcagtttttgtttttgtctgaaaatgtattgattttgccttcttttatggaatgggggtggggaagagtgaaatttacaaagagtgaaatgcacagattataaatgtataatttgatgattttcaacatgtaaagccaatgacccaattatgatacagaatattcccatcattccagaatgctcccttgggccctcttccagtcaattctgcccgtctactctctataggcagccttttgtcaccatggattacttttgtctgttctagaacttcatgtaaatggaatgtacattatgtactcttttgtgtcttgattctttttttgagagtcatccatggggttgtttgtatcaatagctcattctttttcttggtgaatagtatttcgttgtatgaatatatccattctccttcgatggacacattgattgtttccaactttggrctattatgaataaacctacggtgaacattcatctataaatcttttcataaaagtatatttttatttctcttgtgtaaatacctaggaatggaatttctgggtcatrgggttatatgtgtttaactttataagaaactgcctaacagtctcccaacacgattgtaccattttaatctcccattggtaatatgtgaaagttctagttgctgcacattgtttcagcaacatttgaagtttcagccaaagccctcctcctactcctgtctcccagccttctctagtaacctaggttatcagctccatctgtatccttccagtgatactttgtgtataaaaaacagatatggtgttatcacacttaaaagtagtgataagatgtaaagtaatgatgagttgttctttcttagaaattatatagtattgattgaataaagtctagtattttaaatgaggaatacttccataaccacgttarctgcagcagttttctttcctacccccatgttctgtacctgtggttgtcaactttagtgtccatctgaatcatctgaagagttgttaaaatacagactaccccacagtgtgtgattcagtaggtgcaggcctcaacatttgcatatgtaacaaatttccatgtgatgttcatactgctagtccatggaatccactttgagaactactgcttgctcctaaatccaaggattctggatatttcttctttattatggttattactgtcaaaaactcttgaagaattctgactcatgcatgtgggtatcatagactccagctttacaaggacacttctaattgattttatttctcagttatgggtgatcttccacttatatttttatagatcgtttcaaataaatttacataccagaggaagaaaactgctgtcaatccataggttccagtgtttagtttggaaaatacggtcaccgtaagtgatgtagcatgttgctcaaaagaaaaaaaaaggaggccgggcgtggtggctcacacctgtaatcccagcactttgggaggctgaggcgggtggatcacctgaggtcaggagttccagaccagcctggccaacatggtggtgaggtgatatatgagaatcccacatatgtctctactaaaaatacaagaattagctgtgtgtggtggtgggcacctgtagtctcagctactcaggaggctgaggcaggagaattgcttgaacctgggaggtagacattgcgagcagtgagccgagatcataccactgcactccagcctgggcgacagaggtgagactccgtctcaaaaaaaaaaaaaaggaaaaaatatgcatccctccctagcaatttttttttgttgaatattttgtttttaccttattaccctatataaatacagtattattcacatctgaatcactatattatgtttataattatttatttcacattttttgtttggtttagttttctgtatgtctgtcacaaatttaattgcaagctgttggacagagctttaaaaccattcagtgcggtaaaaatgtaacacacacacacacacacacacccctacacacacactaaaaatgaatgctagccatttccttttccttgttcttgttgaagacagcctcttgctatgttgcattccatctggactgtttgttctgtacacctgttgtgtagccatcatctgtgggcttccatttgccatcattgtgagaattcactcgatctcttttctgtgttgaatctactgtttctttaatttcttgttttcttctttccaaatttattcctttgtttggtggcttacatcctctgtacgaggggcgggtactgttgactggagcctctcacagtagaatgatctgaacctaccatttcactgtgggattctcacatatcaggatttatagcatttttttttcccttggatcacccagttcgctcaatcttctgtttagtgggtacagcagccgctgttctcagacccaagttgggggatgaggcttctattttcagctactttagaaaggtttcttgttaatccagaatttgtcagcccctactgtgcgccaagtattctgtttgtttctacagaggggtataaagttaatgaaaagatggccaggtgcagtggctcacgcctgaaatcccagcactgtgggaggccaaaggcaggcagatcacctgaggtcaggcgttcaagatcagcctggccaacgtggcaaagctaaaaatacaaaaattagctgggcatagtggcacgcgcctgtaatcccagctacttgggaggctgaggtaggagaatcacttgagcctaggaggctgaggtaggagaatcacttgagcctaggaggcagaggttgcagtgagccgagattgcgccactgcactccaatctgggcgacaaagcgagactccatctcaaaaaaaaaaagtaataattataattataaaagttaatgaaaagaaagtttccaaaatctcagttttaaaagtggagaaaggcataaagtttattgcctcagatacaagatagtatgtgataaatgctacataaatgagcctctgacaatgagaagattaatttcatctaaggcttttagaaaagatggcatttgggctttgaagaaaggacagaactttctttaaagaaaaaatagaatgtaaaatttacaaaatgtttaagaagtaaaaactttcgccgggcgcggtggctcacgcctgtaatcccagcactttgggaggccgaggcgggtggatcatgaggtcaggagatcgagaccatcctggctaacaaggtgaaaccccgtctctactaaaaatacaaaaaattagccgggcgcggtggcgggcgcctgtagtcccagctactcgggaggctgaggcaggagaatggcgtgaacccgggaagcggagcttgcagtgagccgagattgcgccactgcagtccgcagtccggcctgggcgacagagcgagactccgtctcaaaaaaaaaaaaaaaaaaaaaaaaagaggtaaaaactttcatgatcttattactttaataactttatttttgcatatttccttctaatctttctgtgtgtgcttttacagttgtcatagatttcagcattcttattttttcaattaatataattattctgttataataataattactttttgaatggcttcaaaggattctgcctagatgatataggattttaatagtgaactagtaagggaatccagcttgtataaaaactcagagataagtaaaaatggggtatatatatatatttttaaaaatagacttactagggtgggggacaacagaggaatgggagaaggatgaagaataacaaaagataaaatctctcaagacttgtgagaaatggaaagacgtgcagccctgtgttttctgttcttgttttttttttttttttgcgttgtcaagaaattgaagagcagttagtagatgtcttcatgaattgtggagaaaatctcagccttaagaagctaccttttaattattgacgctgcccgcatagataacacattacatcacattaccaatttgtttctccttgtcattcaaaaaagccacatctctttgcctgtaatttgcaactttctattttattttcaaaaaacaataaagctctctttactcatgagtttggaagagggaagtttcaagctttagtgaagagccctggtctggtataattttgtccctgttttgattacggaaaaggtgtttaacttttgttacttttttatttatttaagcactatccagatttctgttaatagtgctcaggatcagaattctaaaattattgaagagatttttctatagttgcagcatttatgctgctttccctccttttcaaacatgtgagagattacaatctcaacacatgaaagtgatggaaaagactaatttgacaattctctagaataaaatcataaaatgaagttaaaaccaatgcaaatattaaaataaatggcacttaattttgaaagaagtttttaatcagtatagcttatcaattaatcttagcatttaaaataactagttctgatttttgtgttgggaaatgcaaggagaaaggttaaaagttaaatgtatctgggatagctgtgttatttataattcccctggaattgtttttgattaatgcttgttacattttccccakgaggctggggagtgtttcagtcgaggctaacatggatggtttttaatatcaggagctccacaaatatggattaactttttagagatagatggtaatctcttttctcagttaaggtcatataaattataactgctacctgaacttagaaaaaataagataagtaacattatttgctgttgtcactttcaattatactttaccacttgagagaaattgtacttgttaattaagtcatcacagaagagatttttaattggcagaattcagttttggagattcctacctgtgtaacgtagtatggctactttccagtaaactggtatagtgagaatttgaccatcagggcccatggaatatttcagttggcctgtttattcagtgaccttccagaaaaaaaggataatctttttaaattaaaaaaaaaaacaagattaaataaaatctcccatttttgtgaatccctcccctcagaaaactgaaatttcctctctggttttcaattccatctttatttctgatacctgaggatttcccttctttcttgaaagatcagctatatatttaattttatttggtgatggaagaaagttatttttatctagcatctccagtcagagttttttgtgttgtgttaatttaccatatggatttttagaattagtagaatatttacagtcatgcattgcttaacaacggatacattctgagaaatgtgtcattaggcaatttcatcattgtgcaaatgtcatagagtgtagttacacaaacctagaaagtatagcctactacacacctaggctgtgtgatatagcctattcttcctagtctacaaacctttacagcatgatactgtactgaatactgtatgcattagtaatacaatgtaaatattgtgtaccaaaacatagaaaaggaaaagtaaaaatgtggtattttatgggaccaccatcatatatgctgtccatcattggccaaaatatcattctgcagccatgactatcttatttagcgaggcctcctggaacagggatgtttgtaagtctttagaagaaagaaggttaaaataaataatctatgatatgcatattttctcccactcagacttcttctgagaaaggcatacaagctactgcttgccagtggaatcattttagaatagaatcagttaatttgctatctcttgtgctataatatttcatatttgttgatcttttaaaattttaaaaatgttggctaggcacggtggctcacacctgtaatcccagcacttcgggaggccaaggcgggtggatcaggaggtcaggagatcgagaccatccttgctaacacggtgaaaccccgtctgtactaaaaatacaaaaaaaaaaattagccaggtgtggtggcgggcgcctgtagtcccagctcttagggaggcgaggcaggagaacggcgtgagcccaggaggcagagcttgcagtgaagtgagattgcaccactgcactccagcctgggccacagagcgagcctccgtctcaaaaaaaaaaaaaaaaaaaawttttgcccagattggataagggtaccccttttgccacgttcttgccagcatttgttattgcccatcttttggataagagccattttaactggggtgagatgatatctcattgtagttttgatttgcacttccctgatgatcagtgatttgagcaccttttcaaatacttgttttccatttgtatgtcttcttttgagaaatatctattcagatcttttgcccattttaatatcagattattggagtttttcctattgagttgtttgagcttcatatattttctagtgattagtctcttgttggatagtttgcaaatattttctcccattctgtggtctgtctcctaactttgttgattgtttcctttgctatacaggagctttttaagttgatgtgatccaatttgtccagttatgctttggttgcctgtgcttttgggtattactcaagaaagttttgcctagaccagtgttctggagagtttcctcaatgttttgatttgatttttgtatatgacaagagataggggtctagtttgattcttctatatatggatatccagttttcccagcaccatttattgaatagactgtcctttccccattgtgtgttcatggcacctttgtcaaaaaggagttcactatagatgtatagatttacttctgggttctctattctgttccattggtttgtacgtctgtttttatgccaataccatgttgtgttggatactataactctgtagtataatttgaagtccagtaattaatttgactccattttgttctttttgctcaggatgactttggctattctgggtcttttgtgattccatgtattttaggattgttttttctgtttctgtgaagtatgtcattggtattgtgataggagttgcattgaatctgtagattgctttgggtagtatggacattttaacaatattgattgttccaatccatgaacatggaatatttttcccttttgttttttttttggtgtcgtcttctatctctttcatctatagttttcattgtagagatctctcacttctttggttaagtttattcctagttgtttaattttatttgtagggattgtaactgggagttacattcttgatttctttttcagattgttcactgttggcatataaaaatgctactgatttaataccttgtttcttaaattaaaataaatgctactgattttttgtgtattgattttgtatcctgcaactttactgaatgtgcttatcagttctaatagcttttgggtggagtctttagcttttccaaatataagttcatatcattctcaaataagaaaaatttgatgtcttcctttctaatttagcttccctttctttttcttatctgatttctctagctaggacttccagtactatattcaataatagtggtaaaagtgggcggccgggcacagtggcacacgcctgtaatcccagcactttgagaggccgaggtgggtggattgcctgaggtcaggagtttgagaccagcctggctaacgtggtgaaaccctgtctctactaaaaatacaaaaattacccgggtgtggtatcgcacacctgtagtcccagctagtcgggaggctgaggcaggagaatcgtttgaacctgggaggcagaggttgcagtgagctgagatcgtgccactgcactccagcctgggtgacagcaagactccatctcaaaaaaaaaaaaaaaaaaaaagaaaggaaaagaaatggacatccttatcttgttccagatcatagaggaaaggctttcagtttctccccatttaccatggcactagctgtgggtctgtcatatatggcttttattgtgttgagctatgttccatctatagtcaggtttttgagggtttttttttttatcatgaagagatgttgaaatttatcaaatactttttcagcatcagttgaaatgatcatatgggttttgtcctccattctgttgatatgacatttgactttcatttgtgtatgttgaaccatcctttcatccctgrtatgaatcccacttggtcacgatgaatgattttttttcaatgtgttgtcaaatttggtttgctagtattttattacggatttttgcatcaatgtttatcagagatattggcctgtagttttcttttttcaatggatctttgtctggttttgatatcagagtaatattggccttatagaatcagtatggaaagtattcctcctcctctattttttgaaatagtttgagtaggattggtattaattcttctttaaatatttggtagaatttggcagtgaagccatcaggtcctaggcttctctttgctgggagactttactacagcttcaacctcattatttgttactggtctttttatgttttggatttcttcatggttcaatcttggaargttgtatgtgtataggaatttatccatttcctttaggttttataatttattggcatatagttgttcgcagtagtctctaatgatcctttgagtttctgtggtgtcagttgtaatgtctcctttttcatctgtgattttatttatttgggccttctctccttagtctagttaaagttttttctattttgtttatcttttcaaaacaccaacatttcattttgttgattctttgtattatattctgtttcaatttgatttatttctgctctgatctttattatttcttttcttctactaattttggagttggtttgctcttgattttctagttctttaagatgcatagctaggttgtttttttttttgaagtttttctactttttcatgtaggtacttatagctataagcttctcttttagtactgcttttgctctattccataggtttgctatgttgtgtttccattattatttgtttcaagaaattatttaatatccttcttagttttttcattgatctgccaatcattcaggagcatactgtttaatttccatttgtttgtattaatttccaagttcctcttgttattgatttctagtgttattctgttgtagtcagagaagatacttttaagattttaattttttaaatttttttctttttcaagacagggctactctgttgaccaggctggactgcagtggcacagtcatggctccttgcagcctcaactcttgggctcaagtgatcctcccacctcagcctcctgatgagctgggagtaccactctgcctgtttttttgttgttgtttttttgtttgtttttaagagatagggcctgactgtgttgcccaggctggtttcaaactcctgggcccaagaagtcctcccatcttggcgtcccaaagtgttggaattacaggcatgaaccattgtgcctagctgaatttttaaagacttcttttgtggctaacatgtggtttatccttgagaatgatccatatgccaggagaagaatatgtattatgcagccattggatgaaatgttctgtaaatatctattaggtccatttggtttacagtgcagattaagtccaacatttctttgttggttttctgtctgaatgatctatccagtgccgaaagtgggatrttgaaatttccaactattactatattgaagtctagctgactctttgactttaacaatatttgctttatataactgggtatttcagtgttggatgcatatgtatttayaattgttgtatcttcttgttgaaatgatgcctttatcattgtgtaataaccttttttgtctctttttttagtttttgtattgaaatctatttgatctgatatagctattcctgctctttttggttttcattggcatggaatattttctgtgtgcctttattttcagtctatgtgtgtctttataggtgaagtgtgtttcttgtatgcaacagattgttgggtactgttttgttaatccatcaaccactctatgtcttttgatyggagagtttagttcacttacattcattgttattattgataagtaaggacttctgccatttttaatttgttttctggttgttttgtgstcctttttgtgaaagtgttttctttagtggtatgctttaatttcttggtttatctattgtatgtctgttgtagattttttaacttgatgttacatgagggttgcaattaacatcttacaatgcattattttaaactgataacagtttaactctgattgcaaaaacaaacaggaaaagagaaaactaataaaaactctacactttatccttcttgctttttaactttttattgtttctatttttgtcttattatattgtctatgactttagaaattgttgtagttattatttttgataggttcatcttttagtctttctgctcaagatatgagtttacacaccacaattacagtgatataatattctgtatttgtctgtgtacttacttttacatgtgaattttgtaccttcagatgatttcttatcgcttattaatatccttttcttttagactgtgggacrccctttagcatttcttgaaggctaggtctgatgttgattaaatccctcakcttttgtttgtccaggaaagtctttatttctcctttatgtttgaagggtattttcaccggatatactattctacaataaaaattttttccttcagcacttcaaataaatcatgccactgtctcctgcctattaggtgtccactcagaaacctgctgccagatrtattggagctgctttgttttttgttttgttttgttttgtttttaattttctcttgctgcgtctaagatccattctttatctctggcctttgggagtttggttactaaatgtcttaaggtagtcttctttgggttaaatctgcttgatattctataaccttyctgtgcctgaatattgatatctttytctaggcctagaaagttctttgttattatttctctgaataaactttttaccccaatctctcttgctacctcctctttaaagctaataagtcttttttttttttttgagacagagtctcaccgtgttgcccaggctggagtgcagtggcgcaatctctgctgactgcagcctctgcctcccagattcaagcatttctcctgcctcagcctcctgagtagctgggattacaggtgcacgctgccatgcttggctaatttttgtatttttartggagacggggtttaaccatgttggacrgactagtctcgaactcctgacctcaagagatccactcgcctcagcctcccaaagtgctgggattacaggcatgagccaccatgcccggcccaataactsttaactttgcccttttgaggctattttctagatcctgtaggcatgctttgttacttttattctttttttatttttacacctctgacggtatattttcaaataacctatcttcaagctcgctaattctttcttctgcgtgatcaattctgccattgagagattctgatgcattctttaatttgccaattaattttttcaacttcagaattctgcttgattctttataagaatcaaagaggtttttaatctctttgttaaatttatttgataggatcctgagatccttctttgagttttcttgtatttcattgagcttcctcaaaacagctattttgatttatctgagagttcacgtatctctgtccctctggaattggtcactggtgccctatttagtttgtttggtgagatcatgttgtcctggatgatgttgatgcttgtggatgttcactaatgtctgaacattaaagagttaggtatttattctaatcttcacagtctgggctggtttgtacccatccttcttgagaaggctttccaagtattcagagggaatcttaagtctttggtcactgaagccatatgtgagcatattagggggtaccccaaggccagtaatgatatgactcttgtagtctcatagaggcaccaacttgctggtcttgggtaagatctgggagaattccctggattaccaggcagagactcttgttctcttctcttattttcccccaaccaattggagtctctccctctctctgtctctctctctgttctgagctgcctggagttggcagaagggtgacacaatcctgtggccaccatcactgggactgtgttgggtcacacctgaagccaacacagtactggattttgcctaaggcttgtggtgactatttcctggctaccacttgtgtttatttaagacccaatggctcttcagtcagcaggagatgaatttgccaggactgggtctttcttttcagtgcagtaggttcccttctggcccacggtggttctagaaatgctgtccaggagttggggcctgggattagggactttaggaatctgcttggtgctttatttcactggggctgtcatggtacccaggttacaagacaaagtcctttttattcttccctttgattttctcaagcagacagagtctctgcccatggccaccactgccccagacctgtggctactatagtctggctactgctgatatttattaagggcccaacgtctctttaatcagtagatggtgagtcctgccaggcctgggtctctccctttagggcagtgggtttccttctggcccagagtgggtctagaaatgccctctcggagctaaggccaggaatcagtgactttaggagtctgattggtgctttattttactgtgactgagctggtacccaagttgcagacaatttttttttttttacttttccctctcctttccttaagcaggagtctccctgtggccgccacagctgggaatgtgttggatcacacccgaagtcagcataatactgagtcttgcccaaggcctgtggcaactgctgcctggctaccccgatgtttattcaaggcccaagagctctttagtcagcaggtagtgaaatctggcaggactgggtcctttccttcagggtggcaggttcccctctggcccaggatgggtctagaagtgtctgggagttatgacctagaatgggggcttcaggactctggttgctgctttattttattgtgggtgtgctggtatccaagttggagaacatagtctcctctactcttacctctcctcctggagctatgaactgtgctgtctgaagttggaggaggggtgacacaagcacacccttggccgccccgtctggtgtctcactggttcatgtgcatcccaaatctactggctccaagaccagcacagtaccaggacttgctcagggactgcagtccttatggtctagactgccttttaagtttatttaggatcttggagtgctttagcctacaggggcaaggcttgcccaaacttagccttaaactgctgggatggatgattcccctctggctgaggctggtctaaatactccctccatgggtgcaagctgacttctgccctctgttgccttccactgcgacagggcagcactgagttccaatgcaaagtcccacaatcactttgcccttcgtcccgcaaaggcatagattctctctcagccaccacactgcactgccagggcatgtgggaggggtggtgtgggcaattcaagactgtctttcctaccctcttcagtgcctctttccttgatacgatgttgaaactaggtactgtgatcagtcacctgatttttggttcttatgtaggtgctttcttgttagaataattgtttaatttgatgttccttggtggggactctcactggagggttctaatgagccatcttgctccgcctcctcctccatatttgttgatcttaaaaaatgctcctgtaaatactgttgtacttaagtccttgtgtacatagatgtacatttatctagggaaacatctaaaaatacagttcctgggtttttattttagaactttagtaagcatgtcaaacatctctttagaatgatccatcaatttacactcccaccaacagtgcatttagaactctttctgctgaccggtgagattatcttttcatgtatttcttagccattctatatggtatcttgtactaggttaattatatcttacatattgatttttaggagttattcacatattctggataattatcatttgtctcaatgatgtatattttagatacttctgtagatattttagatatgtctacaggaagaagtatctaaaatatccccttgtttttttcattttgcacatgatattttttctcatactaaaggtatataattttattattgtggaatttaataatttttgctattaagattgtattttttaaatctttccacatgctaaagaactattctaaaattttaaatgaacttttaaaaatttcttttcacttttagactttatctggaatttggttttatgttttagtataagatagtgattgaatgttattgtttacttctttactcatttttactcctctctatgaattttggaattatttgtaaagatccatgaaaaaatttgaagggagaatgggaatagtattaaatttatagattactttggagaaaaaagataataatattaaatattttcacacgtaaacatagtggatttctccatttattgaaggcttctttacattcttcaatattttataaattttttaaaataaggtcttgctctgtcacccaggctggagtgcagtggtgttcatagctcactgttacctcaaattcaggcaatcctcctgcctcaccctctctagtagctgggattacagacacaagttatcatgcctggcttattttttggagggatggggtcttgttatattgcctatgctggtcttgaactcctgggctcaagcaattctctcacgttggccacccaaagtgctgtgataataggtgtgtgccggcataactggcaatattttataatgttatctatgaagtttttttatatttcttattaattttatttctgttctaatagttttgtaacttgtgaattttttaaaaaatatacatgttttataatattttcttacctttttattttgaacaatttcaaacctacagaaccattaaaagagtaatataagtagtacagtgtacacctgtatacccaagaactagatccacaaattggtaacgtttcgcttattcccctttatttgtatacacacacayacacacacacacacacacacacacacacacacacmgcatagttatgttcagttttttatttgctaagttatttgaaaataagttgcaagctttatgatactttattcctaagcacttcaatatgtgtctcttaaatctaagacactctttataaaacctctatgccatcatatcaaagatatttaatatttgatacattataatagccacacattattatatactctgttgtctgttgaatgggatttaaaaaaataaccttttctaagtagttattacaaattattatgggctgggtgcagtgtctcacacctgtaaatctcaacattttaggaggctgaggcaggcagatcacctgaggtcaggagttcgagaccagcccagccaayggtgaaaccctgtctctactaaaaatagaaaaattatctgggcatggtggcgcatgcctgtaatctcagctactcaggaggttgaggcatgagaatcgcttgaaccgggaggcagaggttacagtgagccaggatcacaccactgcactccagcctgggcaacagagtgagactctgtctcaaaaaaaawccaaaagccaaatggttatgaactttcgattttgtgtacatatatagcaataattggaaattcctattagttgcaatactttggctttagattttcttgagcgcagcgataaattcttattcagtgtaataagttgactcaagtttttgcttatctttgtaaataatcaggtcatctacaaataattttctttttttcccgtgtaacttttaataaaattaattattgaaaaagattcttcaattaattttaatatcctaattactttatttgatatatatttttwaaaaaattgtgtcttagttaacttataagtacatgaaaatgaaatctaaatttttgtattttaggaaaattcacgaattgtgagagtaagagttatagccggaataggccttgccaagaaggatatattgggagctaggtaagtatatctatttggattataattttaaaactttgcatttgttaattagttttttccaaactttggttaaattagaaatcaaatagtattagtaaattgttgtggaaagtataataataatattaccagttggtggtttactaaatctcttggtatctgaattactaaatttgtgaaattaggcagaagtacaaatgatagcaatagtcacaagatacattattgagctctgcttctggaaatttgcaaaattctaacagactaatcctttagcagataacaaccataaactctggacttaatacaaaaagcagcaacctgaaggcagtggagagtgaacagagcaggcagattctggtggggagttcatgtttggaagaagggaattgtactgagtgagttcctgatactatgaattggtctgagggcaggtagaatcagaacctggaaaaattgtagtcttcatggcctgggaacatagcagaatccaaactttggttcaattaaaaatcaaatagggccaggcatggtggctcatgcctgtaatcttagtaatttgggaggccgaggcaggcggatcagttgagggtcaggagtttgagaccagcctgaccaacatggtgaaaccctgtctctactaaaaatacaaaaattatccagaaatcgcttgaacccaggaggcggaggttgcagcgagccaagattgtgccactgcactctagcctgggcaacagagtgagcctctgtctcaaaaacaaaaatacatacaaacatgcatgcatacatacatacatacatacatacatacatacataccaaatagtattagtaagttgttgtggaaagtagaataatatttccaattgttgatttactgaatctctgaatctgaagaaaacatggcagtggtaaggattctggaagagagagagctgaagagctcagcaactcatctgaagacaaaagatctgaacagagatcacagtcactgcctaagaaacggggtttgggagactgaggcagacagrttgcttgagctcaggagtttgagaccagcctgggcaatatggtgaaacctgtctctacaaaaagtacaaaaaatcagctgggcatggtggcgcatgcctgtactccyggctacatgggtgactgagtcaggaggattgcttgagtctgggtggttgaggctgctgcagtgagacaagattgtgccaatgcactccagcctgggtgacaaagtgagaccgtgtctcaaaaaacaaacaaccaaaaacaggatttgtggctcttgtccaaacaggatgattagttgcatgatagtcttattatgtttagtgttgctataacagaattcctaagactgtgtattttgtaaagaaaagaggttgatttggtgagtggaaagttcaagactgggcctttgcatctagtgagggcctcaggctgcttcaagtcatgacagaaacgggaaggggacctagcgtacacaaagaaatcacatagcaagagtggaagcaagggggaggtgtgccagcctctttttgacaaatcgagaggaacaaatagaatgagaactcactcacttccgagggagggcattaatctattcaggagggatttgctcccatgaccctaatacctccaaccgagacccatctttcaatattcccacattggaaatcaaatttcaacatgcggtttgaaggatacaaatatccaaaccatagaatgataagcagacacacacacacacacacacacacacacacacmcacaccagcagcaaaattcacacacacacacacacacacacacacaccagcagcaaaattcagtctccaaaacttaacatttataatatatgtccaggatataatgcaaaattacttatctaaaaagaaccaggaaaatggaaggcatttttagtagagaaaagaaaatatggccacaataaattttaaaaatatgaaatgaaatggaaaccataaaaaaatgaaaattccaggagtgaaaaatacagcatttgaaattaaaattgttgggtagatttgtcagccaaatggagaagaggaaagattaactgaacttaaagatagatcagtagaaattgttacgcagttggaagatgagagagatgagagagacaaagattggagaaaaacaacaacaacaacaacaacagagccttgaggatttgttagctaatatataaaagtctaacatggatatcattatataatatcttacagtctaacacagaaaggggagggaaaagaagaaggcacaatattttttgaagaaatattggccaagtttttttccaaatttgattaaatttatatagtatttaaaaacaccaagcaggataataaacattaagaacacaatgaagtgcataatagtcaaactgttgaaagccaagtataaagagaaaaatcttgacaaaaagagaaaaatatgacactttatatatgggggaactacaattcaattaattactgacttcctacccaaaactacggagaccaggagaaaatggaacaataaaataacaaccatcaatccatagttttatattcagtgaaaatatcctttaaggaagatgacaaaataacattttccaaaaaaagacacctagataattcatcattggcagacctgtgctgtaagatatcttaaagtcctttcagctgaagaaaattgaaaccagatagacactcaggtccttagaaaggaataaagagtatcaaaaatagtaaatatctgggaatatacaaaacatgttttgcttttctcatcatacctttttaaaataaaacatatgcctgttgaaatcacaagttaaaacattgttttttaggatttatattgttggtgaatggaatacataaaacaactataacataaaggatggagcaggtataagttatagacctatttggtagaatggtacaatactaagtataagttgaataaaagattaatgatgtatattgtaatatccagagaaaccaataaaaaataatgcaaagaattatagataaaaaacagtagaaattttaaaatgaagttgttgaaaaactaaataaaaaagccaggaacttgagcccagaggttcaagaccagcctgggcaacaaagtgggaccctgtcactagaaaaagtcaaaaaattagccaggtatggttgtatgcatctgtggtcccagctacaaaggaggctgaggttggaggatcgctggagcccaggaggtcaaggctccaatgagccatgattttgccactgcactccagcctaggcgacagagtgagaccctgtctcaaaaaaaaaawaaataaaaaagagtgccagaaaaggagaagcaaatgatttaaaaaagtaacggaggccrgttgtggtagctcacgcctgtaatcctagcacttagggaggctgaggctggtggatcacctgaggacaggagtttgagaccagcctggccaacatggtgaaatcccatctctactaatatacaaaattagctgggtatggtggcgcgtgtctgtaatcccagctactcaggaggctgaagcaggagaatcagttgaacccaggaggcagaggttgcagtgagctgagatcacaccattgcactccagcctgggcaaaagagctaaacatcaaaaaaataaaataaaaaaaataaaagtcggaaaaggaggaacaaatgaacaaaaaaagtaaaagaggctgggtgcggtggctcacccttgtaatcccracactttgggaggctaaggcgggtggatcacctgaggtcaggagttcgagagtagcctgggcaacatggtgaaaccccatctctactaaaaatacaaaaattagctgtgtgtggtggcaggcatctgtaatcccagctactcaggaggctgaggcaggagaattgcttgaacctgggagatggaggttgcagtgagccaagattatgccactgcacttcagcctgcatgacaagagtgaaactccatctcaaaaacaaacaaaaaarcaacgtaaagggcagtgacaatggaaaacaaacaataaacctgtagactaaatccaatcatatcaataattacaaggaacattaatggattaaaataaatatgagacagatgttgttaggataaattaaaaaacaagacccaactatatactgtcctacgtgatgcacttaaaatataaagacatagctaatttgaaagaaagcggacgcaaaaagatatgccatgcaaacagtaagcataaaaagactgaagtggatatattcgtatctggtaaaatagatttcaacacaaaaattttcaaacatttcatgatgataaagaataaagtcaatcaggaatatataacaatcataaatgtgtgtgtgcctgctaaaagaacttagaaaaatatgaatcaaaatttgacggaattaaaggggaactttttaaaactcccaccgtcatagttggaggcattaacacttctctttcagcagttgataaaacaactaaataaaaaaatmaaaaacataaatttaaacaatattatgaataactttgacctaaagaacactatttctaacaactttcttttcaaatgtacattcttttcaagtgtacatggtacattcactagcatagaccacacatgggctgtattagtttattgcttcataataatattaccacaaactggccaggcgcggtggctcacatctgtaatcccagcactttgggaggctgaggcgggmggatcacaaggtcaggagattgagaccatcctggctaacactttgaaacctgtctctactaaaaatacaaaaaattatccgggtgtggtggtgggctcctgtagtcccagctgctcgggaggctgaggcaggagaatgatatgaacccgggaggcggaggttgcagtgagccaagatggggccactgcactccagcctgggtgacagagtgagactgcgtctcaaataataataataataataataccacaaacttagttgcttaaaagaacgtacatttattgtctcacagtttctgtggttcagaagttcctgcattgtttaactgggtcctctgctacagggtcttggaaagctgctgttgtatttttttttctactttttttctaattttttctaattttgcagtcttgaagtctctcacatgagagtggctgtaaactctagccctgccctgatgagactctaggaatttggacatagatgtttacagtgtgcctttcatgggtattcttaggcaagtgccctcatgcctaagtgtctgacctatgaccagatgtccctctcacagcaaacttgcatatcctggcagatgctcttatagctcttgtctgtgtccagtttgttcctaccaaaatagcagatagccactctctaggagaatcctgacaaacaagttagggtcgagtgtatcagtcaggtgagacacgggaggcaactcaacaaaacacaagaaataacagcagtttattacttacagatgccagagagaagagggcagcatgcctcccagggccaacaggaagtggggagccatctaggacatgcacagtcaactagtgggtggggaacagggcaaagagtacaagtgacctgtgggctgaggcttttactggggtccagggcattttccaagcaggtttccctcagggagttgtaattggtgggtttagagcaagtaggcataaatttcatggagtcatgctgtgtctgagaaatcagtattagggttctctagggggacagaactaataggatagatatatatatgaaggggaatttagtaggagaattgactcacatgatcacaaagtgatgtcccactattggccatctgcaagctgcggagcaaggaagccagtcmgagtcccaaaacctcaaaaataggaaagccaacaatgcagccttcagtctgtggctgaaggtacaagagcccctagcatatcactggtgtaagtccaagagtccaaaagctgaagaacttggagtctgatgttcgagggcaggaagcatccagcacragagaaagatgaaggccagaagactcagcaagtcaagtccttccacgttctgcctgctttattctagctgccctggcagctgattagatggtgcccacccagattgagggtgtgtctgcctctcccagtccactgattcaaatgttaatctcctttggcaacaccctcacagacacacctaggaacaatactttgcatccttcagtctaatgaagttgacactcaatattacccatcacagagaggtggttactgtggcttatttctgcagtcctttgggggtatggggtcagtggagcaagtcaagtaggttgaatctggttgtttcttagggagatggttaccaggaggcagttgtgtaaggtagttatctggattgaccacattgaggagctgagaggaggtagagaactggaaactgtgctaagggtgactaagacctgcttctggtataaaaatgtccaacttaacattcattatggatgctgaggcaacataaaattataggaattcacttcagctgtcattaaggtattggtagggctgtggtcttagctgaggcttgcttagggaaggattcacttccaagctaatgtggttgctggtggcattcagttccttgcatgctgccagtctgagcgtttccatttcttactagctgtcagctggaggccgtctcagcttcttgccattcagcagctcacaagctgccagtttgcttcttcaaagctagcaagagtctcctagcaagatggattacaatcttatgtaatgtaatcacatactttttgtcacatttgccataatctgttggttagaatatatagatctgtcccatgcttaagaggagaggaacacaaagaacatgaatattaggaggtggggataataggagctgccctagtgtctggatgccacaatattcygggccttgaaacaataaaccacattcttttgaaatgcacatggtacgttaatcaagatagaccatgtgtgggtccataggacaagtttcagaggttttcaaaagattgaaatcatatagaggatgttctttgagaacagtggaattcaattggaaaccaataatattaagatctagaaaaactgcagatatttggaatttaattagtatacttctaaataatctatatgtcaaagaagaaaacattttgaactgaatgaaaatgaaaatacagcaatatcacaattgtggaatgcagctaaagttatattcagagggaagtttatgtctttaaaatgcttaacttagaaaaggagcaagatataaatgaatgttttgagttctgaccttaataaattagaaaaagaagagcgaatgaattctaaaataagtagagggaagaaataataaagacaagggccaaaatcagtgaaagagaaagtggacaatggtagaaaaaaaattattgtaatcaaaagcttgttatttgaagacatcaattaaagttttaaacctctagctagaatgatcaagagttagagagaaggcactaattactggtaatgagaatgaaaactggggcattgctatagaccctgtggaaatgaaaaagataaaaagaaaacattttgtacaattttgtatcagtaaagaagtacacacaatttagtgaagtagataatattcttgaaagacacagatttcagaactagccacagaacaaatacaaaactttaatagatgtttattattgaaagaaattgaatttgttgttaaaagaaattgaatttgttgttaattaaattgaatttgtccttcccacaaagaaaactccaggcccacatgatatcactggatgcagctatcagacatttagggaaaaaaaaataaaaattctacacaaacacgttcagaaaatggagggcatttcccaactcattttattaggctaatattatcttgatccccaaaccagacacagwcatcacaagaaaacytaaaaccaatatctgtcaacatagatgcaaaaatgaaattaaacattatgtagcaatatatcaccacttaggatttttcctacaaatgcaaggtttgttcaacattaaaaaaattaattaatgcaattcactgtattaatacagtaaagtagaaaaaacacatggtcatttcacttggcatggaatgtgcctttgacaaaatgtaacacccagtcatgataaaacctctcagcaaactaacataaaatacaaaggtggcttaacatctgaaaattaactgatgtaatacactgtattaatagaataaaagaagacagtcatcttttttttattatacgttaagttctagggtacatgtgcacaatgtgcaggtytgttacacatgtatacatatgccatgttggtgtgctgcacccatcaactcatcgtttacattaggtatatctcctaatgctatccctcaccccttcccccactccacgacaggccctggtgtgtgatgttccccaccctgtgtccaggtgttattgttcagttcccacctatgagtgagaacatgcggtgtttggttttctgtccgtgtgatagtttgcttagaatgatggtttccagcttcacccatgtccctgcaaaggacatgaactcatccttttttatggctgcatagtattccatggtatatatgtgccacattttcttaatccagtctatcattgatggacatttgggttggttccaagtctttgctattgtgaatagtgccgtaataaacatacatgtgcatgtgtctttatagcagcatgatttataatcctttgggtatatacccagtaatgggatcgctgggtcaaatggtatttctagttctagatccttgaggaatcgccacactgagaagacagtcatcttaataaaagcagaaaacacaactgacaaaattcaacacccattcataatagacactctctgcaaactaggaatagatggaaatgtcctaaacctcatcaggggtatctatgaaaaaacccagtagctaaccacctacttaatggtggcagtttgaagcccctctacttaactcaggaataaggcaaagttgtctgctttcatgttctatccaacattgtactatatattttagccatgtagtatggcaaagaaaaaaaaatcacacagtcaaaaaggaagaagtaaaactgtctttatttgcagacaacatggtttgtacgtagaaagccccaaggaatctacagaaaaaactactggaagaactaataaatgaatttaacaccaccacaaaatgcaaagtcagtgtttgtataacccaaaatcagttatatttctgtatcctatcattgrgccattggaaaatacaatttaaaaacgtgtttacaattgtataaaagttaaatatttagaaataaatacaacaaaagatttgtaataaatggacactgaaaactataaaacagtgctgagagaagtcgaagacaacataaatcaatggatacatatgctgttttcattagaagactcaatagtgttagggtggcatttttctccaaattgattagatttggcacaatcccaataaaaatctcagcaagttttttcagagaaattgataagctgatttcaatatttgtatggaaagtcaaggcacatagaatagccaaaacaatttcaaaaaagaacaaaattggaagacttacattaccccatttcaagacttgctacacagttataataagacagagtggcagtggcatgagaatagatatattgttcagtggaatggagagtgtaaaaatacatgcgcatgtgtgtgtgagagagcgagagagagaatatatacacatatatatgatcagctcctgtttaacaaaaaatgctgaggtaattcaagggaaagggtagtctttcagtacacagtactagaacaactggtctgtatagaatgaaatgaatcttggtccttaccacacatcatacagaaaattagtatgagctaaaatgataaaacttctataggaacacataggaaaaaaatctttgctctattgggttacacaaagtttacgtgaacagtaccaaaaaggatgagccataaaagaaaaatgttgaaaggaacttcaacacaattaaaacttttcttctttaagaaacaaggttacggaaaatgcaagccatagattgggaaaaagtatctttagacatatatctggaaacaacctaaatgtccattgtcaaatgaatgggtaatctcatgtaccccataaatacatacacctactatgtacccacaaaaattaaaaacataaaaaaaagaaatgtgggctgggcatggtggctcacacctgtaatctcagcactttgggaggccaaggtgggaggatcacttgagccctggagttcgagaccagcctggtgataagaccctgtctctacaaaaaaatttttgaaaaattagccaggtgtggtgatgcacacctgtggtcccagctactcaggaggctgaggtgggaagatcacttgagcccaggaagttgaggctacagtgagccgtgtttgtgccaccttactccagcctaggtgacaaagcgagaccctgcctcaaaaaaaaaaaaaaaaaaatgtagtatagatccttttgtagtttttaagtgtcatgatggggtgtccatgcacatgtgtaagatgtgccactcttgaagcttgttacaacatgggcagattaccaatctcacatgaaaagaaaaaaaaaagaaatgtatatacatacagtgtttattcagcctttaaaaagaaggaaattcatgtgacaatatggattaatcattaggatattacactaactgaaataagacagtcacagaaagacagatactgcatgtttacatttatatatctaaaatagtcaaattcatagaatcaaagagtggaatgctggttgctgtgttggggtgaggggtgaggggtaagtagaaatggaagttaataattaacaggcattaaacttgagtcaagcaggaagaataagctctagagatctgctgtacaatgttgtgcctaaagttaacattaatgtatgtgcaattaaaaatttaagagggtagagctgccaggtatggtggctgatgcctataacctataatcacaccactttgggaggctgaggcaggtggatcacttgagcctgcaaatttgagaccatcttgggcaacatggtgaaaccctgtttctacaaaaaaacacaacaattagtcaggcatggtggtgtgcgcctgtagtccccgctacttgggaggctgaggtgggaggattgcttgagcccgggaggcagaggtttcgagtgagccgagattgcagcactgcactccagcctgggcaacgttgcaagactctgtctcaaaaaatgctggaatgcagtgcagtgcagtgcagtgcaatgcaatacaatgcagtgcagtgcaaaatagggtagaggtcatgttaaatattcttaccacaagagaaacaattaaacaaagatatctgaagaaggccattaaccccctatatatatgaaacctcttacaactcagtaataatataattaaaaagccaattaaaaatggcaaaactcggctaggcacggtggctcacgcctgtattcccagcactttgggaggccaaggcaggtggatcacctgaaactgggagttgaagaccagcctgaccaacacagagaaatgccatctctactaaaaatacaaaattagccaggtgtggtgatgcatgcctgtaatcccagctacttgggaggctgaggcaaaagaatcacttgaaccygggaggcggaggttgyggtgagccgagatcgcgccattgcattccagcctaggcaataagagtgaaactccatctcaaaaaaaaaaaggcaaaactcttgaacacagtgtctgtgtattgttcaagtgtatttgtttagctggatggtgagattagggatagatacataattacatttacattttgtatttatatttaatagtatatagttagttgtaaaaaaccatggataagactggaaagggaaaatgtagagagaacagagggctggggcaatacttagggaatatcagtatttaactggcagatagtagaagaggtgcctaagtaagccaccgaaggaacagttcgagtggtatgaggagcactagaagagatgtgtcgtagaagcaaaatgagatgagtgtttcaaagagaaaatggtcagtagtatctaaaaacataaagagggccaaaaaaagaagtatctggaaaatgttgattactttaacaagactgatgactttacaacagccttttcataggagtggatctaaagggaagagacagaaaccagactgtagggttttgaagtgtaacatgaattaaggaaatgaagaaaaggaggtggtatgctatagtcgttaagagtataggctgggaggccgaggcaggagggtcacgaggtcaagagattgagaccatcctggccaacttggtgaaatccaatctctacttaaaatacaaaacattagccaagcgtggtggcaggcgcctgtagtcccagctactcaggaggctgaggcaggagaattgcttgaacccaggaggaggaggttgcagtgagccgagatcgtgccattgcactccagcctggcgacagagcaagagagtttaagccgggcatgttggctcatgcctgtaatcccagcactttgtgaggccaaggcgggcagatcacctgaggtcaagagtttgagaccagcctggccaagatggcaaaaccgcgtctctactaaaaatacaaaaattagctgggtgcggtggcgtgtgcctataatcccagctacttgagaggctgtggcaggagaatagcttgaacccaggaggcagaagctgcagtgagccaagatcgcgccactgcactccagcctggattacagagtgagacttcatctcaaaaaaaaaaacaaaaaagaagataaaaaaagaagagtatggcctctggagccaggtgctggagtttcaatcctggctgtccgctttctagctgtgtgatctgtatgaaataaagaaaggaatagtacctacctcacaggtggttatagagattcaaagaattaatatacgggctcagcgctatggctcacgtgggtaatcccagcactttgggagccaaggcgggcggatcacctgaggtcaggagttcaagaccatcctggccaacatggtgaagccctgtctgtactaaaaatacaaaaattagccgggcgtggtggtgtgcgcctgcagtcccagctactcgggaggcttaggcaggagaatggcatgaacccaggaggcagaggttgcagtgagccaagactgcaccactgcactccagcctgggcaacagagcaagactctgtctcaaaaaaaaagaaaaaaaaaaagaattaatacacgaaacgtgattacagtggtgtctggcactgagtaattgctatataagtgttcttgtttttattattaaaaactgcctctgaaaaggtttgactgggaatggaagaaaaggatgtattttgctttgctggagaagggagggaaagtcaaggggaggaggagtttaaaaacatttatatgcctagagaaacctagatcaaagaaaaagccaaaggtctaaaagagagcagtgagaacagatgacgcaaggctccaaagttcagagaactgaacaagggggatgagactcaaaacaagaggactcctgactcactaggttaggggtaaggatggattctgataaataccagtatgttgcgagtgttctggtgccttcgagtttggccaattaagaggtaacgtggyatgaggaaatggagttgggggaaggatagtttggattagtttggagggtacttcgtggagaatggtgagtactttggatacccgaggaaaacaggagaaatttaacaatggacaagtaaagtgtccaaagtcttgtggtttacaaccctatatatcacaagaatttccttctccatgtctccttgtagaagtggttacataacacctagttattttattttattttattttattttttgagacggagtcttgctctgtcgcccaggcttgagtgcagtggcgtgatcttggctcactgcaagctccaccttccaggttcatgccattctcctgcctcagcctcccgagtagttgtgactaaaagtgcctgccaccacgcctggctaattttttttttttgtatttttagtagagacggggtttcaccatgttagccaggacggtcttgatctcctgacctcatgatccgcccgcctcggcctcccaaagtactgggattacaggcatgagccaccgtgcgcggccacacctagtttttgtttttttttttttaagtgaaagcagtttgcctttactttataagaagagtttacacccatgagataacttgagacaacctgaagtcttacaaaaccagcgtcagaatcattgaattaaccatcttatctcaaaagaagaaagaatgtaataaaaatcaaacaaaattttaaaaatctaggaagcttataatcattaggcctgtgattaaaaggttttctttctagttctttgtgtctttcactaacatggtacttcaggtttttaacgagatgcaaaaattactttaattgcttacctgcctaagaatcctgacttttaaattcaggaaataattgtagatataactaacaaggaaaactgtgaattttatagtctgggtaatctgagcttggggtaagyaataattaaaatttttctttctttttttttttttttttaacagtgatccttacgtgagagtgacrttatatgacccaatgaatggagttcttacaagtgtgcaaacaaaaaccattaaaaaggttagacttagcmatattcaaaagtttttaatgtactttgttttatttttataagacaaaaccttatttagttatactatgtttattattttttagagtttgaatccaaagtggaatgaagaaatattattcagagtaagtatatattttattttactaaagtggaaaaagtaagtttttttcttaggaggttagartgataaaytctcatttttaatatttgaagatgtatctcagaatttgcctaaagttgtgaaaatacaaaaggaattgaaattttgtcttataaaaaacataaatgtaagataatggagaggtaaaagactagaattatcttattctagtaaaactgatttagagactgtacagtagtcttactccagttgagcagattcagtgttttctcataaagatgatgcaaattatatttatgtctccccagtcatttattattaaacagattagggcctatcaagtgaatgcatttctttttatccacacgtcattgacattgctgcctttccaccccatctgcctcatttaccataaaagcaaattccaatcagcagttatttccaattcctcagcaaggccctcagactgacagtgtctccttgtacctatttaatatcagagtacttactgttgccagaatcgaaaccctaccagagcagtggtagagatgcattttaggaatttcccctctctggattattcccacttgtatcatccctaaaatgttcttccttgaccccatattcccctttagctgttgagtcgtttctctgttcacctgaataaggaacattcatgggagagttgtctgccctcrtcatttctgcttctccgggacgctcgttaacccactgtactctaaatccccatcactcaaatgaaactgctgttattcgggtcaccagtgacttccctgctgccaagttcatcttatctcatcttactcatgctctttgcagcatttgacatggcagatcattcctgaaacaccagcctctctggaggcttctgtggtaccatacttgatttcagtaaggaaaacagaagccgttcttctgtacttcatgtttaaagattttttgtttgtcttcttttgttcaattttaataaagtgaatttgaagggaagaaattgctgacattaagggcaaggaagctgttgctgaagatccagccaaaggcatcaattaagttgcttctgtttttttggtttggagtaagattttccccactctatgtagtatgacataaaaacaaccttttaaatcggtttggaaattttggattcttgaggaaatggtattgaatcaattggatcgtcaaatgaagaaaaatgaagctaaatttctgtttttactatttaaccagaataaattccagacttgataatgtctggttttgattgcttttttggcacaagtgttggttaggagagtgtttttaaattcccaagttgttgagttatttatttatttatacttttgttttattttacttattttgttacatttttcttagaaacatatgtattttctttttttttttaattatactttaagttctagggtacctgtgcacaacgtgcaggtttgttacataygtatacacgtgccatattggtgtgctgcacccattaacttgtcatttayattaggtatatctcctaatactatccctccccacttcccccaccccatgacaggccccagtgtgtgacgtaccccttcctgtgtccaagtgttctcattgttcaattcccacctatgagtgagaacatgaggtgtttggttttttgtccctgcgacagtttgctgagaatgatggtttccagcttcatccatgtccctacaaaagacatgaactcatccttttgtatggctgcatagtattccatggtgtatatgtgccacattttcttaatccagtctattattgatggacatttgggttggttccaagtctttgctattgtgaatagtgctgcaataaacatatgtatgcatgtgtctttacagcagcatgatttataatcctttgggtatatacccagtaatgggattgctgggtcaaatggtatttcttgttctagatccttgaggaatcgccacactgtcttccacaatggttgaactagtttacagtcccaccaacagtgtaaaagtattcctatttctccacatcctctccagctcctgttgtttcctgactttttaatgttcgccattctaactggtgtgagatggtatctcattgtggttttgatttgcatttctctgatggccagtgatgatgagcatttttacatgtgttttttggctgcataaatggcttcttttgagaagtgtctgttcatatccttcgcccgcttcttgatggggttgtttttttcttgtaaatttgtttgtgttctttgtagattctggatattagccctttgtcagatgagtagattgcaaaaattttctcccattctataggttgcctgttcatgctgatggtagtttcttttgttgtgcagaagctctttagtttaattagatcccatttgtcaattctggcttttgttgccattgcttttagtgttttagacatgaagtccttgcccatgcctatgtcctgaatggtactgcctgggttttcttctacggttcttatggttttaggtctaacgtttaagcctttaatccatcttgaattaatttttgtataaggtgtaaggaagggatctagtttcagctttctacatatggctcgccagttttcccagcaccatttattaaatagggaatcctttccccatttcttgtttttgtcaggtttgtcaaagatcagatggttgtagatgtgtggtgttatttctgagggctcttttctgttccattggtctgtatctctgttttgataccagtaccatgctgttttggttactgtagccttgtagtatagtttgaagtcaggtagcatgatgcctccagctttgttctttttgcttaggattgtcttggctatgtgggctctttcttggctccatatgaactttaaagtagttttttccaattctgtgaagaaagtcattggtagcttgatggagatggcattaaatctataaattatcttgggcagtatggccattttcacaatattgattcttcctatccatgagtatggaatgttcttccatttgtttgtgtcctcttttatttcattgagcagtagtttgagtagttctccttgaagaggtccttcacatcccttgtaagttggattcctaggtattttattctctttgaagcaattgtgaatgggagttcactcatgatttggctctctgtttgtctgtaattgatgtataagaatgcttgtgattttgcacattaattttgtatcctgagactttgctgaagttgcttatcagcttaaggagattttgggctgagacggtggggttttctaagtatacaatcatgtcatctgcaaacagggacaatttgacttcctcttttcctaattgaataccctttatttctttttcctgcctgattgccctggccagaacttctaacactatgttgaataggagtggtgagagagggcatccctgtcttgtgccagttttcaaagggaatgcttccagtttttgcccattcagtatgatattggctatgtgtttgtcataaatagctcttattattttgagatacgtcccatcaatacctaatttattgagagtttttagcatgaagggctgttgaattttgtcaaaggccttttctgcatctattgagatratcatatggtttttgtctttggttctgtttatatgctggattacgtttattgattgcgtatgttgaaccagccttgcatcccagggatgaagcccacttgatcatggtggataagctccttgtacctttggtagaattcagctgtgaatacgtctggtcctggactttttttggttggtaggctattaattattgtctcaatttcagagcctgttattggtctattcagagattcaacttcttcctggtttagtcttgggarggtgtatgtgtcraggaatttatccatttcttctagcttttctagtttatttgcatagaggtgtttatagtattctctgatggtagtttgtagtttgtatttctgtgggattggtggtgatatcccctttatcattttttattgcgtctatttgattcttctctcttttcttctttattagtcttggtagcggtctatcagttttgttgatcttttcaaaaaactacctcctggattcattgattttttgaagggttttttatgtctctctctccttgagttctgctcttaccttagttatttcttgtcttctgctagcttttgaatgtgtttgctcttgcttctctagttctttyaattgtgatgttagggtgtcaattttagatctttcctgctttctcttgtgggcatttagtgctataaatttccctctacacactgctttaaatgtgtcccagagattctggtatgttgtgtctttgttctcattggtttcaaagaacatctttgtttctgccttmatttcgttatgtacccagtagtcattcaggagcaggttgttcagtttctatgtagttgagcagttttgagtgagtttcttaatcctgagttctagtttgattgcactgtggtctgagagacagtttgttataatttctgttcttttacatttgctgaggagtgctttacttccaactatgtggtcaattttggaataagtgtggtgtggtgctgagaaggatgtatattctgttgatttggggtggagagttctgtagatgtctgtttggtccacttggtgcagagctgagttcaattcctggatatccttgttaactttctgtctcattgatctgtctaatgttgacagtggggtgttaaagtctcccgttattattgtgtgggagtctaagtctctttgtaggtctctaaggacttgctttatgaatctgggtgcttctgtattgggtgcatatatatttaggatagttagctcttcttgttgaattgatccctttaccattatgtaatggctttctttgtctcttttggtctttgttggttgaaagtctgttttatcagagactaggattgtaacccctgctttttttgttttccatttgcttgatagatcttcctccatccctttattctcatgagcctatgtgtgtctctgcacatgaggtgggtctcctgaatacagcacactgatgggtcttgactctttatctaattcgccagtctgtgtcttttaatgggggcatttagcccatttacatttaaggttaatattgttatgtgtgaatttgatcctgtmattatgatgttcactggttattttgctcgttaattgatggagtttcttcatagcatcgatgatctttataatttggcatggttttgcagtggctggtactggttgttcccttccatgtttagtgcttccttcatgagctcttgtaaggcaggcctggtggtgacaaaatctctcagcttgtctataaagggttttatttctccttttcttatgaagcttagtttggctggatatgaaattctgcattcaaaattattttctttaagaatgttgaatattggcccccactgtcttctggcttgtaaggtttctgctgagagatttgctgttagtctaatgggtttctcttagtgggtaacctcacctttctctgtggccgcccttaacattttttccttcatttcaacgttggtgaatctgacaattatgtgtcttggggttgctcttctcgaggaatatctttgtggtgttatctgtatttcctgaatttgaatgttgtcatgccttgctaggttggggaagttctccttgatattatcctgtagagtgttttccaccttggttccattctccctgtcactttcagctacaccaaacatagagttggtcttttcacatagtcccatatttcttggaggctttctttgcttctttttattcttttttctctaaacttgtattctcactttatttcattaatttcatcttcaatcagtgatagcctttcttccacttgattgaatcagctactgaagcttgtgcatgtatcacaaagttcttgtgccatggttttcagctccatcaggtcatttaaggtcttctctacactatttattctagttagccattgggctaaccttttttcaaggtttttaggttccttgcaatgggttagaacatgcttctttagcttggagaagtttgtttttaccgaccttctgaagcctacttctgtcaactcatcaaagtcattctccttccagctttgttctgttgctggcgaggrgctgcgatcctttggaggagaagatgcgctctggtttttagaattttcagcttttctgctctggtttctccccatcttggtggttttatctacctttcatctttgacgttcgtgacatacagatggggttttggtgtgtatgtcctttttgttgatgttgatgctattcctttgtgtttgttagttttccgtctaacactcagttccctcagctgcacatctgttggattttgctggaggtccactccagaccctgtttgcttgggtatcaccagtggaggctgcagaacagcaaatattgcaaaacagcaaatattgctgcctcatccttcctctggaagctttgtcccagaggggcacctgcctgtatgaggtgtctgttggcccctactgggaagtgtctcccagttaggctacacgggggtcagggacccacttgaggtggcagtctcttgttatcagagctcaaatcccatgctgggagaaccactgctctcttcagagctgtcagatagggacatttaagtctgtagaagtttctgctgcattttgttcagctatgccctgctcacagaggttgagtctatataggcagtaggccttgatgagctgaggtgggctctgcctagtttcagcttcccggctgctttgtttacctactcaagcctcagcaatggtggacaccccttaccccaccagtctgcagactggcaggtcgatctcagactgctgygctagcagtgagcaaggctctgtgggcatggtacccgccaatccaggcatgggagagaatctcctggtctgccagttgataagaccatgggaaaagcacagtatttggccagaagtgtcctgtttttccaggtacagtttatcacagcttcttttggctaggaaagggaaatcccctgaccccttgcacttccgaggtgaggcaatgccccatcctgcttcggcttgccctctgtgggctgcacccactgtccagccagtccaaatgagatgarccaggcacctcaggtggaaatgtagaaatcacccgtcttctgcgtcaatcataccgggagctgcagacaggagctgttcctatttggccatcttccaatcattacatcttaaagctccaaaataatctcctttgactctgtgtctcacatccaggccacactgatgcaaggggtgggttccgaaaggccttgggtgtctccacccctgtgtctctgcaaggtacaatcccttcagctgctttcacaggctagtgttgagtgcctaagggttttgcaggcaaacagtgcaagcggttagtcaatctcccattctggggtctggacgatagtggcctacttctcacagctccactaggcagtgtcccagtgggaaccctgtgtggggactccagtcccacatttcccatccacactgccctaatagaagttctccatgagggctctgcccctgcratatccagacttctgtgtggatatcgacacatttccatacatcctctgaaatctaggaagagctcctaagcctcagctcttgccctgtgcccacctgcaggcttaaaaccatgtgaaagccaccaagacttacggtttgaaccttctagagcagcggcctgagacatatctgggcccttttacccacagctggagctggagtggctgggactcagagagcagtgtcccaaggttgtgtagggcagcagggccctgggcctggtctatgaaatcattcttcccttctagtcctctggggctgtgataggagkagctgccacaaagatctctaaaatgcattcaaggcatcttccccattgtcttggctatgaacattcagctccagcagctggcttgaattcctccccacaaaatggggctttcttttctaccacatgatcaggctgcacatattcccaacttttatgctctgctttccttttaaatataagttccagtttcagatcatttctgtgaatgcatataagcatatggttagaagcagccaggccacttcttgaacactttgctgcttagaaatttcttctgccagataccgtaaatcatctctttcaakttcaaagttccacagatttctagagcaggggcacaatgctgccagtctctttgtagaagcatagcaagagggacctttatttcagttcccaaaagattccttgtcttcgagaccacctcagcctggactttcctgttcatatcactatcagcattttggtcacaaccattcaacaagtctctaggaaattctatctttccatcatcctcctttcttcttctgatctctccaaactgtttcaacctctgtccattacccacttctaaacttgcttccacattttcaggtatctgtatagcaatgcctgacttcccattaccaattttctgtattagtttgttcttgcattgctataaagaactccctgagactgagcagtttataaagaaaacggstgtaattgactcacagttccacaggctgtacaggaagcctggmtgagggggcctcaggaaacttaacaattgtgacagaaggtgaaggggaagcaggctcatctaacatggccagagaaggaggaggagaatgaagggggaagtactacacacttttaagcaaccaaatctcataagaagtcgcttactatcaccagagcagcaagggggaagtctgcctccgtgatccggtcacctcccatctggcccctcctccaacattagggattacaatttgacatgagattttggcagagacataattccaaaccatatgagataccatacaaacaccagaaaaaatatgttaatggttgtattaacattagccaaattagacttcaggacagtattgccagagataaagagggcatttcatgattataaagagtgaattcaacaagaagacatacaatctgaaatgtgtatggacctagtaatctttaaaattacgaagtcaaaattgacagaactaaataaataaacaaatccacaatagttgattttaccacttctagtaactgatacaacaactagacaaaaaaaaaatagtaaatatatagatgatttgaacaacactaccaatcatgttaacctgtttgacatgtatagtacactacagctaatacccaagtgtatattctttttatatgcccatggaacatttaccaagatagaccacatattgggccacaaaccgagtttcagtacagttaaaaggattgaaattcaacaggattggctgggcgcaatggctcacgcctataatcctcgcactttgggaagccgatgcaggcakatcacttgaggtcaggaatttgagacaagcctgaccaatatgatgaaaccccgcctctactaaagaaaaaaagtatacaaaaagtagctgggtgtgatggtgcgcacctgtaataccagctacttgggagactgggcacgagaatcgcttgaacctgggaggcggaggttgcagtgagctgaaattgtgctgctggactccagcctgggtgacagagtgagactctgtctcaaaaaaaaaaaaaaagaaatttaacagggtatgttctctgatcacagcagatttaagttacaattcagtaacacacgtatgtatatcacaaatgtttagaaattaaacaagtttcttttgaataagccatggatcaaaaaagaaaataaaagggaaattaacaagcatttttactgattgattgttaaagcataacataccaaatgtgggatgaagctatttcagtgcttagagattaatttatacctttaaatacttgtatataaatgaagaaatattcaaaatcaatgatctaagcttccaccttaagttctttaaagaaaaagaaggaaggaaataagagtggaaatcaatggacaagaaaatggacaaaaagtagagaaaataaataaaaccaaggatggatcttcaaaaaaattaatgaaattgatatacaacagctggccttatatgagagagacagagagagtactcagatgaccaatattaggaatcagaggagggaacctacagatactttttaaaaggtaatattgtaactaattttatgcctgtaattttaacaactcagtttaaatggataaattcttataagccaaaatatactaaaaccaatataagtagaaacagaaaatatggatatctgttagaggaattaatgttataatttattttttattttaaaaaatttaaggtgcttataatttaaaaatattgccattctttttgatgatcttattcttttattagaaagaatgtttggcctggcatggtggctcatgcctataataccagcacttcgagaggccagggtgggccccctaaaagtttaaggtcatcctgagcaaaatagtgggaccccatctctaccaaaawaaaacgaccctcttcacaaggcatggtggcacacacctatagacccagctactttggaggctgacatgggagacaattctttgagccaaggaattcgaggataccgtgggcaacatagtgagacagtcccaaaagaaagagacagagagaggcagagaggcagagagagagagagagagagagagagaagggggaggagggaaggaggaaggagggagagagggaggaaggactactttggaattagagatgttaatgagaaaaataagccatttaaacaaaattttaactgatttattgggggtatagttcatatagaaaaagcctgcacatatttaattcatacagtttgataggtttaaacatatgcatacagctgtgaaaccatcaccacaatcaaagtcataaacatatccatcacctccaaaagtttcctcctatcacccccttttttgtggtaagaacacttgatatgtaccctcttcacaaaggttttggtgtataatatagtattaaaccaccattctattctctgcttctatgaatttgactattttagatactttttgtgagtaagatagtcagtatttgttcttctgggactagcttatttcacctagggtagtgtcctcaaggttcatccattttgttggaaatggcagggtttcctttttgaaggctgaataatattctattgtatgtatatgtcacattttcttaatgtatccttcaatgggtatttagattatttccatatcttggctactgtgaataatgctgtaatgaacgtgggagggcagataactttaattgcagtgattttatttcctctggctgcatacctagaagtgggattgctggatgatccagtagttctactttttaattttttggggaacctttatactgttttctatagaggctatactattttctgtagaggctggagcattttacattgctaccaacatgtgcagggattccagtttctccacatcttcaccaaaacttgttaactaaaaaaatctaaaaatttttgtaatagtcatcctaacaggtgtggttttgatttgcatttccctgatgattagtgatttttgagcacctttttacataaagagtgggccatttgtttgttttctttggagaaatgtctgttgaagtccttggttcattttttaaattaggttctttgttgcttgtattagtccgttttcacactatgataaagatactacctgagactgggtaatttataaacaaaggaggtttaactgactcacagttccacatggctggggaggcctcagtcatggcagaagatgaacaggaagcgggcaccttctccacaagatggtaggagacagaagagaaagtgaagggggaggaaccctttgtaaaactgtcagatctccagagaatgaactcactgtcatgagaacagcatgggggaaactgcccccgtgatccaatcacctcccaccagttccctcccttgacacgtggggattacggatcgagatgagatttgggtgggcaacagagccaaaccatattattgttggtggtgggtttttttgtttgtttgtttgttgttgttgttgttttcgagacacggtctcactctattatccaggttggagcgcagtggcacaatcatggcttattgcagcctcaaccttctaggctgaaatgatggcctacctcagcctccctagtagctgcaaacacaggtgcacaccatcacgcaccaccatttttattttattttattttttgtagtgacacactgttttgcccaggctggtctcagactcctggattcaagtgatcctcctgccttgccctcccaaagtgctgagatcacaggcatgagccactgtgcctgggagtttattttattttgttattgttgttgttgttgatgcttgttttttttttactattgggttatgggagttccttttgtatgtaattttgaagtttggagatcaactctttatcttatacatggtctgcaaatatttttcccattttgtacggtgccttttcactttgttgattgtttcttttgtcatatagctttttagttaaatgtagcygcacttgtcaatttttgctttcattgcctttgtttttggtgtcacccaaaaaatcattgtcattgtcaagaccaaagtcaagaagcttcttctctgttttcttctatgggttttacagtgtcgggtcttgtttgtgtctttaattcattttgagtttatttttgtgtttgttttaagataagggtcaatttctttcttttgcgtatggatatccagttttcccaagccatttgttgtttttttgttttgttttttgttttgttttgttttcagacagtctcactggaatgcagtggcacgatctcggctcaccgcaaccaccacctcccaggttyaaatgattctcctgcctcagcttcctgagtagctgggactacaggcacacgccaccatgcccagctaatttttgtatttttagtagagacagggtttcactacgttggccaggatggtctccatctcttgacttcattatctgcccacctcagcctcccaaagtgctaggattacaggtgtgagccactgcgcctggccaccatttgttgaagagactgtcctttcccctttgtgtatgcttggcacctgagtcaaagatcagtggactgtatttcttgggtttatttttgagctatctatttcatccgtctctgtctgtcttaattcctgtgtcatactgttttaattactgtagctttgtgatatatttggaaatcaggaactattatgcctctagctttgttcttctttctcaagatgcagggtcttttgtagttctgtatgaattttaggattatgtgttctatttctttaaaaagtaccattggaattttggtgagtgtaacattgaatttgtggattactttggatagtatggacattttaacaatattaagttcttccaatccatgaacacaggatgtctttccatttatttttgtcttgaaagaaggctatttgtaattgacaaatcaggattaggactctactgccatttccttattttttattttattttctataacttccctattaccaaatgttttagctagtyacatttaccaaatatttacttcatttttgggatcacaggctacacatttgtttcaattagaaattctgctattttattataaggataactagataaatttgtgtggatcaatgctaattcattatgcttagaaaaaaactgaaaacatacggtgaaatatcttctgtgcaaaggacattattatgtgtggtcctctattttcctctttgtcayttatatcatcatttttatatagcccagaatgttttgaactgaatgtattcgccataaaaatgtctgttgagataacatattacagcaaaaacttggttcttgggcattcggccaaatggaaattgtggtcagaagttgaaggcagttttatatctttgagaaaacatgaagttcaaaaaaagtttttgtgaaaaactgttattgacaacacaaacgggaaactccaagttgaagttagtgctcaatagcaaattatggccaggcacggtggctcatgcctgttttcccagtgctttgggaggccgaggagkgtggattgcctgaggtcaggagttcaagaccagcccggccaatatggtgaaacctcatctctgctaaaaatacaaaaatcagctgggcatcatggcgcatgcctgtaatcccaactactcaagagggtgaggcaggagaatcacttgaacctgggaggcagaggttgcagtgagccgagttcacaccattgtgctccagcctgggtgacaagagtgaaactctgtctcaaaaaaaaaaaaaagaaaasaaatagcaaattataattaaaatctacactttacatgcttagagggaaaaaagtgcaacacattaggtgcaatgcacatgttatttactctgtgcataagaattgtgcttgggcatctgaaaaagcctcaccccatttcctacattctgcaggtgctctgtgtatatttttagcattcatactcaatatattagatttatgtaatgtatatatatgcaagtgtatgtttatattatgttatagaagtaatataacttatgcaagatagtttttttaataaagagaaatgaaaatcagccataatttcatctygataaaccaccactgataatatgcttttctgggatttcctatgtgtttttttttcttttgtatttttatggatagggggaaaaaacttacctacatacgcacacaaatttggcgtgatttttttctatacctatttctcaggcactttgctatgattgttaatgagatggccacagtacctaccctcaatgaaacttactgtctagtatggaccagtgtgaacaggtaactcataattattaccagtgtgctgagctttatggaagggaaaacaatgataccggagagtaaatacagggttgggggatcacttagtctaggaggtttaggagggacccctctgacaaagtgtatcatttaggatgcttttagcttcaagttatagacttgaagtagcaatgaaaactgccttcacaataagcacactgattagctttaatcataagaagcatagaagaaggttggtcattgcagcaggtgaaagaagtcatgcttgacccagcttctctgggattctcttggctttctctctgtggtcacagatacttacagcagttccaaagacatgatgatgtccagaggctgaaaagggagagctttttgctgagtatcttttttttttttttttttttgaaacagagtctcactctgtcgccaggctggagtgtagtggcacgatctcaactcactgcaamctctgcctcccggattcaaatgagtctcctgccgcagcctcccgagtagctgggactacaggcgcatgccaccacgcttggctaattttttgtagttttagtagagacagggtttcactgtgttagccaggatggtctcgatctcctgacctcatgatccgtctgcctcagcctcccaaagtgctaggattacaggcatgagccaccacgcccagcctttgctgagtatccctttaaaaaagtaaaaaacctttttccagaagactttggatctttttctcttgggccagaattgtgtaatgtgcatatttcctaccccattgttggtgaggaaaatggtgttaccctaaggcttagaggaatcaaaattcagcccctgggagagaggagttgctgtctatccctgacagacatagtcacccaatatttgaataaaattataattcttttagctaggaagaaggcaggacaccccatcagtggagcagtaagtaaattatgatacattcatacaacgaaatcctaatctactgtttaaaaagaggcaggtttatatgttgttatagataattcatttcagattatactaaatgaagcaagaaaaatgcagaacaaggccagacatggtggctcatgcctgtaatcccactactttgggaggccgaggagggtggatcacctgaggccaggagttcaaaaccagtctggccaacatggtgaaaccccatctctactaaaaatgcaaaattagccaggcatggtggtgggtgcctctaattacagctacttgggaggctgaggcaggagaatcacttgagtctgggaggcagaggttgcagtgagccgatattgtgccactgcactccagcctgggcaatagagtgagactccatttccaaaaaaaaaaaaaaaaaaaaaaaaaagcagaacattgtatataggaatatattatttgtgtaaaaccagaaaaatttttaataaaataaaattttaataataataaaatttcttatatgctggtatttttagaaaataattctggaaggacctaagaaactgtttactgtatttgctctgggggtgggacaaaggtaagacagagatttataatttactatatatccttttttactgtttgggttttttctccgtggccgtatatctacagtttatttttatatttattgattaaactatttgcataaagaaataaagtggaaagacataaaacatttaaattaaaatgccggaatactttctattcatatattgttttatgcttatgaaaatacttgtctaattcacttaactttttacacttttacagtgttattaaaatatatgcacagaaaacttgcgcaccaatgttcgtagcagcattattcataatagtcaaaaattagaaacagcacaaatgtccatcaactgataacaaaatgagatatacacatataatgaaatatcattcatcaataaaaaggaatgaagtattgatacaagttacaacttggatgaaccttgaaatcattatactaagtgaaagaagctgtattagcccattctcacactgctcataagatatgcctgagactgggtaatttttttaaattatcattattattattattttgagacagagtttcactcttgttgcccaggctggagtgcagtggcgcaatttcggctcactgcaacctccacctcctgggttcaagctgttctcctgtctcagcctcccaagtagctgggattacaggcgtgtgccaccacacccagctaattttgtatttttagtagagacgaggtttcaccctgttggccagaatggtctcgaactcctgacmtcaggtgayctgcctgcctcggcctaccaaagtgctgggattacaggtgtgaaccactgcctccagccaagactgtgtaatttataaaggaaaaagttttaattgactcacagtttagcatggctgagaaggcctcagaaaacttacaatcatgatagaaggggaagcaaacacatccctcttcacatggcagcagcaagtagaagtgtcaagaaagaggtggaaaaccccttataaagccatcagatttttttttttatactttaagttctagggtacacgtacacaacgtgcaggtttgttacatatgtatacatgtgccatgttggtgtgctgcacccattaactcgtcatttgcattaggtacatctcctaatgctatccctcccccttccccctccccccaccccacgacaggccccagtgtgtgatgttccccttcccgtgtccaagtgttctcattattcaattcccacctgtgagtgagaacatgcggtgtttggttttctgtccctgtgatagtttgctcagaatgatggtttctagcttcatccatgtccctacaaggccattaamtcatccttttttatggatgagtagtattccacagtgtatatctgccacattttcttaatccagtctatcattgatggacatttgggttggttccaagtctttgctattgtgaatagtgctgcaataaacatacgtgtgcatgtgtctttatagcagcatgatttataatcctttgggtatatacccagtaatgggatggctgggtcaaatggtatttctagttctagatccttgaggaatcgccacactgtcttccacaatggttgaactagtttacagtcccaccaacagtgtaaaagtgttcctatttctccatatcctctccagcacctgttgtttcttgactttttaatgatcgccattctaactggtgtgagatggtatctcattgtcgttttgatttgcatttatgcaaactctctgatggccagtgatgatgagcattttttcatgtgtcttttggctgcatatgtcttcttttgagaagtgtctgtgcatatcctttgcccactttttgatggagttgtttgatttttttttcttgtaaatttgtttaagttctttgtagattttggatattagccctttgtcagatgggtagattgtaaaaattttctcccattctgtaggttgcctgttcactctgatggtagtttcttttgctgtacagaagctctttagtttaattagctccaatttgtcaattttggcttttgttgccattgcttttggtgttttagtcatgaagtccttgcccatgcctatggcctgaatggtattgcctagcttttcttctagggtttttatggttttagctctaacatttaagtctttaatccatcttgaattaattttcgtataaggtgtaaggaagggatccagtttcagctttctacctatggctagccagttttcccagcatcatttattaaatagggaatcctttccccgtttcttgtttttgtcaggtttgtcaaagatcacatggttgtagatgtgtggtattatttccgagggctctattctgttccattggtctatatctctgttttggtaccagtaccatgctgttttggttactgtatccttgtagtatagtttgaagtcaggtagcatgatgcctccagctttgttcttttggcttaggattgtcttggcaatgcaggtaaagccatcagatcttattacaactcactcactatcacgaaaacagcatgcaggtaaccgcccccatgattcaattacctcccaccaggtccctcccactacacaaagggattatgcgaactacaattcaagatgagatttgggtggggacacagtcaaaccatatcagaagccaattacaaaagaccatatattgtatgattccacttacatgaaatgtccagaataggcaaatctatggagacagaaagtagattagtggtttcctgggaaggttgagggaaaatggggagtgtctgttaaaagacataaggtttcattttgtaatggtaaaaatgttctaaaattgtggtgatggttgcacattctctgaatatattaaaaaccattgaattgtatacttcaaagggatgagtgtatgctatgtgaattatagctagtaaagctattttaaagatgtatctgtattgtttgttcccacaaccactggcagaattttcaagaatattgcttcagtttctttatgaacacaatagaatcatatacttaccaacacctttgttctttttggaaaactggatattttttggcaacttttttcctctgttgttttatgcatttatagactaacatagttatcctttttttcaataagtctgtcactgatatttttattttttttctgcttttgcctttccttaaaatatcatcttataaactctattttttgtgagcatagttttacttctatcttcaataaatttaaaaaatcttgtgaaagaatttgcacatagttttaaaatgagatagtataaaagggcttataatgaaaaacaacaaattctggtgttctgtcctccctcctattcctgctacccactttttaactgtttctgtttgttactctgatcatatttcccatattattaaaaagctcatgcatgcatgttccaagttgatttccaactgtgatagatgaataaatagccaacttatgtttggctgttcataggattcttgggtgaacataaatttgaagacattgctttatcatcttttacaattgtattttgtattcctgttgaaagatatacttgttccttttttctccctctttccttctctttctctgaaaaatttaataattatctttacrcccgtgttttaaaatttcacagttatatgccttgtatgtacagtttttaaaatccattgtgtttggcctttggtaagtgaattagtccattctgatgctgctagtaaagacgtacccaagactggataatttataaaggaaagaggtttaatggactcacagttccacatggctggggaggcctcacaatcatggcggaaggcaaaggagaagcaaaggcatatcatacatggtagcaggcaagagagtgtgtgcagggaaactcccatttttaaaaccatcagatctcctgagacttattcattaccaggagaacagtatgggggaaactacccccatgattcaattatctccacctagccctgccgttgacacatttggattattacaattcaggtgaaatttgggtagggacacagtcaaaccatatcagtaagcatttcagtctaatgaatactgtttctcttcaactctggaaattgtgtgaataatttcttcaataattttcttccctctgtttgtattatcatttggggattccaactagttgaatggaaggtcacctagagtgattttctgttcttctcaatcagaattcctcatgtgaaccacagactcagaaaatggtttgactaacttttttctcacatcttccaaggctagtcttaaccagtaccattctagatacatgagagaaattaatagataacatacagtgattgtctaggacgagggtcagtgaactttttcttaaagggacagatagtaaatattttcggtgttgtaggttgggaggcaaaatcaaggctatggtgtaggtatttatatacctatctgaaatgtaaccatttaaaaatataaaaaatattcttatcttgtgagccattaaattaaaaagtagatggctagctggatttagcacacaagccataatttgcccagcctctttttttagggcattaggggttaattctttcactgactctgttcagaaaatcctcttttttattttcactcatttcccttcaacttagttttttattttacctttggggagatttccacaaatttttcttaaagcacttctattttaattcaacagtcgtttttcattccagcacttcttttttgttttccagttcccttttttagtatcttgtttttgttttatggatgcaagacattcctaaatgtttctaaggatactccttatagtttttaaaactcttttcttttgtttcctaaattatctctttttcctttgaggacagtttttctaatttgtacgttcgtgatctctggtaatctatcatacttaacagtgataaaacagaaaaatcatctgttgtttctctaggtaaaatgcataaacatttaacaattatatgttacaattttagttaccatttatattttatatattaaaactgatgcttacaggaacagaaaaccaaccaccacatgttctcacttataagtggaagttaaacgtgagtacacatggatacaaagacaggaacaatagacaccgcggcctgcttgagggtagaggagaggaggagggtgaggatagaaaagctgcctgttgggtactatgcttattacctgggatgaaataatatgtaccaaaaaaacccataccacacagtttatctatagaaccaacttgtacatgtactcccaaaactaaaataaatttttttaaaaaaggaaaaaaatctgatgcttatattttcattaaatctcctcctgaaatcagacataaagagaaaatctctaataagagggtgtgtgtgcgtgcgtgctcgtgcatgtgtgtacatgtaccatctggaggctaaggtggtatttgagacattctgtcattagggcagttgcccctgttgctttgacactctgttctttcggtggttttcagcttcctctgccctccatcatcacttccatccctgcttcatctgtctgctaggtaactgttgaaattactcagctgctgatggccctctcatcttctttgctgtaatggttttatatcttttacaaactattacctatgatttaaatagactctcccaagagagaagatagctgtttatgttcatgttttaattagtatttttaatttttaattagtattctcactacacattttaaactatatttttgcatttattatatgcttctgaaatacaaaaagcaacatgaataagtcatttgtgatgtttataactcagtagggagatatcacacatatgccaaattaactttaataaaaggaaaaaatgtagtaaatctgatcaactactttgaaaatagaggagtggtagtgaatggggaggtcaggctctagggagaggttggcatttgagctgggcttgaatgatgagcacagtgtagacatgtagagtggagaaggtgttgcaagtggatagaccktaacatgctcagaagyacaaatcagaaaatgcaagaagcaattagtagtgagtttccagtgtgattacagtatagggtagatgcatatttggttgggcagggggacatttgtaggacacaaggccagaaagggaaattggactcagatcatgaaggatcattccatactcaggcttttggattttgttatttagaccattggggacaacttttaagtagggtgtaaagatggcttaaatgtcttctaggtaagtccgattacagtacgaaagatagattaaaaagataagataggccaggcgtgatggctcacgcctgtaatcccagcactttgggaggccgaggtgggtggatcacctgaggtcaggggttcgagaccagcctggccaacacggtgaaaccctgtctctactaaaaaaatacaaaaattagccaggcctggtggcacgcccctgtagtcccagctacttgggaggtcgaggcaggagaatcgcttgaacccaggagacggaggttgcactgagttgggattgcaccactgtactccagccagggtgacagagtgagaagggaaaaaaaaagatagttgaggtagtgaatcctgttataagctattaattacagtctgaaccaggacagcagattagtttcttagcaatattcattaaacatctgcagtgtctgctagatattttgatagacattgatactttggaggtttttcctcaaaatggtttctatagccctgtctccctccctactccaactggggccatcctaagmaaagctctgctgactccctgcctgagttactagggctccagctcctgtagacaccagggtctgtctccagtccaattcattttgtgcaccactgacaaaataatcttcagatgtgacctaaattatgtcatttctccttttaaaactgctttgatccccctaccaatcaagtcttaactcttcttctggatgtcagtgtccccatcctggctctaccctaactaaccaaacttttcttgccagtgtctaatgcaaaaatattcttgtgaggccatgacgggaggaacacttgagcccaggagttcaagatcagcctaggcaacacagtgagaccttgtctctgcaaaaatttttaaaaaattagccgagcatggtagtgcatgcctgtagaccctcaggaggctgaggtgggaggattgcttgagcctggttgcactgagctgtgatcgcaccrctgcattccagcctgggtgacagagtgagactctatctcaaaaaaaaaagaatcttgtcgtctttgtctgtctcatttccttagagcacgctcattctgcccccatgccttcttttctcatgtgaccttgctgtgcatgttctctataccttctcatttaaattcttcccaactttcaagtcttagctcagttacatctcctcaaaagttcttctacatcttctttgaaaaaaaatcatcttacactgtttttctttttctttctttcttttttttttttttttttttttgagacgtagtctcactctgttgcccaggctggacagtgcggcggcacgatcttggttcactgcaacctctgtcccccaggttcaagcgattctcctgcctcagcctcccaactagctggggttacaggtgcctgccgccacacccagctaacttttgtatttttagtagagacagggtttcaccctgttggccaggctggtttcagactcctgaactcaagtgatctgccttccttgacctccttaagtgctgggattacaggcgtgagccaccatgcccaccctttttttggggggtgtggtggaggggaggggacaggtttgcactctgttatctaggctggagtgcagtggcacgatctcggctcactgcaacctccgcctcccaggttcaaacgattctcgtgcctcagcctcctgagtagctgggactataggcatgtgccatgatgcccagctaatttttgttatttttgtagagatggtctccctatgatgcccaggctggtctccaactcctgggctcaagtgatcctcccacctcagcctaggagtgctgggatgacaggtgtgaaccagcacatccggccgtcttaacactatttttccctccccatgttgtctagccttatgtttggcatgtctatcctcagttactccatggtcacaatacggctgcaggagtgccagctatcctaacaacatttcagacaggaaagataaatgcaaggggcaaaagggacatctctcccagctgagtcagccacctctgaaaagctctcctgaggagtgactggcactaggttggcttcattggttgcccgtaggtacaagggatacatttctagatagacatattcagggtctccatgttaaacaattccataggacaccattcacaaaaaaacaatatatagaatagaacagagtattcaatatctttatctgggtttgatacatatacgtatgtatcatatacatgtacagtatgtatatgtatttttacatahgtatatgtattttacatactgtatatgtatatgatacataygtatatgtattttacatactgtatatgtatatgatacatatgtatatgtatttttacatatacatactgtatgatacagtatgtatatgtaaaaagttatcaagctatatagttaagattagtatacttttttcttcctcatcccaacattagtatactttatacttcattgaatatgtgttgtacttcagttttcaaaaattagtggtttcctcaagaggtgtgcagtgtgatgagcctgggaacgtggctgtaggtaaaactaggattatgttctcagagggaaaagtagacactgagttaggtatctagatatctttgtcacaagcataggacttttttctatcaatagttttgacatgtacaccaatgttttaagatatcacagtgttcaatataatatatatagtaggcgatttttattttgatatcgaaacattcccacaagaatgaaagcattggctttgaaaaacaaaatattgcttgtaatttttattcatgtgctacaaagcttaaaccttaagtgaaaacgcagtgtatacttttgactgctatgtactttatatagtaaaagcaacatgtaattttattaagtcaataataaaaggattcacaacactagtttctgaaaaatgtccactttgggtggctctaaactgattaataaaaagcaagtaaataaaactgatcataaggtgtcaaaatctaatctgtatttataagcgtttgcaaacatttaagtaatcttttgaaattttcttttacttcctttcgttctgttagaaaaatctgaaaaataaacaaccagattcactttgttgttgttgtgaaactactagaaaatgagtgacacatgactagtctgctcttatttcatgtaattttaaaatgcattccaaataatcggaattagaaaatggcaacttctttttgtttgtttgttttgttttgtttttcttgagatggagtctctctatgtcgcccaggctggagtgcaatggcacagtcttggctcactgcagtcaccacctcccaggttgaagcgattttcctgcctcagcatcccaagtagctgggactacaggcacatgccaccatacctggctcatttttgtatttttagtagagacgaggtttcaccatgttggccaggctcgtctcgaactcctgacatcaggcgatccacccacctcggcctcccaaagtgctgggattacaggcatgagccaccatgcccgaccaaatggcagcatctttaagcatttatttctgagtatctgtgggttgatgtttacttgtttttaaataaagattgtgtttttcttaggttcatcctcagcagcaccggcttctttttgaagtgtttgacgaaaaccgattggtaagttatattgtgcttatatgaaatatgaagtaagggtacatttcagtrgagcagccaggggaagtgggtaagcagtctgggatttgagwgatggcttgggggtggttatggagactctgggcaaaatggtgagggagatagaatttgttttcttcctcctggtcctactcgctccctttccattctcctcccaagcacctcttctgattgccaacatattataaggtcttactcaagacctcttgtgacaggagaggacagaaaaccaacctctttgtcctgccttccctctcactcgcccatgacccctggttcctactccatggctctgggaatcttcccagggtatccttcagttgcgcctcctcactacagtggcctttcttagggttacctgtatccaatggacatcctatccactctctcatccccactcttctacagaggaaatctgtcctttttacactgataaggaatgagcaaataaagtcttctcaaagatggccagctcttacagaagcaaaaagcaaagttaaacctgatgttctttttataaaatgattgttctgatttctgaattcctaaagactctcttaaagtcctatccttttcctaattttgtctctgaggatccaatctcaaaccctcatcttagcatcttacatctatattttaaacctgtaagatttgaacaggtaagtatagaaacagtgttatgtgtgcaaagcttatcagttacaagcaccagaaaaattaaacagttttgttcattttttagctaacagagaaactagcttttttttwaaaaaaaagtctgtttttagtgttaaactacattcatgttttttttgccctcaagaaatggtaattatactggcaactaaagatattgccaatgaaatctttaataaacatcatactaagcaaaagtacattattgctgccaaagaagactatcactgacttgctatatatatatatatttttttttttttttgagatggagtctcgctttgtcgccaggtgggagcacagtggctcagtctcaactcactgcaacctccgcctccagggttcatgcagttcccctgccttagcctccctagtagctgggaccacaggcgctcaccaccacacctggctaatttttgtgaattttagtagagatggggtttcaccatgttggccaggatggtcctgatctcctgatctcgtgatccgcctgcctctgactcccaaagtgctgggattacaggcatgagctgccatgcccagcctggccatctaatttttaaggctaagtgacagatgttgctgatttgattatcagatatggttagttacagagctatttgttttctgtctgtgtttttgcttgtttaaaagaatataaaatgttttcctttttttcccctctgaatctatagacctgttttcctttatttattattattattttttgacagaatctcactctgttgcctaggctggagtgcagtggcgcagtctcagctcactgcaacctctgcctcccaggttcaagctattctcctgcctcagccttccragtagctgggattacaggcacccgcctccttgcccagcttatttttgtatttttagtagagacggggtttcaccatgttggccaggctggtcccttctagatggaaacaaattaaactttgtattggtggagtttttgtgtgtgttttgtttttaactcatgaaatatacatacaaaaaagcccacataatataaatattttaaataataagacaaatatgtatacacgttactcagcttaagaactagaacattaccaaaatctttgaaaccctccctagatccctccttagtagcatcttcttttcttcctccacaagtactagccactgtcctcaattttgtttttatcattctttgctttttaaaatacttttatcacatgtatatatatccccaaaaaacacattgttggccgggcatggttgcttatgcctgtaatcccagcactttgggaggccgagttaggtggatcacctgaggtcaggagttcaagaccaggctggccaacgtggtgaaactctgtctgtaataaaaatacaaaaattagttaggcgtgatggtgggcacctgtagtcccagctacttgggaggctgagttgggagacttgcccgaacccaggaggtggaggttgcagtgagccaagataacaccattgcacttcagcctaggtgacaagagcgaaactctgtctccaaaaaagcaaaaacccacattgtttattttgcatattttttaatttgtaaaaatagtatatctctatagacattcctctgatatgcttttttgcttaacawtatatttgtgagatctgtgattacacatttcaatgatgcataattttctatattctgaaaaatcataatgctataatttatgtatttaacctccttaatagatattagtgttatttccagtattttgctcttacaaattgataaacatttttatgtctccstatgtacgtgtctgagtctatctctaagagatatgttttagagttgaattgctrgatcatggtattactgttatttttcctgttgccactgatascgatgtgaattttgcctgatcattgagtgtattattggtgaactattttatttgcgttatttgcatgttgtccacaaggagggacagctcacatttgtgctttccaccatgcttaattgtctggtccattttgccagtaactttagtatttgcgtgactctttcttaatggccagaatggctgtttgtcaaacactaatcagtgaattaacattccttaagcatttactgtgtatataatactataaagtgtgtcatgataggttggaagaaaaaagtattgcctttgatattaacagttggatatttatagatggataaatatgacaaaatttttaaaacttttaaccatatgaaaaaacaaataacacattaatcaaaatattgtaacacctgtaatcccagcactttgggaggctgaggcgggtggatcaggaggtgttcctgaggttaggtgaacacctgatgtcaggagttcgacaccagcctggccagcatggtgaaactgcgtctctactaaaaatacaaaatttagccaggcctgatggtgcgcacctgtagtcccggctactctggagactgaggcatgagaattgcttgagcccaggaggtggaggttgcagtgagctgagatcacaccattgcattccagcctaggcaacagagtgagactccgtctcggcgaaaaaaaaaaaaagttattatagatccccacactaaggactaagaaattctattataatcctgcctttcttttggggtattagcttgtaaccctaaacaaattattcaatccttctaaaaataccttctcacatttaaaaaatgaggacaacaatatttgccctgcctatctcataagcatattgtgaggataaaatgagacaatgacgatgaaaatacttggaaaattctttatcatgatacaaatatwaaatgtcatttaacattcgtagacttaacgcgtttgtagctctctgatatggtatatcttgtgttagctaagatataccatttagtatatctactgtgttagatgctcttctatgagtgggaaatacagcttttcttgagaaactcggtttaccagcaaaacaaagagccaaagataattagaacatggtggtgtgtgtcattctagtcctcttgatttgttgctagtcttagcaggtaagggaggtatagagatgacctgagatgttatagaacctatagccattggtggagtaacagacctgattgtatagcaacaartgacctgtgtcattataaatgtcattccgtctttattctgctgaggcactcacaactaaatttaaaatgtaccattttcctagcaaattctcttggaaaatggagggtgaagaacacaagtataatattaagcagaaacaactttagtcatctggaaaacgtttgtaatgtaagtgatatttgctttcaataaagagtaggcttatatcacttttttccagccaattttaagacttgagtgttataaaatattgtcgtttcattatggtgatggtggtggtagtggtggcaataatgacagaacatttcagaatgatgtgtcttaaaaaaactctacccaccaatgcaaaagttagcactgtgtcaccagtctaagayatacacctgtacacattcagccaccggttttaggagccacctatattctgggtggagaccctgtgcttctcacgtttagcagttgtattagtgaaggttctccagagaaacagaaacaatagattgtgtatatattttatgtattatttatttttcatatattttatatatgaaattatgtataatatatgaatatatatwtttccacacaatatatatatagtgaagacttcaatctgaaatctgcagggcaggccaggaagctgagaacttaggcagggattctacattgtagtcttgaggcagaattgctgcttcttacacaacctgtgtttgctttcaaagccctcagctgattggatgagacccacacacattgtggagggtaatgtgctctactcagagtctactgatttaaatgctaatcatgtctaaatgtcttcatagcaatgtctatactgatgtttgaccaaacaagtgggtaccataacctatcgaagttgatacatacaattaaccaccgcagctgactttggccttcaaagttcagtcaatgattaagattacccagagcctatccataccatgtagataatcacattattttccatgtagatgatcagtaaccaacagctctgaatgtgaggttcttagcttcaatcctaagacgttatctgtttcattccggaatatgaaattctatgtaggacttgcatggattctttccagatgagggctgccatgtccctccagttcttctacacttaaggttaggattaacactcctgttttggtatttgctggactgagagactacattttatagcaagttccccgatttcccatgtaactgctataatagcagtatagatcctatgcaatttcagacctcagccagcaatgcaaattgttcagcctccctagaatttaaactcagactagagtgctaggaagtgcatgtgattctcttaccttacatttccttggctgaaaccctctctgtaaatttttcaaacgtcattctttcttgtccacctgcagtgctttttgatatttctttaaaagtggcggctggatcaacttcaacaacaacaagaaaaatcctgaaagaaagcattaggcattcagagtgactgtgatgacaccatccatctctccatccagacttctatctggtgtcttctggtacttactttgagcccaggatgagctcaggagcatcagaagaaatgtgtagttatggcccatgctctctggaaagttaaaatctagttaggggacatggaactgatgcttatagtgaagcttaccaaagagaagacatttatctgaccaaatacttggagttcattattttatatgttaataatgagaggagcttttcttatttcctggaagttttaggccacagacatgaacaattagatctcattgattagcctattagaagggattcattctttgagttattagaccccacacttaatcccagaaagaacgctgaagtcatttgaaggcagagtaaaacaggactcctccttatttaaaagaaaaagatgttaagagaatattgactgaagtctgtaaaatcataaaggaggtggtttatacaaaagcaaaaataacataataattgtattactaagttttcaactattgtacgcattcaaaaacagggctgtttcattctagtcaaatgaaatgcaatgaattcccataattctgttttgtgtcttaattgattaaaaatctgtttagaaaattctgatcaaaaacagatctatcttaagcagttttttttttttaacaaagtatgagtatatgttttacatatttgcttttacttaggaaaaaaaacttacttagcaaaatacaacttgggtgtagtagcatgtggtataaacaacggaactattttaccttttactttcctatgaatgagccagtatatatttattactggagttccagctataaaatttaggtgaggggtttaaatataccctagagtattatttaaaaataaatttgtttctttcaaatagaataccaaccttggtctatggcatttgagagagaaattaaaataytaaattttgattgcctagtaaactgaaaataaaggttaaataaatacaaagcagaaaaaatatatatacaaaatcacaacctctaaaaggacaaacagtccactgttctctactgtgggagctttatcagcactggtgagtaattccacctctagggtagggctagctctcaaaaatgtaaacaagtatgtactttgtttatataaagaaatgtgcagcttggtttgtatttctttatagatatcaaacagctaaatggattgtttcaaagtaccagcaggggccagcaaagagctcttagagtttttcagaacagaattggcattgagayatgtttatttgatgtgctaaatcctttttagacttctttacttaccacaacactctcttaagtgaatgaattgcagagacagtggaataaaatatcctgtgtgttcaaactatcttggggtatagttttttttttctaatctgcatatatttttattggaatgtttgcttaggctatttcttggcagttttaatagtcaaaatataaatggcatcatttaaagactgttctacttggctggaaaaggccttaaaattacaggagaaaatgcttagtgacagcttctcttaaactttttttcttgaacctatgcttcagttttgcaatggtattactaggttaattttgtagttctgtccttaagctttcactttttatgtaactagcactttggaagctaaaatatgtatctatttgatgtagtgctaaagttttaattcattgtaaagttttggtatttccaaatttacctaactgtttgaattcacacattaaaaaaaaaaaattaacagtccctatattaactaacttgactagattcctagtatggctactatttggaaattcaatctttgatttgatgcttaattacatggggttttgttcctaccaacttcctgtaattctatacctatgggtaaaaatattagtgggcaaagtcggctggagaaagtataggcactgtgattcacatagttaaatgttcatttagtagagctggggtgaaaaaatactgtttcaacttgaaatgttagaagattgttgttcttgtgttactcattcatgcaaattggagaaggtataattgaaacaaggttggctgtgtttgagtcagtgtgctgcagctgagctcagcttaaaggtcgctggaaatcaagtgctttgtaagtgaaggcattttgactacaagcgattcaagacattttggaaacgtcagtctctggaatgggtcgtctttttctttctatgatatctggtatctaatgttttacttaggataaagactactacttaatagctcttttaggcaccacaaatgattttttcttttgatgcagtgcagctgcttctagcctgtctacggacagagatctttgttatgactttcagcccttaacatgtttggaaatgagaacaaatggcacaaagcttacgattgcactttgcagccagaagaagcaatacttaccctttgtcagaaacctccggagatgacttggatagccatgttcacrtgtgcttcaaaagaccaacacggatttcaacgtctaacgttgttcaaatgaagctgactcccagacagactgcactagctccgttaataaaggaaaacgttcagtctcaagaaagatcatctgttccctcatctgaaaatgttaataaaaagagcagctgtctacagatttcactacagccaacaaggtacagtggatatcttcagtctagcaatgtcttagctgatagtgatgatgcttcgtttacttgtatcttgaaggatggtatttacagtagtgctgtggtcgataatgaattgaatgctgtgaatgatggtcaccttgtaagcagtccagccatttgtagtggtagccttagtaacttttcaaccagtgataatgggtcttacagcagcaacrgtagtgattttgggtcatgtgcaagtatcacaagtggaggttcatatactaacagtgtcatcagtgacagtagtagttatacttttccaccaagtgatgatacttttttgggtggaaacttaccttctgacagcacctccaatagaagtgtgccaaacaggaatactactccttgtgaaattttttcaagaagtacaagtacagatccttttgtccaggatgacttggaacatggattagagattatgaaattgccagtgagcaggaacacaaaaattccactaaaacgttactcctccttagtcatttttcctaggagtccttcaactacccgaccgacttctccaacaagtctgtgtactcttctgagcaaaggatcctatcaaacttcacaccagtttattatttctcctagtgaaattgcacataatgaggatggcactagtgctaaaggatttctttcaacagctgtcaatggacttcggttatctaaaacaatttgtacccccggagaagtaagagacatacggccgcttcacaggaagggctcgttacagaagaaaattgttctttcgaataatactcccagacagactgtctgtgaaaagtcatctgaaggatattcttgtgtttcagtgcatttcacccaacgaaaagcagctacattagactgtgaaacaacaaatggtgattgtaaaccagaaatgtcagaaattaagcttaattctgattcagagtatattaagctcatgcataggacatctgcatgtttgccatcctcccaaaatgtagattgtcaaataaatatcaatggagaattggaaagaccacattcacagatgaacaaaaaccatggtattttacgaagaagtatttcattgggaggagcttatccaaatatttcctgtctatccagccttaagcacaattgttctaaagggggaccatctcagttactcataaagtttgcatctggaaatgaaggtaaagtggataatttatcaagagacagcaacagagattgcacaaatgaactgtctaattcttgcaaggtaagtttcctttggtcttggtaaatgttaatttatatgagaataacttaatgaaatatttggagaacatttattgtaaccaagcagttttacatattttcctggtccttagctagcagtattttgtagtcataaattttatatttgtaaatctgaagaactctatgtatagttttttactctatttgttattttaccagtgtacaaaatgtatatttttaaaaatcttcctaagtgatttaagctataaaacttttctacaacataaaaaactttctacaacaaaacaaactttgaataacagtctatttcataacattttatcttggcatatttttcctttaaatgatatagtattcttttgtgtagctcaatactttattcctattttcaaatgatcattttgttttctcctcttcttaatcattatgaaatagagtaaaatttagaatgcttatttaaaatattaaacaaaaacccatatcaaagtgtaaagatctttttataaattatcatagagaaactatatctcaaatacatgtgtttataagatcattcataaaaactattatgctgcatgtttaaagcagaggaaaaataaatggcatttgtatttgtatatacccttaaccacaggaattttgtttccaccctatttttctttagccacgagttaatactgccytctaaaatgtaactcactctttcaacaatattgaattctaagttttaatatttttgaatttggtttaaattgctaggcatttaccacaattttctatttaccttttcatttttttgacaattcagctttattatattagtaatttaactcttatgaatcttagccaaaagttctttatgtaatttggccgttccaaagtatttaaaatggtttgaactgaaatagattttttaaatttctgtatttggaatgttttaccagattccaggaaatttaaaaaattttctaactaaagcaattttacatgacagtacatcatagttttggggggaaaaaaccttaatctgtgtttttgtaacatccattatgtttattaaagattgttttaaaaaaaaaaacttctggataagtaactttaggtgaataaaatagtaattgctagtttattttctctcttctgaaatctggtaaatataataattgttaccaatgcccagatgttaatataagccactactttactaaggataaaaaaagatcagatttcaaattctgatctataatttagaattttaaattccatttaggaaacttttctaaaaccagattttaggagattataatctaatcaactgtttttcttcctgaaagaaagaaatgaagtggcactgagaagaaacgttaatagtatgctagttgaattaatgttacttataaatttattttacacttaatgaaataatctgaaaggaataattcatgtagaaatatttgtagaaataccttaaaatagtttattttgtggtaataattatagtttgttgtggatgcttttgagaagagtattttaaatgtgttttttaatgaaatgtggatcaaatgccttttgcattgttaaaaatatccactgttactggttttatttatgcttaggtaagctaacttaaatattttttgtgacaatcaaatgtataactttgtgcagattctatcttttggtagattattggattataaaataattcagaagtgtgcagtttgctggagatttaaattgtccccccgtttaatgtttattagacttctctttataaaagcattgtaaaccatatagtgacagttaaatttaatttatgctatatctaaatagatctaattgataaatcaaaggcttgttttatggagaagattctagtgttgttttttctaaatatagcagtggcaacaataatgggttttagaaataatcttgtgtttatcaataattatatattaatctaattatagtggtatattgtaactcacttataaataaacagctcccaaaatatttcccatgactccagttagtctgggttagtattctgatatgctgagtccggattcacatttaacaagttgatattagagtagcatttagtaatgtcagctatctgtactgagcagccgtgaaattaaatcactgctttggtcagagaacctggtttctaaagcactgagagtctacaacttcttttcttatatgtttagctaccagtctctagcagtataaaattgagtttctagcttactgtaatcaacagcttattaatgactgattttttaaatctaatgagaacttttacctgtatctgggacactgtctgtgttctgtgtttacaacttagagtgaagatgagactttgtagtctatctccakaataatgttgatttcaggcatagcaaacaacataacagtgactggcatatgtttattacatatgccttttgaaatacagtattacttttgtaaaggctatataatgacttttgatctgaaaataaatacttgatattttaacagtatgtgtaatattttgtcagttcaatcaagaagcaggttaaggagctaaggtactatgtatacagttacaacaatgattgctattcagatttctaaatctgtatagtagttacttttctctactgttattttrtttcccccatctgttgttttctaaatctcctatgttatgttgttaggatgctcagagatttcagtaccctattatttaatgtgcattagcatttttcccaagcttgaatgtcttccattctttacttatattcatatttttattagaattattttttacattttttctttttgttataaaagtttttgttcattatatgtaacttaatcctaaataggtaaattgcttaagcctagtatagtagaactgtaataaacttatgtcttaattatttcaaagcctttaacactaatctcaagattatacatttcaatattttcttattttattgttcttcctaaaatagatgttttaaatatatacttactttaatgttccattattttccagtccttattttactaaatttagcagaatatttagagagatttggttaaatttattttgagcagcacttatataaaccaatgtaatttataaatattctaaaatgtgatgccacaatgttaatgactagttttagaaagttggtgaaaaatgtatatttgtacatgtatatttcttagaactgaggaattgttaatttcagacagattcagagtgctgaattgtttgcttgaaaacattttgtattctctgtagatgtgtcttgtttaattcatccagtacacatttgagtgccaggcactgtcccaagcactgagaataaaagatgagtaaaatacagtctctatttaggggagctcccattctagtaatagggacatgcttgtaaacataaaaattttcagtctaggccgggcgcggtggctcacgcctgtaatcccagcactttgggaggccgagacgggcggatcacgaggtcaggagatcgagaccatcctggctaacacggtgaaaccccgtctctactaaaaatacaaaaattagccgggcatggtggcgcgcgcctgtagtcccagctacacgggaggctgaggcaggagaatggcgtggacccgggaggcagagcttgcagtgagtcgagatcgcgccactgcactccagcctgggccacagagcgaaacyccgtctcaaaaaaaaaaaaawtttttttcagtctaatatgtgatgtgctaaatagaggtgtgtatgaaaaagtagaaagatgtgacattatttatctggagagaggacctggttggtagaggaaggtttcccagaggaggtgacatttgaaccgagtcttgataggtaaactggagttcatcaggcagagaaatcaaagagattctagggcagggattccccatctcagcattattatattgggctggacacttttgtagtgggggctatcctgtgcactgtaggatatttaacagcatccctggcctccacccactaaatgctagtaacacccctttctcccagtgtgacaatcaaaaagtgtccccagacattgccagatgtcccctaggggcaaaattgtcccctgttgagagtcactgctgtaggtggcagcagcagcatatgcaaggctagaaatgtgaaagaatctccactgtaaatagtccagtggggctcaagcatagggtagcctggggatgtgggaggcggtgatctgccagaagtgggtcagagtccgattaggcctggtgcttcatgctgaagacaaagaagggggtcttcggctgatagttaagtagttgggcaatggaggtctttatttgagagtgtgaagtgctctctttaaggtttttagaagacaatttttcatggtttcatggattataaatgaattaaagttttcctaacttggatgactgggttaacagtgatgttatgaactaagatggagaattcaggagaggggccagattgggagggtgaagaagaaatcatgtatgaagtttatgtgtatcagaggctgccctgatagtgctgttttcaagtagggcagttggacatacaggaccaaggctcaggagagaagtgagagttggaaatgtagattgggagtcaggagtatagtcaaagcctcagataaggatgaacacgttagggaaggtatacagtgagatgggaagggaagataaattataattttggggaccaccaactttggtgaggcrgtagaagaggggataaagaagagactaaggaggaaccacacagaggccaagagagcatggaggcatggagagcatggaggcgtggaggcatagaggcatgggtgaaaggtgagggaaggaggaaagcagacagtaccacagagaacataagtatccactggatgtgtcagttaggaggtccattagcaagagtaggctcaggagaatgcggggttaaaagccagattgaagaaagaatcaaacaggtaaggaagcagaaacagccagcataggttgcttgctcgatgtcataaaataagcatgagatagcataggcaaggtatatatgtagttattgttatacagaaggcatatgtgaagtggatataagatgtatragacaaactccctctctacagggagagtacagtctctttttcctggagaaaaaaataaaggttacagtcttacgttctttcaccttggaactatagaataagcaagtatgatgagtgaaaactgaaatggaaattcagcaatatcaaatgaaggaaacagaaaattataagtgaaaacttgaaatcgcttatgaatattcacacctcattttggacagcattagtctaactttctcagtcccctctctaccaccaaaaataagacgaaacaaaatagagcttccatgtagaaaacaagtcaaggttttaaggcctattcccagaaactacttggataataggcaattctgtctatgttgccggcttcttacaggctatggagcctaccatgtgctagctgttgwgaggcctcacccgtttgtgtccactctccctttacatcacaggtgacagggaaacaagacagaccaggagaagccaggacaagaggctttgtaggctgaaggggcttggcagagtctctgggtgaggccaggcgatgtgttgaggtcaggaaggtggttagcagaaggagcaaatgaatgctgagaaagggaaccagttgtcttgtcagcataccctggaaataatccaaagtattgctcacacgtctggttcagtatcctctgttccttgtgtaaaattgggagaccatggtcagatgaagacagatacttagagatacagtaatttcaaaacaagagatgagcagatctgtcccagttcaatgagatgttttgggaaggactcaacatgggagcaactgttgaaaagcaattttacccacactaagattgaagcgaactgttgggatagaacaagagcagcagacctgagggcttagacgagcaaccagctagtgtgtatgtgcaccttgtagctcgattcatgggtgagtcacaacaaagaacaccttgaacaagtaagtaaattcatggcatttctagttaggcccgaggatgtctgttggtgaagaaagagcgtaggccttctcttgacttagaggtattataaaaccataacactaggaaacattttgattaccttagtagaaaaatacattacccaagcaagatattgatgatatagtagacaatgtctttaaattcagttataactaaacttagttaagtatagttatacctgaagttaagtacagatatacctaaaataatattatccaggattgcttccttttatttactttttatctcaattgtttttttatgatgaggtctcattatgttacacaagctggatttgaactcctgggctaaagcaatcctcttgcctcagcttcctgtgtagctgggactacaggtgcactgctgtgtccgactcacaggctaccctctaatgctttattaaggaattagagaatggcttattaagatgtcagctgggccagtgatttttaaattctcatgtgcatgtaaataacatggcgatcttattaaaatgcagattctggttctggttcagtaggtctcagaatgggggcctgagatttctgtatttataacagatcgtaccaatgctggtaattccccagacacactttgagaagtaagtcttaaggccattctttgatgagaacagtaatacagttcaaagtcgaagtatccattgagtccctgcaatgccattattgtggccattatcatgagtaattcattaaaaacatatcaataatacttcagatactaagtgtacatgcagcagaaaaaaaagttaaagatggagatatggcaataggtaggcaaatgtaaattcactagaattgattagagaagtattctggagaatggattaagcaaatcttttctgggctcagatttgctagaatacagttccctactatagagaacaatgactagctcaaaatagacacttaatagatatttattaaattaatgaataaagccagggaccctttggaatgaggtagagatgactgcagaatcctgataggtgaggatgactacacacagccttgcagaaacagataaccaaactaggatatttgagtgatgactgtgatgatgagtgggagctacgtgatgcttcatcctttgcgtggaagagtggcactcttaaatgaataccttgtccctggggtgaatgccaatggaatattatgatcgtgactcaaggattagtttccacagtggagtctgattcatagcctacatattccactaactggtaccgtataactgggtgtctggatagaggctcagatcaagtttcctgaaaagaagattgaatggacaaagatctttaagggtattcagacaaaagccatttgactagctttctttcagtttatcgttgttttataaaatgacttccctctagactttattgtaagagctgggattctcagactagttcctggagttttaagtaactgtttcagctaagaatgacctttacttttgtaacaaggctgaaagactgaaccctcttaaacagtcacagagcttactggaaactcaagtcgtcttcaaagcaaatgagtttaacaagtatttatcagaaatagaatatgtgcctgccataagtggcaaatattcttcctggatgtgaagaggttataattgaaatgagacaatggcataatccatagaaaacaaccagagaacaatatagtataatatataataatgtttatatacctacttcatgcaggtaaacacctaaacattgagatatrtgattgcccatatgatttaattacttttatcaaggtaaaacatgtgcccattttaaaagtcagatattatttctttgaagattttctgtctttttctccatgttttctcttcctagaattyctgttagccaaagtttgcacttcctggattgaccttaaaattttcttttctctcctgttttctgtttctttgcctccttaatctacttcttggaagatttcttccaagtttccccctttctttaattttaaaattttgtttattttttatttttatttttttttatttttgagacagtctggctctgtcgcccaggctggagtgcagtgccgtgatcttggctcactgcaacctctgcctcccaggttgaagcaattctggtgccttggcctcccgagcagctgggattacaggtacrtgccacctgtctggctaatttttttatttttagtagagatggggtttcaccatgttggccaggctggtcttgaacctctgacctcaagtgatccacctgcctcagcctcccaaagcattgggattatgggcgtgagccactgcgcccagcctaaaattttattttttatttatttattttttaattatacttcaagttctagagtacatgtgcacaatgtgcagatttgttacatatgtatacatgtgccatgttggtgtgctgcacccattaactcgtcatttacattaagtatatcacctaatgctatccctcccccagccccccaccccacaacaggccccggtgtgtgatgttccccttcttgtgtccaagtgttctcattgttcagttcccacctatgagtgagaacatggggtgtttggttttttgtccctgcgatagtttgctgagaatgatggtttccagcttcatccatgtccctacagaggacatgaactcatcattttttatggctgcatagtattccatggtgtatatgtgccacactttcttaatccagtctatcattgatggacatttgggttggttccaagtctttgctattgtgaatagtgctgcaataaacatacgtgtccatgtgtctttatagcagcatgatttataatcctttgggtatatacccagtaatggkatggctgggtcaaatggtatttctagttctagatccgtgaggaatcgccacactgtcttccacaatggttgaactagtttagagtcccaccaacagtgtaaaagtgttcctatttctccacatcctctccagcacctgttgtttcctgactttttaatgatcgccattctaactggtgtgagatggtatctcattgtggttttgatttgcatttctctgatggccagtgatgatgagcattttttcatgtgtctgttggctgcataaatgtcttcttttgagaagtgtctgttcatatccttcgcccacttgttgatggcatgggcaaggacttcatgtctaaaacaccaaaagcaatggcaacaaaagccaaaattgacaaatgggatctaattaaactaaagagcttctgcacagcaaaagaagctaccatcagagtgaacaggcaacctacagaatgggagaaaatttttgcaatctacttatctgacaaagagctaatatccagaatctacaaagaactcaaacaaatttacaagaaaaaaacaaccccatcaacaagtgggcgaaggatataaaattttatttttaaagttctttcttgtttctgatgatttcctagtcctaacgtcctacttgtttttatgaatacaatctcttatttctctgagaatattttacttcgggtttggtctattttctttcttaagttttgtttcargtcctatgttgtctctggttccctttggtccctttgctgttgttattgttatttctctttaatactggacatttccctccagatatctgttgttgatatttgagagtaagtcgctatgaagttgcctggaggttctgtaattatgttgggcttttcaactggtgggtttcactgttgggaaaccccccaattgttagtgtcttctctctgaggtcaatttgtttctccagagaagaaacttctaatgattgccagttatgttttacagccatggttagtgacaaatcaggagtgaaggtgattcctttatataagttctgcaactgagtgaattccaggtaaaatatgtcttaaaagtgatatttacttacagaattcttaacatgctgatgataatttaattcatttgcagtaaatgaaatgcctgattttcttttcttttcttttttttttttttgagacggaatttcgctcttgttgcccaggctggagtacaatggcacgatctcggctcactgcagcctctgcctcctgggttcaagcaattctccttcctcagcctcctgagtagctgggattacaggcatgtgccaccgtacccggctaattttgtatttttagtagagacggggtttctccatgttggtcaggctwgtctcaaactcccaacctcaggtgatccacccacctcggcctcccaaagtgctgggattacatgcctggccaaaatgcctcattttcatacctctggtctgacataccttgtgtatattctagaagcatatacactcctagaaagactgaagtaaacactctcaagtagaaaatgtggtttccttaacgtatttctcaactttttgcattcttggtaatacattgaagtgcaaatatgcatacctgtcactcagaagaagagaatcaacctgtttaaaatgtgtatggaaatacgccgggtgtggtggctcacacctgtaatcccagcactttgggagcctgaagtgggcagatcacttgaggtcaggactttgagacaggcttggccagcatggtaaaacctcgtctctactgaaaacagaaaaattagccaggcgtgttggtgcacgcctgtaatcccagctactcaggaggctatgacaggagaatgtctttaacctgggaggcggaggttgcagtgagccgagatcgagccactgcactccagtctgggtgacagagtgagactctgtctcaaaaaaatgaaataaaataaaaggtgtatggaaatagaacaaggaggaagagaccctaacagccttctagtagagtttaatattggatgttcactgtcactaggacttgaagcctcaactatgatttttaacttggagaaaaccttgatatattcttttcttttgagatgcagtcttgctcttgtccctggagtgcagttgtgcaatctcggctctctgtgacctccgcctccagagttcaaacgattctcctgccccagcctccgaagtagctgggattactggtgcccgccaccacatctgactaatttttttgtgtttttagtagagatggggtttcaccgtgttggccaggctggtctcaaactcctgacctcaggtgatcctcccacctcgccctcacaaagtgctgggattcacaggcatgagccaccgtgcccagccaatgtgtgtatatatatatatatatatatatgtgtgttttttttttttttttgagatggagtctcactctgtcacccaggctggagtgcagtggcacgatctcggctcattgcaacctccgcctcccgggttcacgccattctcctgcctcagcctcccgagtagctgggactacaggcacctgccaccacgcccagctaattttttgtatttttagtagagctgaggtttcaccgtgtttagctaggatggtctcgatctcctgacctcgtgatccacccacctcggcctcccaaagtgctgggattacaggcgtgagccaccttgcccggccccagtatattcttttttaaacccttagccttatatttgtaaaagtttaaaacagcatacttcatgtgccacattttaggaaactgtctgagatagtgattatatctccatattagaaataagtagaaaggcccagaaatttttaaatgacttgctgaaaatcacaaatctagcaaatgtcatacttcaaccaaaacgcaactccattatgtattttaaagcacctttctactaccactagccaaaaggactctcatcgggcactgggagaatcctacaggataaagctgcttggaaaagattactttggtaaaaatagcatcagaaagaaaaaaaagagttgtctaaaggaaaaattccatttgggctgactacaatctaatgaataatgtttacactctgaagaatgtatagtccagatcaagtgttttcttatggccattgttgagtgaaaaaaaagtttagggattattattaaacattaccagagaaccagtttctctcgcaaatatttctttttatttatttatttattttttatttgagatggrgtctcgctctgtcacccaggctggaatgcaatagcacgatctcggttcactgcaacctccacttcctgggttcaagtgattctgctgcctcagcctcctgactagcggcgattacaggcacctgccaccatgctgacctaatttctctcaaatatttccttccttgtcttccaacttgtgatttataattwctttgtttttttctgattacttttattgattaacacatactttgttttctgcctcctataacattgtttatgaatttcatccttaagttctttttatttaataaatgttataaactacctatrttattataagctagttttttcccaaatattttaaaacttttcgttagggaaaatttcaaacatacacaaaagtagaaagaatattgcagtgaacccctatgtatgcctcatcccgttctaaaatatatcaacattttgttgattatatcatccatctcctcctcgcttctccttttttctagaatcttttttaaaaaatacatattgtacccataaacacgttgaaatgcatctgtgatggttaggagccttttacatatataaagccaccatgcagtcgtgacaaaattaatggtaaaagcaacattaattctaaactgttttggctagataaatctctaagtcactatgtcattttagtattgacaaaattcaagatggatacatctcttttgacttgcatctgtctaattcatctattttctgatattcacatctctttgggatggagcatgtcagttatttaccataggattttctctttctttaatcagataacttttgataatgcatgggttaccaatataattgaggccttcctttggaacctaaaaccaagagattagagttcagatttggaatttatcatctaaccacatcttatctaagccttaattgccgcactgtatttagggttcaaacatctgggatagctaccttactcattcctaggcagaggtgaaaatgtactctatgttgaagtaactctattagttcctattatagcttttccaaatcctggtttttatatttatataatataaaatttatgaaacattgcaacagtgtttcaagtactggaaattttatatgtttggcaaatacttgatgctcaataaagagtagctctcattatctaccttatattgttgtgagagtgtctgaaggcactgtaaactgtaaagtgccatgatatgtaacatgtaataattgttttttatatgtacaaatggaatcatatatgtaattatgaatccacatgaacagttaagtaatgggaaatgcatgaaaagaacacattaaaaagtcaagtaaaaatacacagaccacgaatctggggaagcacttcttcataagaaaccaaagcaaagatcaaagtctgttttcaaaggaatacaggatttctaaagcctattaacaattaagccacaattctttttacttatactcacgaattttgattggatgtattcttagggacagtgtcaacactggatgtactgaaggagaacaaaaataagaattatacagcaaattaacaggagtaaataattagccagaaagtcctatatgtgggccacaagccccacattgaatatccaataattggtagttctaaaacgaactcttgtttctttgatcccccattgaaaattttgacttatggagacgatttcataaatgtaaaacataaaattgtagacttttttctcttcagtttttaaactaaagaattcacagagctctcaatagttaagatatcacaaaggataaatgcttgaggggataggtactccatcatccatgatgtgattattatgcatttcatagcgtatcaaaacatctcatgtaccccataaatgcatacacctaccatgtacccacaaaaattaaaaattaaaaaaagttagataccagttttcgctaatagcattctttttatttaaatgagtttattatatgtgaaaacattaaaataaacatcttattttgtaaaaaccactattataacttggtttttatcttactcttgatctttaggaatcagttcatcttctagctgtcatcaatgtttttgcctcatattttaaacaaaatattattaatacatttgcaatgggaaatatatcctagtgtgccaatttatcttcatattaaaatgtttagttggcagttgttgacagggtaaaagcaaagtaattcagctattataattttacatttatatagttactctttgagacatacataaaagctcaattttgtatgattcatataagcaactcaattttgtcrgtctgatagggcttttataaagctctcttatagctatctctccctttactgaaagtaattatgtatttggctcttaggatattttttaaccttctgaagttaatttgggtatgaccctggcatgttatttataaatattagcaacaggtggtaaaattgccgaaatatattatactgataccataattttggagcaagctagtcaaatctgtttactccatttaatctgagtttcctaagcttcaccagcctgcagggaccagtagatacaaaataacaattataacccaaatttcactgacttagctcttctcttctcataaaagatcccaagcagctataaagtgctcttcagtatttctgggattcccaggcatggctcccatgcgctctaaaacaaatccagtcctgtggagcagtatttccaggcatatgcagcgcacctgttgtcaccttggagtcctgctgtgtcccactgggctctggttcctcctcctttccttacgatgagttcttgtccagaagcatccttaaaaagcttatctcaaccttttcttaggtatgatgagccaaactagtttaaaaaaaaaaaaagtggagtcatgattctgaacacagtgtggtgtggggcatcattcagctttgaggacatgtctgaatctcagagacagcaagaactaaaactaagatcttaaaaccagaaagtactgttttactaaaaaaaatttcctacagcaccactgtccagtttagtagccagtagccacatgtggctattgagatttaaattagcttaaattaaattggatttaaaattcagaacctcatttgcactagacacatttcctgtgctccatagctacatgtgatcactggctcctgcattggacagcagtagtacagaacatttccatcagtacagaaagttctgttggacagggttcccctagaacattaggtctcaagctgcaagacattgatacccctgtactttcacaatgatccagtgtattgaggaaaacgcctaaagctgctgtactaggtggttatggctgaaggagtggagccccatcccaatggctttatttttctctactggtacctgccctaatgtttaagcaagaaaatactggttttaaaggggtttgttgagttattttcttaagcaacagtaacccacatccccgtttttcctgttttcattgatatgttatagtcttcagtaaaaatcatatgagttttcaaccctggaaaaaatcttaaaaactgtttatagatcagctaaacttacatttgatcagataaccaggtaatcaaattgtaagaataatcagtttctacttctgaaatacatttttaaaaactaataaaaggctattcatttcaaaaagtaaaactttttatagaaaacattttattctgccactacataatgtagtcttgtgccaaggtttgaaaaagagagagagagaattaaaaagaagaagaaaaactactttgggaattatttgataattattttgtttgttgtttagaaatattctctggccatatgtacaatctttacacatacttcttgcagtgtgtttattgtactgagaagaaatctttgttttcactgatcactgtgcatcatttgtgcttactaccatttgttaatgaataggaaaaagactactaaaaatctaacaaacagattttgctttttaaaggtcttttcttggccaggtacagtggctcacgcctgtaagcccagcacttaggagactgagattggaggatcactttagcccaggagttcaagaccagcctgggcaacagagtgagacccctgtctctatttaaaaaaaaattgtttttaattagccaggtgtggtggcgcttgcctatagtcccagctactcagggactgaagcaggagaatcacttgagcccaggagtccaagttgcattgagctacgattgtgccactgtatttagcctgggcaacaaagtaagaccttgtctcaaaaaaaaaaaaaaaaaaaaaaagttctttttgtgaaatacaaaagagcagaagatattatcccaacttctgatagggcagtctaggcaaggaagacaaagaacatatataagatgttttgaaattattaaagaaggatcagagtgttgaaattattgtaagcatcaaggctgcttgcccgtgaattaaggaagtttgcaggaggataatctcagtaaagtctrtagactgaaaactttcataaatcctgagttgttaacagtgttttcaggcccactaatgctagtgttgtttaatacatagaaaaaattgaatatgaagttcagtagtttgtaacttttagattcatttacctttgaaaatgattaaaaccggaatctggagcaataaatctaacaaccaaawgatgagctaaatagtgacttccaactatgtgcagtgtgttggtaggccttacactatatggaaaaacttaggaattatttttaaccttccttttggaacattgtgtaaacattcttagattatacttaaactattaagtggggtagttttatctgaatctaagtccacttgagttgtggatttcacctctcatggatgtgtgttttaattgtggggtaatgtcaatggaagatcagggttataatatcatggcatttgaataatagaaattcacgtaaaatattctaatctgtcaaactttaccaactgtgtgcagattccacagccaaggatgggagtgtggctcatggccactagagggcaggaaaggtcaggaaccggatgtggaagcctggggaaaagtataggggaaagcttggatcaccccttcgtaaggaagacaacttgccacaacttgaagcaaacacaattcagtccctgaggcaggaaagacagtaaacgatgcaggaacataagccacagtcaaggccaggaggacacatgggcagggaattaataaaccagtctggagcccaaaccttaccaggctgtcaaactgctggcagaaagctaaatgtaaggccaggttgaagaaggcagtcagattgcagggagttgagcaggtcattcgaccctcactattattgctccaagttgaacatactgacccttttgaaatgggcaaagtgggactttaagaatctagtgattgaaaagtcaaaggaaatctgataccatcttcttttgatattgcagcatttcctgtcacaactcctgatttagttttgtaatgctagaactattcctatttccttcttggaaaattccctccacgtcctagagtacttcctcaggtctaaatagctaatgtttacaaaggaaggattaagtaagacgaagatgacacagcagagttttccattaagacatgccatatcggccgggcgcagtggctcacgcctgtaatcccagcactttgggaggccgaggcgggcggatcacgaggtcaggagatcgagaccatcctgggtaacacagtgaaaccccatctctacaaaaatacaaaaaaattagccaggcatggtggcgggcacctrtagtcccagctactcgggaggctgaggcaggagaatggcgtgaacctgggaggtggagcttgcagtgagccaagattgtgccactgcactccggtctgggcaacagagtgagactccatctcaaaaaaagccatgtcaataatcatatttaatattttataaattgtatattcataaatatatacaaatatatttataaattatcatgtttaataatttagaatttatctttaggtcttaaatagataaattatgttaaaactataaaggtaaggcacattgggctataacaaagaataaaagttttccttaacatttctatatacatgaatagaattttatccttttcctttgcagtttttacacagattttaattatatatgcatatttgtccaccatgcatgactggaggctccatgataccagaaataccctcctgaacttaacctggagcctgactctagaagctagtcactagtatttgttgacctcaaggaatttaccgtctggttggagtgcaagagaactawaatacagatattaaaaacagatacaaagggaagtagaattacagaggaggaaattagcaatttagtatcatcaggtaaatttttattaaaatggcattgtggccaggtatggtgcctcaccctgtaatcccagcattttgggaggccaaggcaggtgcatcccttgaggccaggagttcgagaccagcctaaccaacgtggcaaaaccccatctctacaaaaaaatacaaaaattagccaggcataccggtgcatgtctctaatcccaggtacttggggaggctgaggcaggagaattgcatgaacccaggaggtggaggttgcagtgagccaaaatcgtgccattgcactccagcctgggcaacagagtgagactctgtctcaaaataaataaagacaaaagtgaataaaatggcattgagctgggtgtgctgagtgagcttgagagggcaaaatataggatcattgcagctattggggggcttttgttaatagaaggctgcaaggtagattggaaaaaacaaactagaattccatgccaaggaatttagtttttcctctggaccagtatttttgaaatgtggtcctcaccagtctgtaagatgcctcrtataaaacctaccccattgacagatargtttgtataatgccacatgctgtatcttggaataccacagtgcacattagtaaatctaagttcctaaagttctgtaggaaataaacttttgagcttggtttaaccaaatgtatcccaattatatgaccagcgttagatggcctgctcatttatcttcagctattaacaatcattgctcactcctcctggtttctccagacactgaatagatacatgtttctcaaggtgtattgctggccagatgcattagtatcacccaagaactgcaaattctcacacattataccagatcagcagaatcagaaattctaggggtagagcccagcaatctgtctttaaatagcctatcaggtgattttaacacacactgaatttcagcctgaatcttgaaactctagattaggttgggcacagagcctccagctttcctcagctaccacagcttccttttatccattttaaagtagtttcctgtttatctgttttaaaattcaccttctcacacttacttgtttttaaattgaacatccaagattttacacagctcagctccttggtttcttagaattgaaggcactctatatttgcaacagtagcagtcgtctgctgatttcatttctcatttaaactgcagagataattctccagagaatgttagcgtccacctcttcgaaagttatcttttcctttccctagtagcttggcagacatttctaaaaagaaaaaaattaatatcataattagtgctcagaagtgtgaatctctattttcagtcgagagtgaatacttttcttttggaaaggaagagctttatccattttagcagttacctagctgtgagtatttcctggctaaattataactttataccttagttctcttgttattttcctttgttcagaaatataaatttgaaacaatgggatgagcccctcccttttttagaggtggaaagaaagttgaaacaaatgcaaaacctttttctcatatttagtagtcatctagtttaggagcatacaatataaattgctcctaaaaatgttggatatattacattttaactttagaaataattataaaatcctatttatatttgatacggacacaacctctgattcctgttatgtcttgcctgcttcagattccttctttcctgtagcatattaaaaaatggtttgtatttttaaatcctcacaataaatcatgaatgaaactttagagcatgtaaagataaacttgacaaggtaaatcatctgttttcacaagtctgtgataattagaaagtaagaactccaaagaaattgaaattcaaaggacaataactcaaagtgaaactgatttagaaagtagtttctcctgacttccacctcaccccaatctgtgaggtaaaagcccctttaaagatgtgagggtttctaagggccgtagaatttcaagtagtgtgaagctactatcaaagaaccaagtaccggtgtctcttggtatttgcagggggaatggttccaggaccccacagacaccaaaatgagcagatactcaagttccttaaataaagtggtataaaatttgcatgtaacctacacacatcctcccataaattttgtcatctctagattacttataatacctaatacagtgtaaacactatgtaaatacttgtgctgcattgttttttaatttgtatttttttattgttgtgttattttttcttttcaaatatttttgatcccggattgattgaatccaccgatagagagagctgactatacagtttatgtcttatagtcagatctaccagaaaggctagaggccgagcaaatcacaaacttaagacatggaatgcttgctttatgcaaagatatccagtttccaaagcactatgattttatagcacagattaaattgtttatctaactccatttcctcattgacatatagaaagattgactcagtaaattttgaacttctaggaaaatgttttaaataagcccattatagtataaagcacagtcaataaggaagtaggaaagaagcagctatacaaatgcaattttgtttattaataagattggtttaccttagaaaacarttaagttaaatttacagtgatttttgtgagccttttttctatctatatctagtatgtagtatgaatccatatagtgtggattttgagaggaaggatgttcatttaaaataatagtttttattatattcagcaagcagaaaaatatggtttcttatttttaaaatactataaaaggtctattcatataagttctgcttatttttctgagacactcatgtgcgaatatcatgtgtccaaatacccacttttcatgtgttcaaataaaaaaaaattaaatgtcttataaatagaatggaaatttaaactccactttaagcaaagaggttcttagataatttcaattcaagtttttaattgtaaaacttacaattaaagttttaattaaaaactttaagtttttaattgtattctggtcttttgtgatctctgaagtatttcttgatctgttagcttaatttaaatagtatgattaataacggcttgaacatttttatggctgtaaattctttcaatttctttttttactgcctgccccaattcttgtctttagaattatatgatctatacagaggaatcatgacatttgcgcatagaggattttaatacagctctgtgaagacagttgttattaacaatgattaagataytaatacaaatgtaagcctcttgatcttgaatctttgatcttgatcttacctttgaagaaaggtatttaaacttatctgtgcttcttggctcactcagaaaagtatttccttctgtagcatccaattaatcactaagatctgtttctatctcaggttagtttactgtaatctttattgttacacaaaataaaattattttagatatatatgcaaaatgataaataccagcttggttgaggcattgtttgtggtagcaaaagatttgaaaccatttagattgtcagtctgaatttagattgacaatctaattgtctgtcaatagggaactagttaaggaaattttgctgtaccatataatagcataccatacaaccaccaaaaaggtaaagcatctctatatatattgatatgtgaacaaagtatgaaagataatgttgaaggggggaaagcaagctgcataacactatgtcagagaaaactctaaagggatggataggcacaaaaataaaacagctatcaccttttgcaaggacagagggtaaaaatggatagctggagggtagaaactgtttcattttctttttgattttgtactcggtgtatgtgttacttatatttttaaattactttttaaaaaatgttcttgaaagaaaagtgctgatagctaaatctgaaaactgaaaaaacaaattatactatatctaatattcaggtataaaatttatttttactctttaaaaagcatgattgaaacaaaaagtttgatattacagcagaaaaccttggctatcttgttggcctctgsstgtgaagaaattattctttctataatcctttgccttttacagtagatttgccctggaaaattatttataattcatatttattatttatttatttatttatttatttatttatttatttatttatttatttatttattgagttggagttttgctcttttgcctaggctggagtgaagtggtgcgatctcagctcactgcagcctctgcccctccaggttcaagtgattctcatgcctctgcctcacgagtagctgggattctaggtggccaccaccacgcctggctaatttttgtatttttagtagagacggggtttggccgttttgaccaggctggtctcaaactcctgacctcaggtgatccacctgccttggcctcccagagtgttaggattacaggcatgagccaccgtgcccagcctataattcatatttaatagaaactctttttaaagcaaagtattcttcaaagttgtgacactttaacttaactgttttttaaattctgattttttattactttggattctcttaaagcataacatttagctactattcattcttattaaagttaacaacatttgacctcctaaaattagagcatctttagttctaattaaagtttttacaaaaacagcaatttggattttctttttatgttctaaaaattgttttaagaaactgaaattcatgtcattataatactagaaaaggtattatttaytgactaaactgtgcccattgcagatagtcctgtttaaaatcacctggtgttctaaattctttttcagactttcaggcattcttaaattacttatattataccaaatgcaaatttgttttatgaagtaggctgcatgcagttcaaatataggaaataactcttgcaaagaaatgcttgatactcagaatttggaacaattggttggctagggaaatattaatgaacatcacagactgacttgccttcataggaatgaatttaaaacgattacttttcctttgtaaatggaaaaagaacctctaattgtcctgtatttatagcaaccatatgtcccagactttccaggatagttcccaatttcagattctccatcttcttctgagactatgcatattgacttttagtttggaaaattttttcatttttcaaatattggaaatacagctatttgggatcatttcattttatgtagaagtgaagaaactcatttcagatcattggctttaaataagacactgttgcaagaaatatttaaaatgtaggtacttgagacaagaaaattctcaccatgtgggatttttgttcttttgttcccaaagacaaccaatgaacaacaaatatagagcaataaaaacaggtgatttttttagggagatgggatgggatgagttttctttctgtccctcagtgaccaggcactgcctctccaatggagatgaaagctgtagggaagattgtaagagattttaggaaataagcacaataagcacatgaaaagatgctcaatctcattggctgccagggaaatgcaaaaagccacgatggtatactacgtcacacccactaagaagggtattgtcataaagacaggtcattgttggtaagaaaggggaggaattgaaatcttacagtgctgatagaaatgtaaaatgatgcagcaactttggaaaacggtctggcagatttttagcaaattctgttcctgagtatatatccaagagaaatgaaaacatatgttcgtacaaaagcttttactcaaatgttcatagtggcattatttataatagccaaacagttgaaacaacccaaatgtcaatcaactgaaaaatggataaataaaatgtggtatatccatataatgtaacaacaataaaaaaggaatgttacagtatggatgaatcttggaaacatactaagtaaaataagtcagtcataaaggaccacgtattatataattccacttatatgaaatatccagaataggcaaatccataaagacagaaagtggttggtggttgcctaggactgaaggaggggtggggaaatgggcagtgaatgctgattggtaagggtgttctttttgggtgatgaaaatgttctaaaattgattgtctaatggttgaacaactctgtgaaaatactaaaaaacattgaattgtacactctaagtgggttaattgtatgtgaattacatcttaataaagctttttttatttttaatttttgtgggtacatagtaggtatatatatttatgaggtacatgagatattttgaaacaggcatacagtgcataataattgcatcagagtaaatggggtatccatcccctcaagctttatcctttctgttacaaacagtagaattatgctcttttagttatttttaaatgtacaattagtcttggtgtggtggttcatgcctgtaatcctagcgctttgggaggccgatgtgggcagattgcctgagctcaggagtttgagaccagcctgggcaacacagtgaaaccccatctctactaaaaaatacaagaaattagctgggcgtggtggcacatgcctgtaattctagctactcaagaggctgaggcacaagaattgcttgaacctggaaggtggaggttgcggtgagctgagatcacaccactgcactccagcctgggtgacagagcaagactctgtctccaaaaaaaacaaaacaaaacaaaacaaaacactaaattaaattatttttgactaaagttaccctattctgctatcaaatactagatcttatttattcttttttgtgtagccattacttatctctacttctccctaccccactacccttgttagcctctggtaaccatcattctactctctatctcagttcaattgttttaatttttagctcccacaaataagtgagaacatgtgaagtttgtctttctgtgccttgcttatttcacttaacataatgaccttcagttttatccagttgttgcaaatgagcggatctcattccttttatggctggatagtactccattgtgtatatgtaccgtattttctttatatgtctgttgatggatactttggttgttttcaaatcttggctattgtgaacagtgctgaaatatctcttcagcactgaagtgcacatatcctttcaatacgctgatttcctttcttttgggcatatacctagtagtgagattgctggattatatggtcgttctattttcttccaatctatgggctgtctccccactttgttgattgtttattgtgggctgtgcaaaagctttttaccttgatgtgatcccatttgtccattttgatttggttgtctgtgcttatggagtattactgaagaaatctttgccttctccaatgtctgcagagtttcttcagttttcttttattactttgatagttcaaggtcttagatgtaagtgtttaatccatttttatttgatttttgtataaggtgagaaataggagtctagtttgtttcttttgcatgtggatatccagttttctcagcaccagttattaaagaaactgtcctttccccagtgtatgttctcggcacctttacccaatatgaattcactgtagatgtatggatttgtttctgggttctctattctgttccattggtctgtctgtttttatrccagtaccatgccattttggttacaatagctttgtaatgtaatttgatgtcaggtaatgtgatttctccagttttgttctttttgcttaggatgcctctggctattctgggtattttgtggttccacataaatttcaggattctgttttctatttctgtgaaaaatgtcattggcatttttatagggattgcatcaaatctgtagattgctttgggtagtatgggcattttaacaatattgattcttctgatccatgaacatacctttccattttttgtgtcctctttgatttctttcatcagtgtttgatagagatatttcacgtctttggttaattcctaggtaatttatttgtagttattgtaaataggattgccttcttgatttattttacaaattgtttactcttggcattgagaaatgctactgatatttgtatgttaattatgtatcatgcaactttactgaatgtatcagttctaatggttttttggtgcagtctttaggttttttcaaatataagatcatatcatctacaaacaaggataatgtgacttcttcctttccaatttggatgccccttatttctttttcttgcctgattgctgtagctaggacttcccttactacattgaataacagtggtgaaagtggcattcctgtcatgttccagatgttagaggaaaggcttttagtttttccctattcagtatgatattcactatgggtctgtcatgtatgacttttgttatgttgagctatatttcttcgataccattttttgtagtgttttatcatgaaatgatgttgaaatttatcaaatactttttcagcatcaattgaaatgatcattctgtttataatcaatacttcattctgttgatgtgttgtatcacattcattaatttgcatatcttgaaccatccttgcatccctgtaatgaatcccccttggtcatgatgaatgatctttttaataggttgttgaattcggtttgctagtattttgttgaggatttttgtatcaatgcttgtcagaaatttggccctgtagttttcttttttggttgtgtctgtttggttttggtctctgagtaatactggcttcatatgataagtttggaagtattccctcctcctctgtttttcagaattgtttgagtaggattggtattagttctttaaatatttggtaaaattcatcagtgaagccattggatgctgggcttttccttggtgatagacattttattacagcttcaatctcattacttgttattggtctgttcctgttttggatttcttcatggctcaatcttaataggttgtatgtgtctaggaatttatccacttctagattttccaatttattgcatatacttggtcataatctctaatgatcctttgatttctgtggtatcagttgtaatgtctccattttcatctctgattttatttatttgggttttctctctttttttcttagtctggctaaaggtttgttaattttgtttatctttttttaaaaaccaacttctttttgttggtcttttgtgtcattttcttcatttcaatttcatttatttttgctctgatcattattatctcttttattctactaattttgggtttggtttgctcttgcttttctagttctttaagatgcactttttacgctgtttatttgaagttttttttttcttttttgatgtaggcactgttagctataaactttcccctgagtactgcttttgctgtatcccagaggttttggtatgttattcttccattatttgtttcaagaaaattttcaatatccttcttaatttcttcattaacccactgttcattcattcaggagcatactatttaatttcgatgtttttgtatcatttccaaaattccttttgttatttatttctagttttattcctttgtggtcagagaagatatttgatattatttcaatttttttttttttttttgagacggagtcttgctctgttgtccaggctggagtgcagtggtgtgaccttggcacactgcaacctctgtctcctgggttcaagcagttctcctgcctcagcctcccgagtagctgggactacagaccagcacgctctgctaattttttgtatttttagtagagatggggtttcaccatgttggcaggatggtctcgatctctgacctcgtgatccacccacctcggcctcccaaagtgctgggattagaggcgtgagcaaccacgcctggcccatttcaattttttaaaacgttttaaggcttattttgtggcctaataaatggtctgtccttgagaaggatccatgcactgagaataatgtgtaatctgaagcagttgaatgaagtgttctctaaacatttattaggtccatttggtctgtagtgcagattaagtctgatgtttctttgttgattttctgtccggatatctgtccaatgctgaaagtgtgatgttgaattctcaagctataattgtattggggtctgtctctctctttatcgctaataatattttctttttatatctgagtgctccagtgttgggtgcatatagacttataattgttatatcctattattgaattgacccatttgttattatataatgaccttctttgtctttttttatagtttttgtcttgaagtctattttatctgatacagctactcatgcccttttttgatttccgttttaatgaagtacctttttccatccctttgtttttagtctttatgtctttataggtgaaatgtgtttcttgtagacaacagattgttgggtcttgattttttttttttaaatctattcagccactgtatgtcttttgattggagcgtttagtctgtttatattcagtgttattattgttcagtaaagacttacccctgccattttgttatttgttttctggttgttttatagttttttcttccttcttttcttccttcctgtcttccttttagtgamggtgattttatctggtggtatgttttaatttctgtcttttaattttttgtgtatcttttgtatgtctttttatttaaggttaccaagaggcttgcaaatattttataagttattgttttaaactgatgacaacttaacactgattgcataaacaaagtaacaagccaagagaaaactaataaaaactctaactttgtcctcttgctttttttttatttctatttatatcttcttgtactatgtcttaaaaagttgttataggtactatttttgatcagttcatcttttagtctttctacttaacatatgagtagttagcacaccacaattacagtattatcatattctgtgcttttctgtgttcttactgttaccagtgaaatttgtaccttcagataatttcctgttgctcattaatatccttttctttcagactgaagaactccctttagcatttcttgtaggacaggtctggtattgatgaaatccctcaggttttgtttgtctgtgaaagtctttatttctccttcatgtttgaaggacattttcgccagatatactattgtagggtaaaactttttttacttcagcacttctaaaatgtcatgccactatctccaaggtaataaggtttccactgaaaagtctgcttcctgatgtactggaattccattgtgtgttatttgtttcttttgctgcttttaggatccgttctttacccctgacctgtgggagttttgttaataaatatcttgaggagtcttatttaggtcatatgtgcttggtgttctataaccttcttgtacttgaatattgatctctttctctaggtttggacagttctctgttattatccctttgagtaaactttctacttcaatctctgtctctacttctttaaagacaatacctcttcgatttgcccatttgaggctattttctagatcttgtaggtgtgcttcattgttttttattctttttattttgtctcctcttactgtgttttttaaaatagcctttcttaaaattcactattctttcttctgcttgataaattctgatattaacagactctgatgcattactcaatatatcagttgcttttttcagctccagaatttctgcttgattctttttaattattttaatctcttttgttaaatttatctgacaggattctgaattctttttctgtgtatcttgaatttcattgagtttcctcaaaacaactcttttgaattctctgtctgaaaggtcacatatatctctgtttctgggataggtccctggtgctttatttagcacattctgtgaggtcatattttcctggatggtctagatgcttgtggatgtttgccaatgtctggacattgaaaagttaggtatttattatagtcttcacagtctatgcttatttttacccatccttcttggggaggctttccaggtattcaaagggacctggttgttgtgatctgagttttggttgctgcagccatatgtgtgttaggggacattccaagcccagtaatgctgtggctcttgaacttacagaagtaccaccttgggaccaggcatggtggctcatgcctgtaatcccagcactttgggaggccaaggtgggtggatcacttgaggtcaggagttcaagaccagcctggccaacatggtgaaacccaatctctgctaaaaatacaaacattagccagacatggtggcaggtgcctgtaatcccagctacttgggaggctgaggcaggagaattgcttgaacctgggaggtagagattgcagtgagccaagatcatgccactgtactccagcctgggcaacagggtgagactctgtctcaaaaaaaaaaaaaaagaagtgccactttggtggtcttggatgacatctggaagaattctttggattaccaggcagagactcttgttcttctcccttactttctcccagacaaatagagtgtctctctctctcacacacaaatagagtctctctctctctctttctctttctgtgtgtgtgtgtgtgtgtgtgtgtgtgtkktkgtgtgtgtgtgtgtgttgagatgcctggaactaggggagggatgacacaagcatccctgtggccaccaccactgggaatgcactgggtcaaacctaaagccagcacagcactgagtctcgcccaaggcctgctgtaaccactcgctagctgccacctctgtttgctccaaggccctagggctctacaatcagcagataaagtcagccaggcttgtgaccttctcttcagggcagcaagttaccttgggcccagagtgcattcagagatgccgtctagaagtcagggcctggagtcagaaagcttaggaatctaccttgtacactattctgctgcagctgagtggacacacaaaccataagacaaagttcttcccactcttcccttctctttccacaggcagagtctctccgtggccactcctgccacagggctatggggagtactgccagactaccaccagtgttcactcaaggccccagggctcttcagtcacctggtggtgaatgctgccaggcctggaattcactctactgagaagtgggctcccctgtatcccagggaaggtccagaaatgccatccaagaactgagccttggcatcaaggaccccaagaggcttggtgctctaccctactgtggccaagctggtacctaaactgtaatacaaagtcctctttactcttccttctactcttcccacgcaggagtctctatagccaacacagctgagaatgtgctggatttcacctgaaacctgtatgtctcagagtctcacctaaggcccatgatgtatactatctggttactgctgctgattattcaggacctaaggctcttcagtcagcaagtgtcctagcctactatggctgagctggtatccaggttgtaagacaaagtcctctttactcttcttaagcaaaaggaaggagtttctttcagagctgcatgctgcactgcctggggttggtgtaggggtggcacacgcactcccttgaccactccaactggtgtctcactagatcacctgccccccaagtccactggttccaatccaagcccagtacgractaggacttaactaggaattgcagtccttgtggcctaaactgcctttcaagtttatttagaaccccagagtgctttagcccacagtggtgaggcttgccagaactcaagctccaaccactaggatggacaattctccaccggctctggctgatctaaatgccaccttcatggaccatggctgagttctgcctggtgttgctttccactgtgacaatgcagcactgagttccaatgcaaagtcccactgtcactgagctctcccaaccctaagtgcacggattctccatgccatacagccactgccaggggatggagggggtgggtgtcagcaactgaagactgtctttcctaccctcttcagtgcctctttcagtgatgtgaagttaaaactagatactgtgattgctcacctgatttttggttcttatgaaggtgctttttgtgtgatttttaaattttgtgtttctgcaggtaggatgatcagtggaggcttctatttggttttcttgctccacttcctgcctaaaagctgttacttttaaaaaccaaaattaggaagagacttctgcacgtttgttggaacatttggtcttataccttctgtagcagtggttcttaatgaggaatgatcttgccacccaggggatatttgacaaagccagaaaatgtttttggttgttataactggagggygggtactactgacacaagtgggtagaggccaggaatgttggtaaatatccttcaatgcacaagacagcccccacaacaaaaaaaaaattatctggctcgaattgtcagtagtgcccaagctgagaaaccctgttctgtgcctgtattactctagtgacagttgatcacagctatgttttttaagcactgcagggtcacaaatcatcaaacatacagatgttcagtgtattctgtttactcaggacaaggctatttaataagactaaaccaaaaaaaaagttgtttttgtttttgttttttttaatctgattaagcctaaacctaagttaactagataattcagttacccaaaatattttattcctcagtcatcctgattgagattttactattttttgttatattttacttattcatgtagagcttcttaaagatcagacttaatgaagcataacatctacttgtgataaaaacaggaataaagaaacatactggctgggcactgtggctcatgcctgtaatcccagcactttggaaggccgaggtgggtagattactggaggtcaggagttcaagaccagcctggccaacatggtgaaaccctgtctctactaaaaatacaaaattaggcgggagtggtggcgtgtgcctgtaatcccagctactcaggaggctgaggcaggagaattgccggaacccgggaggtagaggttgcagtgagccgagatcacgccattgcactccagcctgggcaaaaagagtaaaactgcatctcaaaaaaaaaaaaaaagaaaagaaaagaaacttactgcaatatagccttgaaaacatcattaaaagctaacttacccatttcaaaaattatcatcaactcatgttctagaataggaatatggcgttaaactaagctaatttgttaggccttagactccaaccgtactccttttcttggatatacctgtttgaaatgtccacacactggtccagggaaaggggagcaggggtttcattatatacgccagtattttaaatatatattagctaacatgttttgaatacttactgtgtgctgggtattatgcagggcactttgtattctcttatttaattttcaccaaaccctactagtcgatatgattatccctactcttctaggaaacatctctctcgtagctgtcttcctgctccagtatgcactggttgctctctaggtgttacataactgttactctgagacttcctttccctgtctttctgagattcctctatgctctcctatcttgaatcccctgcatcttccatatcacggcacactccctcattttggtgaagtatatcctccattacctccctgaaaataccagtatctgaaaatgtctttattctaccatcataattgaaaaaggtagtttttctgaatgtagaattctacataagaaatatctttctctcattattttgcaggaagtactctcttatmtttcaggtttgtgtattagctactttgttactctccaagcttttagaatttctttatctctggtgctctgaaatgtcacggtgatgtgccttgcagcaagtctttttcccctttcatgcactttgcctaatattcagtgggcctttttattctttttttttggagacggggtctcactccgtcacccagactagcgtgcaatggtgcratctcggctcactgcaacctccacttcctgggttcaagcaattctcctgcctcagcctcctgagtagctgggattaaaggcatgtaccactatgccctgctgatttttgtatttttagtagagatggggtttcaccatgtaggtcaggctggtctcgaactcctgacctcatgatccgccatccttggcctcccaaagtgctggrattgattacaggcatgagmcaccatgcccagccagcccttttatttttaatattctcttccttgagttcaagcaaagttacttaaaatgcttttttgataatgtcctccctttcctcttttctttctggaatgcctattatttcgatgttgacttttgaattttctcctgtaatttccttatttgaagaatcctatagtgtattgtcttttagttctactttctgagaatttttttaactctatcttctaactctatcttgaagtttttgagttatattttttatttctaagagatatttcttgtcctctaattgcttcttttttgcagcctcctatcttgtttgacaggtggttcatctcctcttatctctgggaatattacggtttttctgaggtatttttcttgcaatttgacttgattcttattcatcagactcccgtctttcatttaggtctgtgtgtttcatgttataaactttccccaaatatttagtagtccatawctgcccataatgtataatattccaatatttattggaagggttttgttcatgggcatctactgactagtggacttcactttggggtgagcagagagaattagtcattttattggaagacttcctggatttaatatctataagtctgtctcattgggttgcttagttgttccagagaggaattttctttcctgggaagtatatatttgtctgccagtattctagaagccaagtgaaacaaaggagttggagaggtccttattgtttggtattaggactttcactcattctctcacttatctctctgctgtcatctactcttccagtctcccttttttctttcttttactgttcatgtaaattaaatcggacagcatgtactcttttgtatcttctttttataattaaacttttctggccaggcactgtggctcatgcctataatcccagcactttgggagtccaagtcaggtggatcacctggggtcagtagtttgagactagmctggccaacatggtaaaacctgtctttactaataacacaaaaaaattagctggttgtggtggcacatgcctgtaatctcagctacttgcgaggctgaggcagaagaatcgcttgaacgagggaggcggaggttgcagtgagtcgagatcgcgccattgcacccccgcctgggcgacaagagcgaaactccgtctcaaaaaaacaaaacaaacaaacaaaaaaaccacttttctttgagatttatatatgttattttgtatatccgttcatttcatttcatcgctgagtaattctactagttgtatatcccacagttttatttttcaaaggacatttatttccagtttaggctattatgaatgaaattctgtgaacattcttgaagaagtattttagaggatatttgtttttattctcttaagaaaatacaaggagcagaatttcttggtcatatactggtatatgtttaactttataagagagttttgattgcaccacaccctgaccaatatttgtttttgtcagactttttttattttagctattccagggggtttgaagtagtactgcattgtgattttaatttgcatttccctgatgattaatagtgataagcatattttcatataatatttaccatttatttatcttcttgtttgaaatatctgttcaagtcttatgcccattttaatgggacagtttttctgtttattattgattcatattattgacttatagtaatattttatgaattgatctctttattattatgaaatgtttctttttatttgtggtaatactcatcatcatgaaatctaatttgtctgatattattatagccacttatacttactgtatacctgattattttttccatacctttatcttcaatttatctgtatatttgaattcaaagttcatctcttgagcctgaaagtaataagcaccttgaacccggatctttatatctaaatatgattctccagtaaaatttatcagggttctctggacaagtggctgattgattgtagagcagggataagaagagtatatgctgaacctgaatcatttttgtggtgccaaaaagtaaggaagtacacaaaaaaattgagaagatatcagaaatgcacaaaaactaacctgaagtgactctcaatgaccatatctgggacaatttgagtaaaaaaataagtaacaataatggattatatcttataagataatataaaacaaatatcaatgagtctatgatgatataaattagaatgtataaatgggaggaaggggaaaattctttgcttaagcagaataataattaattaatataaaaagaataatggaaatggtagaaatagaaagtcaacatttggcaagcaccacagtaataattgttgcaggcaagaatcatcaatggatgctaaagtttgtgagaaaaagtttgatgagaaatgggctatttacataacctcaaaggcttttcccacaagatactgttaattacaaaggggaaaatattgagaaacatggaagacagcaccttaaccaaatgattgaagttaataccattagtaatgcaacaaatcagtatcgtgtgcctcctgatatgatgcactgagaagggcacaagcatcacctttatggtattcttgcaaaaaatgcataatctaaattcaaccatgaagaaatattagaaggatgttctatgactagtcagtactgctcaaaaatgtcaagattatgaaagacaaagaaagactaaggtactttccagatttaaagaaattaaatagacaggactactaaatgcaatatatgagtctgaattggaccctggactaaaattaggcagacagttggtgaattttgagtcaagtctgtagagtagttaatagtatttctggttttgatcatcataatatggttatttaagatgttaacatttggtggatctgggtgaaaagtatatgaggattctctcgcagtatttttgcaattttttwaaatctgaaattcttttaaaatgagaagttggctgggcacagtggctcacacctgtaatcccagcactttgaaacaccaaggcaggagactcgcttgagcccaggagtttgagaccatcctgcgtaagatggcaagactccatctctttaaaaaaaaagaaaaaagaaaaaaaaagtgaaaaaaaaagaaaaacatttaataaaatatttttaaacaataatgatagatgtcttttataggcaacatatggttagattttgcatttttattcagcttgacaatctctgtctttaattggactagtttgtcataatttatatggctggatttagctctcagaatgtgcagtttatttctgttcctctcatctgtttctttgtttctcttttcctgccttattttgggttagtcagatatttccaatattccattttaactcttctctgtgctttttagctctgcagtcaattaatgattaacttatgtcaatcataccactttatataaaatataagtcttgcaacaatatagatttgattattccacctatcttgtgcacaatgttgtcatttttattacatctacatatattttaaacccatagtatagcgatacaattttttttttgtatacaacaatttgttctttaaaagattgagaaggtaccttaaaaaaaaaaaactttacccacatatttaccattttctggtgctctttattactctctttagatctgaatttctatctggtgccacttatcctcagcctgaagaacttcctatagcatattctgtagtgccaacaatttgtctgctgatgacaaattatctctactttatccgaaagtatctttattttccttcccttttttatggatagtttttgctagatacagaattcttggtacattttccatttcagcacttatagatatcattcagttgtcttctggcttccattgtttttgacgagaagtcaaccattatttgtattcttattctcctgtgtgtaatgtattttaggctgctttcaagattttctgtttatcttttgttttcagcgtttaataatggtgtgcctacccatgttttctttatgtttatcctgcttcagttcactgactttattgactgtctcagcttgtgtttttctaaatgtgtgaatattttggctgtttttttccccaaatatttttctgccctattacctatccccttttatggaactccagttacacatacgtcagactgcttgaaatttttccacaagttccctttatttttcatattagataaattctgtctctatatcttcaagttcatacttttctccagtcatcttcaattgtcttttaaacccatttattgaatttttttatttcatgtattatatttttcagttctaaaatgtacatctggccggccgtggtggctaacacctgtaatcccagcactttgggaggctgaggcaggcggatcacctgaggtcaggagtttgagaccagactggtcaacatggtgaaaccctgtctctactaaaaatacaaaaatcagccaggcatggtggtgcatggtgcatgcctgtaatcccagctacctgtgtggctaagacaagacaaatcacttgaacccaggaagtagaggttgcagttagctgtgattgcaccactgcactccagctagggtgacagagcaagactctgtctcaaaaataaaattaaataaaataaaatgtgcatttgattcatttttagtttccccttcactgctgaggttccccatcttttcattcattatgaccttatttttcttttaagtcctttgaacatctttataatagctgctttattttccttgtctgcttattccatgatctgcgtcatcttgtggctggtttctgttaattactttttctcttyctactgggtttttttttttatttctttgcatgtctagtaatttttttattgtgggctggacaatgaatatagtaactaatagagacagtgaattttattatatttccctgaggagagttgatttyctttttttttttctttttgagcggagtcttactctgtcacccaagctggagtgcagtggcatggtccaggctcactgcaacgtctgcctcctggatttaagccactctcctgcctcagcctcccaagtagctgggattacaggcatgtgccaccacacctggctaatttttgtatttttcgtagagatgaggtttcaccgtgttggtcaggctggtctctaactcctgacctcaggtgatccgcccacctcggcctcccaaagtgctgggattacaggtgtaagcctccatgcccagtgttgatttttgttctagcaagttaacatagctgaactccaaattctgcttcccttttggtgaacatcagctgaaatcagtgctgagccctctcagtcttccatctgttgattttcacttgttcagttcagagtaaaactagggatttaggtaagagtttatatatagatttggaagaactctggtggcttctttttttctgggacgtttctcctctttttctagatatgctgtcaaccccaaactaggccttctgactcctcaagccagtaatagtgcagatttcagcttaagttctaggctctctgcattatgtggactgtagaatactactagaggaaaagccatataaatactgaatcttacctagtgtagttccttctttgaaggattgacatccctccagtttctgcttgtttggggtcattctgttgtactttcaaatagctcttttagtattttgtcacagaatataattgttatctgcagaaggattaatctaatatatgctactctgccattaccagaagttgtaccacattactttttattttccattgatgctgcatatgactgaataaaaaaaaaactctacattttctgtgaatggtggcactatctcatcaaactcttctaaaggaattgagcrtattactaattatattttttcttccttctcttatagacaagagatgatttcctaggtcaagtggatgttccactttatccattaccggttggtataggtgtccatgattttccttttgggcttatttttttaatttaataaatacttacatatataatatagctactgtaaataattgatttatcaaatgtatactacttttatttattgagcatactgttttctaaaaactcatttcaattttccgtttccattttctctttaagatttccgttcatgaaccccagtgagaaatagagaatttctgatgtttgttggcattgtgaaaacattgtgtaaaaaaattagtttgaaaatattctgctgaataactagaatgaggagtgcctaagctcacagaagaaaactaagatagtttacgacaatggaaacataaaacactaagaatcaggactaagaatatagcaaggagaaaaacagattcaggaaacattgcaaaatagaacattattgaatcacatgtctgacatggaggcttaagaaaataagcaagaagtaaagataatacaagttgaacttggaagataagagtggcgtctctygtagaaaagtgaggaagaaaagccattttgttttgaaaagcaaaaaatttatttttggacaaacagagttttgataggaaacaaagaaaatgaaagtttaaagtagactgctgacagagagataaaaatcagctaggtagggaaaagggactggaaggattgagtgttatcactgtccagataacagcagaatctctgagaataatgggctctcctgatgaaagagataagaacggagggccagccattgaccctcagtcaacgtgagtggatcagaaaagaaagagaagacagacaaggggaaacaggaaaagagccaagtaaaataatgtcatgagaatttaagaaaggagtttcaaggcagactgggtagttaacaatgcagaacatcagagaaggataataaaaactaacaactgctgaattttaaagaaagagaaaaaatacttctttttcagtcttgtgagttatattaattggctctccacagtctttccagagcataatcttttttttttttttttaaacagggtgcaggaccataagctttcagtaatatatttaatccagtcttactttccaggctgttgacttttttgatctcctagaattatctctatgctctaaccaagccagcctgcagacatgtgcatagtccgtgttcttttgggatgttaacatactaaccactctatactgtttttctgcttattctcttctgccctccctttggctccacaacccacctgctcagctagttttcrtttgagttgtgatgtcggctgcaattcctcttgggcaggaaagtgaaagcactgtcaagttagcatttgataaactaaagctacttttttttctcacttccaacttaaattatgccttaggtgatagttcatgagtattcttgaaaagtacatgcttttggtgttatagatatattttgaaaacccactattttattctagacagaaaatccaagattggagagaccatatacatttaaggattttgttcttcatccaagaaggtcagtaaatataaaataataatagcatattaaattttttatctcttcattacaccttacagtagccttattagaaattcagggtttaaacctctgtaaataagttacttctaaatattattattattattattattattttaaaagcttcattgctatttctgattaaaagtactgtatgcacattgcaaaacattctgaaaatacagaaagtgatcacagccttttgggaaagattcgttctcctaatacttatcagactagaaggctatttatgtcatattgtcatactatgctttaaaaaatcacaaacatgaattcatctaaaaccattacctaactcgacgtgcacaaagccaatttcagaaaaacctaactatattttgcatacttagtatttcagaagactcaaatatttagagaaaataacataagactggaatttaaaacccaaatagcatgcttataattccattttcccaaacaaagttacttgatgtttatcaaaaaaatttaaatttaagctgtaactaaaactccttttgatcttctatacctcattgacaagtaaaatctaktgaaaacgtgtgtggatttactgtcaaaaaggtcaaactaaagcagagaaaggacatctgtgaaagcaacagtatttgtcttgtttcttaaactataaaatgcatttgaaaatgtacttttggaacttagtaaaatttttcacttaaaaatgattttttaaattactgtttgtaatrtaaatattaaaaaaatgaaaaggagtgctcactgactgttaatatttactctctataaaggaagtcacatttaatttctgtagatgtctggaatgtaaatctcttttagtcttttaattttagactgattgtgacatctgcatatcaagaataactaaattgttttttcttatttgattgtcctagcagcctgcttttcaatttgtcacatgctttctagcgtctttatctttaaaaaatacaatttgtttcttctgtctgcaatgaatattattgcaagtgtagaaagaactttattcagatagaaaatgtactacattcctaaatttgtktgagccccattaagtcaaaaccttgaggcttcttttccaattgaaaagacatgaaacatacamttgtagagaaacttttcaacaaaacattgtctgagcacattttctgtatccatcttttatagccacaagtcagaatgttcacatctccttcagtatggagacacaagccacattagcggccttggraataagcatcaggatttcactgactactcatgaaaggatacactmaatttgccaaatccatgagaaccatacagagaagagctaaaaagattaggggaggcttgggagtgggggtaggtaatctcttgaagacagaataaaaggattaggactcttgtctagaaagacaaagggtaattgctacatatctgatatctgtaaaaaatcatccccaaaaaatctatatagagagctgagacaagtaaggatttcttaagtaaatcataggatactagaattgatgaggacaatagaattaagccttaaattagaaccttatgaaagcattgtaattgtagcactttgggaggcttaggtgggtggattgcttgagcccaggaattccagaccagcctgggcaacatggcaaaaccctgtctctacaaaaaaatacaaaaattaaccgggcatggcagtgtgtgcctgtagtcccagttatttaggaggctaaggtgtgaagatcacctgagcctgggaggtcaaggctgcagtgaaccgtaattgagccactgtgcttcatcctgggcgacagagggagatgctgtctcaaaacraaaaaaaaaaaaagaagaagaagaagaagaaaaaaaaagcagcagcagcttatgaaagacaggttttcaaaagatttaaaatattactacagcaggcagcagcctttagcttagacaactgattattcaaaraggtgatacaatataaaaatagattaggtaaattaatgtgtgacagattcaaacagctgccaaagagatgtagcaggtttcagacactgatcaggccttgccctctactcttctgtcatccaaaaaaatatggccagattagyatccctaaagcacatctctgaggatacctttctctatcccccaaattctcagtgatttaccaaaatatgcaaaataaagtctgaagttgtctgattttgcatgacctctggaccatcccaatctcctgtagtcccctttacatgtcctataatctagccaaactcaactactgcaatttccttaattgcaccccaaatttcccatctgtttcctggatcttgccctcttctttactcatatgccttttcctctactgccacaggtaagaatcctccccagtcttctaaccccaactcaaaggccagcttctctttgacattgtctctgatcgttcacttaaacttccttagcatcttctttgtgtcataacaattattgatttattkatttatttatttatttatttatttatatatgtttgccttttctctaccttctattcctttccctagatatcttctgccctggaacttgtctttgaacctccctttgtagaccccctggtacctagtgggtgttcattaaactcttattaattgaatacttttctcccrgtgttaaagttttatgaatatttattttcttttctacagtcacaaatcaagagttaaaggttatctgagactaaaaatgacttatttacctaaaaccagtggctcagaagatgataatgcagaacaggctgaggaattagaggtgagattttataaatatttggttaaactaaaaaaattttaatttcttattttactgtactctgaagaacaataactattgaatgaagttaacatgtgcaatgaagattatttacttggatgtttatttcacccaagcattaatagttttccctctaaggatatttcygtagaaggaatggccattattgatggccttcttaaaggttaaggagtagagaatagaatataaatctagtttttcaaagttttctaaaactgtatattctccattaaagtaagaacacaatttagtattttgaagttaaatatatggacattttgaggagactccactgattaggaactcttttatgaaatttaagtcctgttaatattcttattatggtgggagggctcataggaaaggaggggaattagggagcaaggaaaatttaagtgatctaataaagagccttctgtatgtggggcaagtagaatttaacaattttcatggatgacaggatgagaggaaagtccaagtcaagatttgtgtagagttacatgcatctggagtaagcaagtaggaggcagaaagtatgtatttggaatagaattggatagggtttggagactggaatcctagttgcacactctgtctagccagacctgtgtgagtcattgaacttttccgaacctcaggatcttgtttgcagagtgacaggatggcatcagatgacctcgagggtttcttccagcaaaaaaatttatgatttggaaaggggtcaaaaaaacacctgctcgttgaggttccctttgaaagcacattatcatcaaaaagaagtatcatttattcagtagctgtgttagtccattttcatactgctgtgaagaaatatcagagactgggtaatttataaagctttaaaaacaggtttaatggactcagttccacatggctggggaggtctcacaatcatggtggaaggtgaaagaggagcaaaggcacagcttatatggtggcaggcaagagagtgtgtgccagggaactgccctttataaaactatcagatctcatgagacttattcactatcatgagaacagcaccggaaaaactcactctcatgattcagttacctctcactgagtgcctaccacgacacgaggggattatagaagctacaattcaagatgagatttgagtggggacacagccaaaccatattaacagcagttactgaaagcaaagcacacagcgtatggcaccaaattgctctggagggttcttatttgttgccttgcttaacactttctcctctgactgagggcctgcttaggtctccataagaacagtgaagctgagggccttccccaggggctaggctctacctcacatgcccatgtaccttgagaaagaaaagctctagaacaggtagtgaatttgcagcagagctttctgggaaaattttaaatgcactaatgagattttgctttgcaggagaatctataataatagaaggaaagaccttttttttttttttttggagtcagagtcttgctctgtggcccatgctggagtgcagtggtgcaatctcagctcgctgcagcctctgcctcctgggttcaagtaattctcatgcctcagcctcccaagtagctgagattacaggcatgtgctaccatgcctggctaatttttgtatttttagtagagacagagttttactatgttggccaggctggtcttgaactcctggcctcaagccgtccatccgcctcggcttcccaaagtgctgggactacaggcgtgagccacggcacccagccaggaaagaaccttttttcttcaaatcacagagtatagatagcccctggtttggtgatcaaagaactctcttcacttatttgattaactttttgttaggtatttttctctgattttcgtataattgtttttaaagttttcaagtattcattcagtagaagtttctctacctggctttttggtgtaccagagtatctygaataatggaattctgtttgaaatgaaggatatctgctgtaaagaaagaaaattatttatttagtaacttgaaaaaatttaacagcatttcattatttagtaacctgctccaagttttgcccacatgcacgcatcataggaccctattcacagttgagtttctgtggagagaactgcttcacttcattttgcggtctcatgtctcagtgtttgaattccctcagaatgcaccttataatttcaggagatgtaagcttgtaggagtttatttatgaaaggccctaggaattcaaacacatgaatctgtgcttatttaccttctgtgtagctaatgactagaggagtcttgcctagtcctttgacagctagtttgtgactgtatatataaaattctactatttaaggaaaacaattgtaattttgaaatgaagctcactcttaggtagtttgtattctgtagtaaagtatggctataatagataattatgtaacatttgatttttgtaccatttgcaactttagggttagttgtatgtattttacaaaattaacataaaatgttggttgtacctctgaatgctttctttctgaccctctttgacttgattaaattgtgagcaattacatattggctttgcggttagaaattaaataaggktcattgatacttagmaagttattttataaagaatagcagctgatacatatttaataggaaggccttctatccaaaaaattgactgtatagaggcattgtatccagtctttctaagccgtgtttgattgtacaactctacttccacaaatttgagacaggtcttttttaagcccttaattaaattaatttttgttctttctcttcctgaatttactcagataatataaatacattaagcagacatttaagagagaaatctctaagaagctttaaaagaaatattcttttgctaccatttttctagcactatttttataatcctttacagcagtagtgagaactattttattaataaattgtattaatcttaaaggaaaagtaatcaatggttatattcaaccaaaaaatgttaartttatattttctcaaaagagtaaartataaaaacttaacgtgttttgggattgaaaccagaaacatacagtctgattcaatatatgcaagactaaattttaggtatgctagatcctgtattatcataatttaagagaaaggaaaagaaagaaagaaggaagatcaacatggatgggcagacaaagtaagaggatataaggaaagaagaraatgaaatttgggcaataaaaagaaaaaaatagagakaacaattcttataaaagaggtaaaaatttaaaaaaaaaaagaagaaaggttgggcacagtggctcacgctggtaatcccagcactttgggagaccaaggcaggaggattgcttgagcccaggagtttgagaccagcctgggcaacataacgagaccccatctctacaaaaaaattaaaaattagcttgggatggtagtacacacctaaagcctgaggtggaagattgcttgagctcaagaggtcaaggctgcagtgagctgtgatggcaccactgcactccaacctgggtgtcagaatgagaccctgttgagagagagaagaaagagagaaattcccctccagaccttttctcccaaaataatttattctgtcatcttcctactccactactcgtcaccttctatacagagctagccaaactagatcagccttgctgcagaaacccctatccatttctccctgctaccaaaaaacattcctttccttcccaactcttttccctgaggcctcgttttcaggtctagccttccaacgtggaagaattctcttccatcttggaagccgtccactgcctgtcacacagcagtcatttactgctgatctccaggcctagaacagaagctctgtgtatctaaggaaattattctgtgtcagttatcaaagcaccaaaaatgtttgccactttgtcatttggtcttttttttttttaatgttaatttagtagttttggccatatacaaatgtgggtgttttgttatcaaatttatggatcttctctttcatgccttcaaggtttggtgtcatacttaacagtgtcccacttttaaaatatatttctaaaattttcaaaagtttgttactactactttttggtttcacttttaaacatttagatattattcagtctgtaacttatcctgatataaggcatgaggtaggaattcaagtgaagttttttccaaatgggtgcccattttctaagtaatctgcgtattttgccacagatttcaaatgtctttatcatattctaaattcctataaagttttttttttttttttttttttgagacagagtcttgctctatcgcccaggctggtatgcagtggtgcgatctcagctcactgcaacctctgcctcctgggctcaagcaattctcctgccccagcctctcgagtagctgggattacaggcgcccgccaccatgcccggctaatttttgtatttttagtagagatggggtttcaccatgttggccaggctggtctcaaactcctgacctcaagtgaccccctcacctcagcttcccaaagtgctgagattgcaggcatgaaccactgtgcctggccggaattcctataaagttgagtttctttctgggcaaatctattgagctgcctgtcgatgcatgcaccagaaccacacagctttaattgttgtcatttataatgtgtttttatctggtagggttgatcttcacttcttgcttttctttttaaaaattgtgctgcttattcctgcttgtttatgtttctgttgaacttgagagttgcctcgtatctttttttttttttttcttatgagacagagtttcactcttgttgtccaggctggagtgcaatggcgtgatttcggctcaccatcacctccgcctctcgggttcaagtgattctcctgcctcagcctcccgaataactgggatttacaggcatgcgccaccacacctggctaattttgtatttttagtagagatggggtttctccatgttggtcaggctggtctcaaactccctacttcaagtgatctgcccgcctcggcctcccaaagtgctggaattataggcctgagccaccgcacctggcctatttttttttttaatcataatacagttttgttggaatcttggcaaatttatagattaacttgggaagaattgacacctttgtgagactgagtcttcccagccaagaacagactatgtctttcccttatttaggtcttcttttgtgtccttttgggagcattttaaagttttcttcaccagtttatttcagtttctaatgctttcctaaccaatcagtatttaatagaatctttgacctactgccttttcttttgtgaggtttctcatataaaagcattaactcttgctactcttttctatcaattccttactttaactgccctaaggctttatgttaattttgccccttgttaatctctgagaaaccaaacttctcagtgcattttttaaaaatctttctttggctgttttatgacttgataaaatgccttgccttggtccagaggagaaagagagaaatcagacaagggaatgagaatgacttttccatcactagagagttcactgtagcagttatttctaaatcatttgccttccccatcttgcccctttgtatatttgacctttatcaaatgattttttccatgtgtcagatagttattgatttctaccgtaagcaaggtgctttctctgtaggaaagacaatgaccaataagaaataatccttgcccttcattcagttgataatttagagaacagcctaagattacactagtagtttaaactatacttctcaatttctcagtactttccaactttccgtggttgtttatttaaacgattttttgtcctttttttctattagattttttaaaattttatttttgattgacaataattgtatatatttatggaggacaatgtgatgttttgatatatacttacaatgcaaaatgattaaatcaggctaattaatctcattaaatcacctcacatacttttattacttttttgttatgaaaattttaaatagatttgttttaaagttctgttttattgttgttttgagatgggatctggttctgtcacccaggaagaacctggtggaaactttacaggcttgtgcctttaaagttttttttgaaaaatttttagacaattttaaacaaaatttaaatggttatcatttttgcaaaaagagtcttcattatcataaagtatttacattatggtcttaaaagttgaggattgtttattctgtctatgcataatttctaaaacttgatataataaatctctttttaaatttcctttagcatataatttagaaagttaaaaaaatcatgcgtaaacttaattgctgccatcctgtttttcagcctggctgggttgttttggaccaaccagatgctgcttgccatttgcagcaacaacaagaaccttctcctctacctccagggtgggaagagaggcaggatatccttggaaggacctattatgtaaaccatgaatctagaagaacacagtggaaaagaccaacccctcagtatgtgctgatggctttcacaattttaatctggaaacactttaactacgaattttcattttgaagtcatgtctcagatggattcataacagtatagtgatccataaactataagaatactaggatttttattgcccaggactttaaaaatcctaactctgctgtttcrttttttaaatgacttgataatattcaaaattacttgactctagatactacccttttaattgcgtcttaattttaataggtttttaattttatgtagccacaaatggtagatttttatttttaggctgaattagaagtcttggagaattcttgtagtttgttattaaaatgtaataaaatgttaatttctatagtactctatttttaaaatataaattatttgtaaaatataaaggactcaataataagggtattacgttaaacgcgcatttgacagtctggtcaatgtccacataacttccagcacgcacagatcaaggacggaatgactttcaacatattctaacttctgtctcctcagtgattttttttattattagactgtatatacatttataaaatctcccattattcatatttattctcaaatccccttccatttttccttccatatagtcttataaagtcttcctttagtcttctgtttgaaacatactcgtaattttttaatgtgttcattagcctcctaatttttggctatgatattttgtgcctgatatatgccaagcacttttayagatattttctgttctcaaatccttccaaaacaaatcagcaattcaagtacttcatggcacagaagcttcagtcttcatagagtgacgtacagactgcaaagctgaagacactataaaattctgtagaattgcgctgttgcatacctcagtattatggcaagccttacatgagcaaaatcacagttctttcactgtggctgatgtcattttcaggtagccaaaatcatatatttagggggaaaaaaactgaagcattcccttagagccatgtatcaaaattatgttttctttagctayggtmcagtaagaactggtcttctgactagcctgagctcatgtcgcattaaataaacagtaattttattattaaatatttgaacaaaattcttgatctgatagactggttatattaaatgcaaataattagaataatataaatgactggggtaagggtgttcaatctgattttttttaattttaatttctgtgggtccctagtaggtatatatgtttgtggggtacatgagaggttttgatacaggcatgcaaggcataataatcacatcatgtaaaatggggtatccatcctcacaagcctttatcctttttgttacaaacaatccaattatagtcttctggttgtttttaaatgtacaattaaattattattgactgtagtcacctgttaagctattaaatactaggtcttattcattctttctgttttttttaatactcattaaccgtccaatctgatttattgtacctctcctaagctcagacaaatctttactattacctttttcaggacaggcccatgactgtatattacgaaaaacagataccattactaatagatatgtaattcctaaaccattaagcttttcattataaagttcttacaccatctttcattctgcccttcacattcatgcatggagtactctactcctggcttaagaccaattctagaaaatgtactatctgattcacaaagatgtatgtatgtgtaactctattactcttataataacatggcaaaataatacaatgaaataatctatgaagcgctctgatatttattcattcaacaaatatttttgagtacctatatgtgttggacattatcctagacatagtgacaaactaaaatatcaaatcagacatgttataccttttcacaaaaccttaaactccgtaaggtactctaaatataccagtctgcctacccatgattgaatctttgcatgttgaaatagcctttggtcaaagacaataaatttttttattgatgtaatgtagatttttttcccaatgatcacagaatctttgacaatcattttaactacttaagacatggatgatggctttttatacttccaatatagggacaacctaacagatgctgagaatggcaacattcaactgcaagcacaacgtgcatttaccaccaggcggcagatatccgaggaaacagaaagtgttgacaaccragagtcttccgaggtataagtagtttcctagttctccttgaaagacacatgctatagcaataaagtatgtgtggctcaagcttattctgttcattttagaactgggaaattataagagaagatgaagccaccatgtatagcarccaggccttcccatcacctccaccgtcaagtaacttggatgttccaactcatcttgcagaagaattgaatgccagactcaccatttttggaaattcagccgtgagccagccagcatcgagctcagtaagaygctcttagattttgttacggcttcagtagtttatattatgcatattatactattcaacaactaacttttatgtaaaattttgtcttaaatgcaataatatgtaataatacattagggaccttgggactttacaacatggtcatttttcaaatatcctcattagtagtatggaccagagtcatggcatccaaatttccattatgtcagtgccctccagtcaaaaatcactagggacacatttgtcattgaacaagttgggtttattattcatttcagcaagggagaacacgcaccattggtgttttggtagcagaatgttagaaaagacttcagggatttgggctcctgttaggtgattttgaagagggttttaggaagcaggactttgctctacatgagatgctgttgggaagcagggataattctatgattttgtatctcaaatcttatctgtagtgaggctaaagctatgattagcaaagtagaacagtcactcacatttgccaggatggggaaatgtttggtattttgtggcttggacaatgttcatgttttgtctatattcagccacgattacagagtggtcttgattttgtcttgatcttacctatgagtgccaggccagctcttggatgttagggactgcttttctctctcccagttatgctgaagttggttttttgtttgcttgtttgtttgtttgttttgagacatctcactctgtcacctagactggagtgcagtggtgctatctcggcttactgcaaactccgtctccagcttcaggcgattctcatgcctcagcctcctgaatagctgagattacaggcgcacaccaccacgcccagctaatttttgtatttttagtagagatggaggagtttcaccctgttggccaggctagtcttgaactcctggcctcaagtgatccacctgcctcagactcccaaagtgctgggattacaggcatgagccactgcttctggcctgaagttttaacattatatcacagatgtcaccaacaggtatatatgaataagaactgatatactttgactaaacaaggagatagatgacattttcacttcagccaccactgtaaaaactgttgtccatagggttcagaataaagtatcccagcatatgcttccacgatgagaacttcatagctagctgtctaatatgtatcatcaagggagattgagtagaagacaaagattattctctgaggatgctatttgtcatttccagttgaggtttccctgcctttcatttagttagtaaatatttattgagagctgatcacatatatgcagagtactatatgctagttactgaggatacatcagtcaataaaattaacaatatctcctgccttcatgggacttacattctagtgcagaggaaagcaaactacaaccggtgggccaaatcagcagctgcctgttatgaataattaccattggaatacagccacatcatttgttttggtattgcccatctctgctttcacacgacatcatctgaataaagtagttacagcagcaaccatatggcccacagccagyatttactgtctggatcttaacaggaaatgtgtgctaacctctgctctagcatcttcttcaagaagcttcacagtagatagttgtacgtgaatatgaatatctgccagtaaatccgcctgcctgcctcctgcccttcctttcttccatttgtctgttctgtcttccattcatttcattttttcacaggggagtgggacaggtcagtcaaagacctaaactacattaggccaggcgtggtggctcacgcctrtaatcccagcactttgggaggctgggattatagatgggttgaagtcaggagttcaagaccagcctgggcaacatggcgaaaccttgtcactactaaaaatacaaaaattagctcggtgtggtggtgcacacctgtaatcccagctacttgggaggctgagattggaagaatggcttgaacccaagaggcagaggttgcagtgagccgagattgcaccattgcacttcagcttgggtgacagagtgaaactccgtctcaagaaaaaaaaagaataaaccatattgatttgctgatgataaatcacatacgatcccattccccttcttcctggtattttttttacttaaagtaatacatggcaaccatatagtgtaatactatgcagccattgaagagaacaaggtgggctcgagtgtatatgttggatggaacaatccctaagagatgctggtaaatgaaaaacagcaaggtacagaacagtgtgtttgttacaccagaatttatgtaaattatttaaatgcagagcataaatatgtgtataatttactcgaggactaaacaggaaactaataactttgcttgcctctgaagagaggcaaagaatgagcaggatatatattgtttgtaccttttgtttttttgagatagggtctcactctgtcgcccagtctggagtgcagtagcatgatcatagcccactgcaacctcaaatttctgggctcaagggattctcccacctcagcctctggagtagctggtactacaggcacatgccattgtacccctgctaatttttttaaaaaatttttgtaaagacttggtatagtattgtttcccaggctccttttgaattatataacatgtatgagtgttacctattttaaaaaatatttttaaagcactgtatggttatggttacaaattgagattgtatttaggtatataaaataaaatttaagactgggcatcttggctcacacctgtaatcccagcactttgagaggtcaaggcaggcagatcacatgaggttaggagttcgagaccagcctggccaacatggcgaaaccccgtctctaatacaaaaattagccgagtgcagtggcgtgtgtctgtaatcccagctactcggtagrctgaggcaagagaattgcttgaacctgggaggtggaggttgcagtgagacaagatcgcaccaccatactccagcctgggcatcagagcaagactctgtctcaaaaaaataaataaataataaataaaaattaaaccttctatcttaccactaatatatgctccctcagttactattagtggtcaaagacctaaagaataaatgatactgatttgctggtgataaatcacatgcatacatatatagaaactttttctgtatattcataaacatgcatgcatacacatatatttgtagatgattttttaacctgagatcatcttaaacatactttttggtaacttgcttttttcacttgctgtctcttagacattgaaccatttcagtacagatagatgtactcctttaaaaaccaactaaaacagtcattaaactctggcatattccattgtacaagtaacccttaaggcatttcaccagtctcctattgaaagactttagattgtttacagtactattataaacagtactacagtggataktctgattcaatttgtatgtgcattgtaaattttgatgtcattaaataacaaaactaagatatttcagatagtgataatagcatgtatagaaaaacataaggaaagaaagaacatgagatttccaggaaacaagtagtctggaatgtccagggggtagattgcgaagtgggaagtggctgaagaagtcaggaagaggcaggtcgtggtgttcaggaagcattgttttctgtgttgtcattggcttcagctccagaaggacaggactggctgtgcattgcaggatgctctgagcctgcagcgtgcagcatggagaatggacttaaggaagtaagacttgcaacggggaaacctcttaggatattgctgccattgtaatcaaagtgacraaagatgaaacttgaagttaaaacaacaataaaactagtaactaaagtggagagggagtgtatttgagaatggtttctgtgaaacattcaagagaaggtgtccaggaggcagtccagcacggggggcatgggagctggatgtgtgaaggtgtccacgtagggggctgagagcgaccacatgactcagcctgcactctcaacatttgcatcctagccagccttctctcttctgccctgtcatatttaccctcactaccttagctgtcactcaaaggcaaatcacaaatatcaaggtattcttctgttgtcttgttttttcacaagaatcattccagcagaagaggcagcttacaagcctatacttttgaggaacaacctacacttcctgtggtgagttttaccctctcccatcaatcaataaaaatataaaactcagcatctctttttattttttggaagattgagtgtgaacgtttgccttacagggagccaatacagcacagaatgtaggctccaggtggtgatgttcagggaaggggcttaaagacaaaacatggagaaccgtctctcccatgttaaaagcaaagtctctgcatgctggtgactgtgggtggtatctgggcttgtcagttgaagtgctgtgctggctagaggtgatccgctgcatacggcatacaattcaggatcactgtgtccatttgctgatgttctgcacatgcacatggcatccagcagccatgtctgccctgtacatgaagaatagccagggtttcatcactcaggcgtgcactggcattcacatgcccggcagccaggctggagtttatcagtccttggtctgtttcttccctgcaatatcacatccaycagtctactaaggccttctgcttcctgctcagtgctgtcccagccacagcctggatggcagcttggaccttaaccctgcctccatcctcttcctaacacaagcctcactactgagtttgtctctgttttccagaagccctacttgtttttgaaaccaaagtaaaactcccaggctcccagcctcttcagcctacccttctccttatcccccaacagaagcctcctgctgccttcattcctgtctatgctttttcttccaagcagactgttcccatgtcctgattctctcccgcttctgagtctgtgtgcattccatttccccacttggaatggctttctcattttcttccccaaccatctggaactttgaatggcagtctagatatcagctttgaaaagtagggtatgttctagcacaggaatgcagagtctccaaaatcctcatcccatgagtgggttatctgtctaaataacaccctgcactaagaaagggacacagatcctgtgctgaggaatgagaggtcgcccacctatgcatcattgctctggtcagtactgaccatcaacaagaggacagatgccattgaaagactatcatcgctagccttactctcactcactgtcatctgtccagcctcctccattagatcagagcccgctcaagctgagttccatggtgtttttccctctgcacgttataatgtcctctatacaatgaatatgtggaagttctcattgaytgacagacattcacccaagacacaattttagatggaccggatgagcagcagaatctcgagatgatttatattttagtaccagaaaagttgtttccatgccttttttttccctcaatacattgattggggttttttttaagagctttcttggagtataatttacataccataaaatccacccatgtttgatcatacaattaaagagtttttgtaaatttatacagttatggagacatcaccacaatcaagtttaagaaacttctgtcacccccaaaagttccctcaatccctatgcctactctcagttgcaagcaaccgctcatctgctctctattgctacagtttttgccttttctagaaatctcgtgtaaagggactcgtagggtgtgggcttacgtgtctgacctttttcacttagcatgctgtttttcacatagacccatgttattgcatgcctctattagtgcacggtattccactgtagagatatatccactacatttatctattcaccagctgatggacacttgtagaactgggcagcatttaaatgcatcattttgtgatgtatcagctcatcacaactgtccccaaagtacgtaggactcccgtgtatttagtaagtggtgtcttcattgtagagactggtggtgatggtttttatgttgtaagccaccttagggagccacaccaaaccagggcttatctggttcaaaatgacaacaggaaggccagatttaggacttttttttttcggaggggagggggatggagtcttgctctgttgtccaggctggagtgcccaggcgatctcggctcactgcaacctctgcctcctgggttcaagtgattctcctgcttcagcctcccgagtagctggactacagacgtgcaccaccatgcccagctaatttctgttattttgagtcggagttttgctcagttgcccaggctagagtgcaatggtgcaatctcagctcactgtaacctctgcctcccggttcaagcagttcttctgtctcagcctcctgagtagctgggattacaggtgcccaccaccatgcctagctaatttttttgtacttttagtagagacaagttttcaccatgttggccaggctggcctcgacttcctgaactcaggtgatccgcccacctcagcccccaaaagtgctgggattacaggggtgagccatcatgcccagcctggatttaggactattttaagtaagcctggaaataaccagacttctctttattcatttgtaacaaactatgataaatagcattctcctagcttttagagaaacaaggcaggagtaactgttgattcagcagataagcatgatttctgttgttagattacctgggttcaaatctcagctccattccttagaagccatgtcgcttaacaagttacttccattactctcggccttttggctaagatcaagtatagtaacaagttacttccatattgtaagcttctgtttactcaccagtaaaatgagccagtattagtaattatctcattgaaattcaggtgggaagtaaatgacgttatctgtgttaaacaggacacgtgcttgttattgttggtatgttttattagggttgttatcactctcattattattgttctagtgttttttttcccaagtgaagtactgtacactttatcttgcacattttaagatatttaaaatgtggtttatttcactaaaatgtataatttacccatttttattataatacatggttttagttcaaaataaaatataatttgttttaaagcaaacaagtagtgaagaagggatgtggtgttttttaaaggattctttcttattaatatttaattcttctggccaggcacagtggctcatgcctgtaatcccagcactttggggaggccaaggcaggtggatcacttgagattaggagttcgagaccagcctggccaatatggtgaaaccctgttgatactaaaaataaaaaaattagctgggtgtgttagcacatgcctgtaatcccagctactcaggaggctgaggcacaagaatagcttgaacccaggaagcagaggttgcagtgagccgagatcataccactgcactccagcctgggcaacagagcaagaccctgtctctctctgtctctctctctctctctcactctctcagaaaaggtaaatatatatatatatatatatatatttctagaaaaggcaaaactgtagtaacagagcagatgagtggttgcttggggctgagagtagacatagggacagagggaacttttgggggtgatagaaggattcttaaacttgatgtatttaattcttctgttattcttcactttagcttttgcctacttcatctggattaccaccaggttgggaagaaaaacaagatgaaagaggaagatcatattatgtagatcacaattccagaacgactacttggacaaagcccactgtacaggtatcctgtaatctatcaacttgctttcttacaggatttaaactgtcacatccctatgtaaactattacatcactttgtaggatacactggatacttctaccaccttcttttttttttttatttttttgagatggagtctcagtattgtcgcccaggctggagtccaatggcgtgatcgtggctcactgcacctctgcctcctgggttcaagcgattctcctgcctcaccctcctgagtagatgggattacaggtgcccgccaccacacctggctaatttttgtatttttagtagagacagggtttcaccatgttggccaggctgatctgaaactcctgacctcaggtgatccacccacctcggcctcctaaagtgctgggattataggcatgagccaccgtgcctggtcatagcatcttctaattatttatattctgacactgatgttaagtgtctaccttttcctatgaatctctaatatacacgaattaccacttgttattatataaaacaagtacaaatgagaataagaggaaaaagcaaatgatctcgtctttgggtatttttgtaatttgaatagttaggatcattattttaactaacagataatcttggcgattgggatctattaaagaagtttatgctgggccgggcaaggtggctcatgcctataatcccagcactttgggaggccaaggtgggaggatcacctgaggtcgggagttcaagatcagcctgaccaacatggagaaaccccatctctaccaaaaatacaaaaattagccaggcgtggtggcgcatgcctgtaatcccatctacttaggaggctgaggcaggagaatcgcttgaacctgggaggcggaggttgcggtgagccaagattatgccattgcactccagcctgggcaacaagagcgaaactccatctgaaaaaaaaaaacagaaaagaaaatgtaaaatattgtttatatgcctgtgtttctaattttgcaacgagagaacactcattttattttatagaatgaggtgctgcttgataaaaaaaaaactttgcattgatgttgtggccctgtaagtctacacctttttgcttaacattgttttaaagctctgtccatgttgttatttatagatccagtgtatttctcttaactactaatattccatcatgaatatattgcatttcaattatccatttctgtggtagatatttgccattcattttgtctgcccatcatttgaatctacttctgtgtatgaggaattccccatcctgtgagttttgggaaaacaaagacgacctcctcctataggcacgagagctccccttgcagctagggcttgagcttgcagacctcgctccttcagtcagatgcacccacagcatactgttaactaacatcttactgcttgagaattagttgaaaaattataaattactgtaaaaataaagttttacaaaataatttattggaaaaatgttattaaatgtaatgcattattgaaatgttgggaaaatattaacatgccataactacatttgaaaatgagcctcaaatatttagagtctctttaatggagggtgtgtattctatttgcaggttaarttacctttttaactacatctatttgtgagttctctctataaaatattacaatatgatttcattaatgtgctaggccacagtggagaccagtcagctgacctcaagccagagttctgcaggccctcaatcacaagcctccaccagtgattcaggccagcaggtgacccagccatctgaaattgagcaaggattccttcctaaaggctgggaagtccggcatgcaccaaatgggaggcctttctttattgaccacaacactaaaaccaccacctgggtaactttgatacttttccatttaaatttataacaacaataatcatctcttatgtatagttccttaaaatctttaagtatgtattagtataacctatgtttcctaatattcattgaaaggtatattgaattcttaataatattatttgtattcaggagaatgcttatgcgtctttttaatattgttttggattatgatggagatattcatgtttacttcctatttccagtttttagctcactagccataaatgcttaagaagatacataggaataatcctttgcttttatatgaggctttatagctccaaagcacttttgaatccatatctcatttaatatcaaaaaaaccttgtgaggctaggtagaacaagtatttttattttaagataaggcttaaaattgtttagtgcttggcttactactaatagaaaaattacctaaaggccgggtgcagtggctcatgcctgtaatcccagcactttgggaggccgagggggkagatcacgaggtcaggagatggagatcgagaccatcctggctaacatggtgaaaccccgtttctactaaaaatacaaaataattagtcaggcatggtggcgggtgcctgtagtcccagctgttcaggaggctgaggctagagaatggcatgaacmcaggaggcggaggttgcagtgagccaagatcgcaccactgcactccagcctgggcaacagagcgagactccrtctcaaaaaaaaaaaaaraaaaattacttaaaattagcagcagatgaatatattttaattaattattaaaagaccaacatagcttaaataatactaaacttatttaataaattaataatattaaaataatatatataaattaaaccaaataaatttaattttgttctcttttttaacattctgaattggcctttgataacctttttgggcttaccttcctgttattcaaaaatattaatcgacccttgaacagatagctggcaaaatgcatgttctggggcttagaaatatcatgtggtccagggccaggcacagtgatcccagcactttgggaggccaaggcgggtggatcacctgaggtcaggagttcgagactagcctggccaacatggagaaaccccgtctctattaaatatacaaaaattagctaggcatggtggtgcatgcctgtaatcccagctactcaggaggctgaggcaggagaatcccttgaacctaggaggaagaggttgcattgagctgagatggtgccattgtactccagcctgggcgacaagagcgacactccacctcagaaaaaaagaaagaaatatcatgtggtccaatttaatgtcctactctttcaccagtttttacatagagaaaagccctatatagtgacacatttcctaaagagcggggcaaaagaaatgaccagttagtggtgatccctgagaactgatcgttattccttttgatattatagcctgacagtgatagattttagaaggagaaaatattgtgtcacatatttaggaaataaagtataaattgacttttacaagagaatattttaaatatccattgatgttagaaaacatggtaacagactgactttgattattttaaaatttgtgtgtattgttctttatttactctaccaaaaaaggaagatccaagattgaaaattccagcccatctgagaggaaagacatcacttgatacttccaatgatctagggcctttacctgtaagtgtwtagaaatgctaacccatctaacttggctatctcaaatattttgcattttcgggtatagtatttctttatcatctataattaatgttattattaaaatgttgataccttctaagaatggaatggaatatgcaagttaaattaaccatacaaccagtgctatttttctatccattcatctacgcccctctcctaaaataattgaaatacatttttaattatagccaggatgggaagagagaactcacacagatggaagaatcttctacataaatcacagtatgtgcagtgcgatttttcattatgttattttttgtaataaattttatgtgtgagaaagtacatcttttttctttttcttcccttcagatataaaaagaacacaatgggaagatcctcggttggagaatgtagcaataactggaccagtaagtctctctgccagtgtgctctgatgggactgtccgctcacctgtcycttcaagagcagatagtcacgggcataaccctacaggcaytgagaggaaagcacattggccgttctctcctctcccccatttcccatactccaagtctcagttatttgaaaagattctataacgtcattatcyttaccctacgcratagcagtgaggggacaagtgagccagacagtcagaatgctaaggcagtgtgggctgctgagctcaggctggtgcctcccactgtctgaacaagaatgatgacagtcctccacaaatcagagaggagcagagagtgtatgcggatgaggaagcagcagcaccctatccactccagggtcattcttaaattttttwatagaaatcaagccaggctcacacctgtaatcccagcactttgggaggccaaggcaggtggatcacctgaggtcaggagttcgagaccggcccggccaacgtggtgaaaccctgtctctactaaaaatgcaaaaaaaattagttgggcatggtggcaggtacctgtagtcccagctacttgggaggctgaggcaggagaatcacttgaacccaggaggcggaggttgtggtgagctgaggttgtaccaccacactccagcctggacaacagagcgagactccatctcaaaaaaaaaaaaaaaaggaaaaagaaaaagaaatcattgtaaatgcccagtatgtaagacacatccacacttaagtataaatattaccacgtatgataattgtactactcttgagtcagattgataggaaaattatccttttttatagctgctttttccattttattcagattttgttttctaattcataaaaataaataaaactgaagataccgttttttattactatttactgtctcaacatgtagtcctttaatggctcaaaaaggcaactccttggagttcaaggaaaaagtacgcttttcacattgtccctttaatggagaaatcactttgaaagtctctttagaaatggaaatttttgttkctaatatttctctacctggaagaaatttcctatttctggcatgctgcattttaagaatattgcataatgaaaattacagccataggaattgctgaatacaattttatcttaaacagagaaattaaatattttaaagtttaaagttttgtatttgtttttcttctaattaaacttttctttccaaatatttttcttttaatgcccttacgttcataaaatacaacaaataaaaattgttccagaataaaaacaacctaaacttctttatttttccaaaatttccaactaaaggcagtgccctactccagggattacaaaagaaagtatgagttcttccgaagaaagttgaagaagcaggttagtcatgtttrtaataaatacttaagagtcatcaatatatagatggaaagtaatgggaaatgttttttacagtaataatttgttctatatttgtaacaactttgagtgaacagtttttcctagagaaaggatgctcattttttgagtagctgtgatatatcactacagaccataattagtttatgtctttatttttcagtatattttataatatagaaaaatggcatttaaagtttgctttccagagctctaacctggtgtatccctgtggggtttatggggcttgatctttgtagaatctgagcaagagtgggtcaggaaattatcttctggcctagtctttgactgtgttggaggacggtctggatttttttatgactttgttgttttccagcgaaagtcattcattctctacggcttcaaatgtaatgtctctgcataatttaaaaatacaatcatgagtggaactgtgctcttgtgacttgtctccttatgcttatcagttatgttcactacactttttcccatcgccacaaatgcaatatgtttggaactaaactcatcatctggccatctgtttcattcctggttttgtttactagttttaacgcctctcttacttgctcatcctgtcctcctttgcctgcagtttaggaatactaccactaggtggccatattgggttatactttcttgcattctaagccagaagctggctttcacaaatattcaagatagtgggtgggctacctcagagtttcacccaaatttttagcaaaaagaaaacatgatagtttttttagtgtaaacattttatgccctaataaaatccttaaatatcataaactttctaaactcatttttaaggataattttgtgggccaggtgcagtagctcatgcctgtaatcccagcactttgggaggtcgaggtgggtggatcacttgaggtcaggagttcacgaccagcctggccaacgtggtgaaacccccgtctctactaaaaatacaaaaattagttaggtgtgatggcgcacacctttaatcccggctactccggaggctgaggcaggagaaccgcttgaacccaggaggcagaggttgcagtgagccaagatcgcgccactgcactccagcctgggcaacagagtgtctcaaaaaaaaaaaaaagaaaaaagaaaaaaagaataactttgtgtcgaaatttccctggaaatttgttttctacttctagactttgggattttaaatgtttactgatttattgttctgctaaatattttcattgttaatgagaatacgctggaggaatagaagcactagcttctccatttgccactctgagtggttgaaacatgttgtagtatctaattattaatgtcttccaggcagcaggagatgggagacaatgccattacaggcctcaaaatacaaaaaaaaaaccatgataaaagcaattatatttgttgatctctcattgcataccaggcattcttcttagaagtttacatatgttattcatttaatgtctacaataactctgtaaggaagggactactattacctttcacagatgaggaaactgaggcacagagagaataggtaatgtgatcaagtcccatggttattaagtagaaaagctaagtggtctagctccagatcccatgttcctaagcaacatgacatgtcatattggtgactaagagaattaagagagaaattaattaatttgtatggaaattacccagaatgcaacaaaggtatgtaaggggataaacatataaaagaaaggttaaaagacatgaagtcaccccagaaggaggggaccaagatcatgaagaggagaaggctaagaatatgaattctcacattagtaaaaaggcccaagcagtactttaaaaataaaatctgtatctagacacatcatagcaaaagagcagaacacttagaatgtaagaacatgtaacaccaaaacagaaataaagaatattaaaaacaccaggtgcagtggttcatgcctgtaatcccagcactttgggaggctgaggcaggagaattacttgagctcaggagttcaaagctgcactgggctataatcatgccactgcactccagcctgaatgacagagcagtactctgtctcaaaaaaaaaaaaaaaaattgaaaaccggtgcttgaaagccgtgcactgtctttaaccttttcctcttccttatcctcaacatcttgtagttaggaataatgatggctaataattaccatatgccagatactgtttaagcatttttaatgcatggagttgaaacaactccatgtgggtagctatcattattattatccctattttatagatgaggaaactaatccttagaaaagacatgtaacctgcccaaagtgtcactcctagtgaatggtggagtcaataacacaggaccagattccagaatgcatgcacttgtctactactcagttcaaacactgaagttctcttgtacccccctcttcttccactaccattgctccttcacaggtccctctgtcttctctcactcagctattccaggggtctttaactgaccagtgtgcctcttgtttctcctctttaaaaccaccctttacaccctgtccygtcagcttctgagaacccagcaatctgaccgtgtggctccccaacccagaaactctcttcttaactgcattcacactgtccaccctctggccccagactacttttttgcatttttcccctataatccctgccttctttcccttcctctcccttcttctccttctgtgccctctaggtattaaatatatcagacctctcatgtatgctgttcctccrtccttccctccctttctctgtctaaagacttcctctcaaagccttcttgattgcctcatttgaagtcaatagctcagtcttttatgccctgcagaacattgcttccatctctatcatcagcaattgtcctcctattttaagtctcagaattagcatcatttacacttgtttttcacatatacgccagatgagaaactccttgaggaagcaaggacatcttaccctatgtttttattccctttattccccatcgttggccctactacaataccacctggcccagagtaggcctttgataaatgcttacctgcaccagctgcctagtatccagtctaaagttgctgttctgcaagcttaccatttttttaatgacataagcagtataggaaactgctcatatcatgcttatattgcttatatcaactgcttacattattatgtttctatagggctttccattttccctaaataaattgagaatgaaattgattttttttccttagagctaaccttcttttttggaggtgacagaatattgatggcatgttttctcttastggtttcccctggaaatttgcccatgaagtactgaggaataaaatatttagatayatcttttgtaaaatttacaataagttctgcctaaagcatagttgtgtacatttgtcacataagcaaagaacgtacaaaagattagtgaggcaatgtagctccattaattaagagcacagactcaggagctaagactttcttaagtcgtcktcttcagttttatgtgtaaaatgaagacaataatagtagctttcgcatagtgttgttatgaggttaaacacgttaacctgccattccagggtacccatgcctggctgttttagtccgttttcatgctgctgataaagacatacctgagaccaggcaatttacaaaaggaagaggtttattggacctacagttctacatggctagggaggcctcacaatcatggcagaaggcaaggaggagcaagtcacatcttacatggatggcagcaggcaaagagagagcttgtgcatagaaaccattagatgtcgtgagacccattcactatcatgagaacagtgcaggaaagatccgcccccataattcaatcacctcccaccaggttcttcccatgacacatggagattgtgggagttacaattcaagattagatttgggtagggacacagccagaatatatcactggcacagtctgtaaatgtcaccatctgttaatgagtgaagcaagatagactccagggaggaaagtagaggtagggaaaagcctgaacagacaggcacaacagctagcaggcagtggctatcctacaggtcacagaacggtgttcattggaacttaatatgaaaaggactgttaacgaaatgccttcatgggggcattaccatcaccatcaattgcttctttaggccgggtgccatggcttatgcctgtaatctcagcactttgggaggccaaggcgggaggattgctagagcttaggagtttgagaccagcctgggcaagatggcaagacctcaaaaacttaaaaaattagtcaggcatgatggcatgcgcctgtggtccagttacttaggaatcggaagcaagaggatcacttgagcccatgaggtcgaggctgcagtaagccatgttcacgccactgcactccagcctggactacagagctgtctccaaaaacaaaagcttcttcagatgtaaagaagtmtatattactaagtgattaaagaaaatgcagaaactgtctcataccatagaggaaaccaagacaatatacctagttgtgttttccctgagtatattacgtaaggaaaaagagacttggacacagggtgtagagggaatgttataactttatgagagatgggtttgttattatgttgaactgatttaaacagtacgtctctcctctggattttcagaatgacattccaaacaaatttgaaatgaaacttcgccgagcaactgttcttgaagactcttaccggagaattatgggtgtcaagagagmagacttcctgaaggctcgactgtggattgagtttgatggtgaaaagggattggattatggaggagttgccagagaatggttcttcctgatctcaaaggaaatgtttaacccttattatgggttgtttgaatattctgctacgtaagtacctttacaatgattatcggcagaaaaagaaaaatcactgttttaaaagtaagagtcggccgggtgcagtggctcatgcctgtaatcccagcactttgggaggccgaggcgggcggatcacaaggtcaggatatcgagaccatcctagctaacacggtgaaaccccrtctctactaaaaatacaaaaacttacccaggcgtggtggcgggcgcctgtagtcccagctactcaggagsctgaggcaggagaatggcgtgaacccggaaggcggagccgagatcacgccactgcactccagcctgggcaacagagcaagactcctctaaaaaaaaaagttaccattttagccattttaaatatacaatttagagtcattacatacattcacattgttgtgctgccatcccactatccaactctagaactttttcatcttcccaaaatgaaaccctatacccagtaagcactcgctccccattccctggcagccaccattctgctttctgtccctatgaatttgactcctcgggtacctcacataagtggaatcattcaatatttgtctttttgtgaccagctcatttcacttaacatgatgtcttcagggttcatccatgttgtagtatgtatcagaatgtccttcctttttaaggcagaataatattccattatttttgcatataatgctttgtttaggctgggcgtggtggctcatgcctgtaatcccaccactttgggaggccaaggcwggtggatcacaatgccaggagttcaagaccagcctgaccaacatagtgaaaccctgtctctactaaaaatacaaaaattaaccaggcatggtggcgggcgcctgtaattccagctacttgggaggctgagacaggagaatcacttgaacctgggaggcggaggttgcagtgagctgtgaccgtgtcattgcactccagcctgggcgagagcaagactccatctcaaaaacaaacgaacaaacaaaactttgtttatacattcatctgccaaaggacatttgggttatttccactttttgacagaaattactatttttaaaaccattaaatccagtggaggaatgtggttctaacagtggtaaacaactcttaaaggaggaagattatttgtaattatttgtcatattaaagtttttcaaatgaagtatttaaatggggttgtctttacagggacaattataccctacagataaatccaaactctggattgtgtaacgaagatcacctctcttacttcaagtttattggtcgggtagctggaatggcagtttatcatggcaaactgttggatggttagtattaagtataaactttttacaatataattacctgttttctttcacttggtaatcatcctaaatgtatttggttttttgcaaggttttttcatccgcccattttacaagatgatgcttcacaaaccaataacccttcatgatatggaatctgtggtatgtctttttcacttatagtatagacraagtataatttaacaagcagcttgaacattttgaagaatttgcttttaatgacatggaaattaatatattatcatgtttcaaaatacaaatgaactttttcctcaacattttattatgaaaattttctaacatataataaagttggaagaattttacattggacagttgtatatcaactactcacaattgctttttttctagatttactttatcacatacctatctgtctatccatcagtctgtcttagtttcttcatgcatttcagagtaagttatagataacattaaacatcccactaaatacttcaataggttataccaagttatatgtcttttgaatcagtatttgcattatgatcttttatgatgaatgttatatatatatatatatatatatatatatatatatatatatatttttttttttttttttttttttttttgagacagagtgtcactctgttgccaagctggagtgcagtggcgtgatcttggctcactgcaacctctgctttccaagttcaagcaattctctgcctcagcctcctgtgtagctgggactacaggcgcgcaccaccacactcagctaatttttgtatatttagtagagacagggtttcaccgtgttcaccaggatggtctcagtcttttgacctcgttatccgcctgcctcagcgtcccaaagtgctgggattacaggcatgagccaccgcacctggccaaatggtgtatattttttaaatggcagtcgaaaggcaaagcgttatggttaggttcctagaaaaaaacagaagcccaaggattaaaccccggactgtagccgtgttgtttcctgtgctgctgaatagcctcacacaatgtgtgttcacatgaattccagggcatcttccttagtaccaagttcattttttattcttttcttattacatattaacagcacaaacagtgtgattctttataaatcataagattgcacagttacttgagttggttcattgagcctctgtatttattaagagatttttctttaactcgggctgggtataaacaatggcctcctcatagctacttaaacatttcacacttagtgccggacacaggggtgtgcaactgtaatcccagcactttgggaagctgaggcaggtggatcacttgaggtcaggagtttgagaccagcctggccaacatggtgatactctgtctctacaaaaaatacaaaaattagccaggcgtggtggtgcgcgcctgtagtcccagctacttgggaggctgaggtaggaggatcacttgagtcaaggaggtcgaggctgcagtgagccacagtcgccccactgcactscaacctaagggacagagcgagaccctgtctcaaaaaaaaaaaaattaaattaaaaaataaaaataaaacatttaacacgaagtcacataggcatatgaggaatgtgctaagtgctcctggatatccagagaagttaggttttatctgaaaacttctgtattcattcctttaactggatgataaaatctgtacctccactgcttccacataaacatagattctaaacttttaagtaggcaccaattgattaattgattgatgcatttttactcttgcccttacctgtcatccatctctttttgtaatacacacacatacacacatacatttttgtttatatatgtgtgtaagtaaaggatgtccatctgacctctcatcttttacccaattattcagaccctctacatactgttttttgcaatttcaggtgtgttatagatacaaattttaaatatgtaatttttcccatctaggatagtgaatattacaattccctaagatggattcttgaaaatgacccaacagaattggacctcaggtttatcatagatgaagaactttttggacaggtttgtgaattttgatcwgttaaaatggcacataaattgtgagacaaatgtttagatgttaatacgtacacttratacattcctaggctctgtttttacattcatttcccagtaacaaaagctgtctctgagyaagaatttgtactttctttaacatttgactcgttccatatttattttagtaaaactagtattttaagttttcttagtttttaacttttgactggacttaatttaaaacaccaagtttctcgtataactacaatatgtatactttttaaatttttctcgctaaaataacatatcaagttattgtgtttaattttagacacatcaacatgagctgaaaaatggtggatcagaaatagttgtcaccaataagaacaaaaaggaatatatttagtaagtattttattagtawgtattttattggatataattttgtactttattccagaaagactcttcttaccatctttctctgtccccttgtccagaatctcagtgttctttttctctatcacaatgcagtagcaagcactcatattcagcttttaccttggtctcagctagcctttagtttttgtttctaactagaataattgtgcctcagaattttgtcttggttcacatgaaaatgaaatgttgtttctttttagtcttgtaatacaatggcgatttgtaaaccgaatccagaagcaaatggctgcttttaaagaggtattcattttcttttatttgctcttccataatgtcacagtataacctataagtttcaaatattaggcctcatcacatctgagaaaaataagtatatggcttgttttgtgaaatcattctaaattatatttttatattaactaaatattccattcagtcattcaagaagtctagacaataaacatggacaggtcccctttcccccaagccttttccctattccattctcttcactttaggacagcaaaagaacaagagtgctttagggatagtataacatattgtttgtttttctaaataggatcaccttacacattttgttttgtgacttactttcttctttttttttttttttgagcgcggagtgagtcactttgtcgcccaggctggaatgcagtggcgtgatctcggctcactgcaacctgcacctcccaggttcaagcaattctcctgcctcagcctcctgagtagctgggattacaggtgcccgccaccacgcctggctaatttttgtatttttagtagagacatggtttcaccatgttggtcgggctggtctcaaactccagacctcaagtgatccatccaccttggcctcccaaagtgctggggttaccagtgtgagccaccgtgctcggcctactttcttcttttatcagatatttattagggatatttacatgtgacgacatatagctgcctttctttgtggctatattttattcagaatataaattaaaaagttacttaaatttttccaattggtagacagattgtcagagyactcatttcttaagctaacttacaatcttctgttaaatatgtatctggctgggcatggtggctgacgcctaaaatcccaacacttgaggaggctgaggcgggaggattgcttgagcccaggagttcgagaccaacgtggacaacatagggagaccttatctctataaaaaattaaaaatttgggcgcggtggctcattcctgtgatcccagcactttgggagtccgaggtgggcagattgcctgaggtcaggagtttgagactagtctggctaatgtggtgaaaccctgtctctactaaaaatacaaaaaaattagccggacgtggtggcgtgcacgtgcagtcccagctactcgggaggctgaggcaggggaattgcttgaacctgagaggcagaggttgcagtgagccaagattacgccactgcactccatcctgggcaacagagcgagactccgtctcaaaaaaaaaattagcctggtgtcatggcatgtgcatatggtcacagctacttgggaggctgaggctggaggatcacttgagcctgggaagtcgaggctacagtcagctatgagctatgatggcactactgcactccagtctgggctacagagtgaaactttgtctctaaagtgtgtgtgtgtgtgtgtgtgtgtgtgtgtgtgtcacatactttttcataaattcagtattgagtactatgtgtatggtgctgtaccaggccaaaagacataggtcctgttattaaggtatgtatgatgtaaagagtgaaatgaacagaggcaagcataaagtgctaggtgagcacagaagagaagtacaaaccagggaggggcaaaggaagggacaaagaaggactagagggattggccaaccatggagaagagggaaatgcagttctaagcaacaggagcagcgtgtgtgaagtctggcaataaggtaggctgtacccacaggcagttgagtatgctgggtgagagaatgcaagagggaaacaatcagcctgcggagctaacagaccagcttatacagggcctgtgtgtgaagtggtagagttcggagttttctctgaatttcartgagggagaaggaaggtagcattaaaggctattaaccaataagacaccaagattcaatttatgttttagatcattctggaagtgctatgtagagcaagttagaggagagccagactagcagcagagacttcccagcagagttgggaaagtgctacagtaatcttggtgagaaatggtgaggaattaagggaatggtgagggagttgagataggattggtaagggaatgaagatagtggtggtgttcagagctgcatgtgcatttgaatggcattcaaaaagggagacttaaaggatagagatgtatggatttggggatcatctgcttaagtgtagtgaagctgtgaactcgatacaatggaaaatgtgaaagggctgtgaaagcggatggcctcacatgtggagagagacctgggaacaccagcatcttaactgttgttttgaatggatggtttataaatggacagtttagggcatgggaaaaaaaaaaaaaaaaaaacagaacaggagactgcaaaggaaataaggaaattaacagaggcagacaaaaaggtatcaagagtagacagagtttcaatagaaaagatggttttaatcatatcatactgcaaataagtcaaatatgataaggaattaaatatgtttattagatatagctgcaaagccatctttgactttttccagaacaatttcaaggaagctgtagtgtagaagtccgattgcagtgggttgaggggttagatgggaggtgagtgaatggatttggtaagtgcataacactgtcaagaacttggctgtgaagggaaaaagagagtcattagtttttgtttgtttgtttgtttgttttgctttgttttaaaggtaggtatgggttgagcacatttaaatgcgtacagagtgagccaataaagagaaagagatctagtgagatgacctccctgaggagcaggtgaagcacaggtgcaggcctagcctgaaagaagaggtggcactgcggtgggaaggaggccatgatgggtgttggtgatggttgggacgcagggatggagaagcttgagggagttccattgtgcataattgcctcttttccctcaaatagaacttacacttacctactgtaaagaaggggtgatgtggaggcttgagaaggatgggaaatttgttttttgttgttgttcttgttgttttgagacaggatctcactttttgccgaggctggaatacctcagcctccccagtagctgggaccacaggttcacaccaccatgcctggctaatttttgtatttttttgtagagatggtgtttcaccatgtttcccaggctagtctcaaattccttggctcaagcagtctgcccacccagcctcccaaagtgctgggattacagaatgagccactgcgtctggccacaggaagttttaaaaatagccactttgaggaataaatgagagagaacagactgtgcacatgtacattttctggccaatattgagatctcagtgaagagcccgtgattgtgtagtggtagaaacttgtgtggatgtgggattcctccagtagcatccagaagctgaggcataggaaaggccattggccctgcccatcaagtttttaaatacatcttttttctagggattctttgaactaataccacaggatctcatcaaaatttttgatgaaaatgaactagaggtaagacataacattttatgttgaaacagaaattgtgaacccattattttccttgtttataatttgacatttcttatgtagcttcttatgtgtggactgggagatgttgatgtgaatgactggagggaacatacaaagtataaaaatggctacagtgcaaatcatcaggttatacagtggttttggaaggtaatttgaaacttctattttcataacttactttttgatagattgaatcatatttaagtcaactcttgattaactatactggtggattacatttaactgatacagaaaaatatacagaccagaaaaaattatctttgattttatactgtatacatgcaccttctgggtctgtarctattactaggtaagtaaaatgttcagaaggtagtaagtggaatgacaggctgagacaggcacttagttttctactaaagtagggactgaaagaacttgtaataacctgcagggtattcctagggactcctgggtggctcttttaaaatttctcatagagaaatatgtatgccattcaatcatattaatataatgtgttttttgagatggagtctcgctctgtctcccaggctggagtgcaatggtgccatctcagctcactgccacctccacctcccatgttcaagcaattctcttgcctcagcttccygagtagctgggattacaagcatgcaccaccatgcctagttatttttttttgtatttttagtagagacggggtttcaccttgttggccaggctggtctcaaactcctgacctcaagtgatccacccacctcagcctcccagagtgctgggattataggcatgagccactgcacccagcatataatttttaaaagtcatgagtcacatctcaagagaaattttgttacttcactaggttataatcccattctaaaaagttgacatgtagccttagaaataaagttttcaagaactttataaaccatctataaacaaaaatttaactgaaagaaacatccacatctagtaagggattattaatattctaaattccgatagcttatgtttcaggataatttgtttacctctttcccagtgctgttccctraatgatgtttttatcttattcaggctgttttaatgatggattcagaaaaaagaataagattacttcagtttgtcactggcacatctcgggtgcctatgaatggatttgctgaactatacggtaaggattttccatagatcattwaaaaaatggaataatgcrtattgtctttttcatggctgacgaatcckcaagcttccatcatttactaacacttagcttaattttaaaaagaattaagattttgaaagtgataccattagggacactggagtaggctaaaatatatttacaccttctaatcagataataaaggggaaaactggaaacatcaaatgacttgagtcactttccgttctttaacttcaaattctatgcccagtatgcatccgttacagaaaaagcattaccttggccgggaggggtggctcacacctgtaatcctgcacttcaggaggccgaggcaggcagatcacttgaggtcaggagttcaagatgagcctagccaacacagtgaaaccccgtctctacccaaaaatacaaatattagctgggcttggtggtgcacacctgtagtcccagctacttgggaggctgaggcaggagaattgcttgaacccaggaggcggacgttgcagtgagccaagatcgcaccactgtagttcagcctgggtgacagactgagaccctgtctcaaaaaaaagaaaaagcattacttctaatgtgatagttcaggatagcatttgaagtttcacagaatgttactaagtgtatttttaaaaaaataaaaacagagtcatggttgaatacctttaaggaaatgctggactaaacaaagttaaatggatttcttcaggacttctgtagaacctttactgttagaagaaaacaaaagcattgtttcccaaacttatttgatcatgaaatcttttttttttttttttttcaagataggggtggagaatctcattaggctactatttttcatttcttgtgggaggcagcaggactgggaagactacatatctcttgattttcagaatagttaatgcagttttcggtaaagtaagattctatgtattctatcaaattattttccagttgatgtataaaactggaagtgtgttttgtttaaaagtgccatttctgatgtagattacagcaacttttctcataytgattcatattctgtttattggaatgatatttacttgcttttaaggaaaccaagaatccaagaataaatcttttacaaaggatgtacctaaagtaggaggcctactcagaacaatgagtaagattaggattgacctggggactacaagtcgggactgctgcctaggaaattgctaagctgaattttttgtgcaaatagaagctgaccatatgatgggatagctaaacctttcttctccatggcaaatctggtcagcttgccaagcctcattaatatgagtttgcagaactgatcaagcagctgctacctctctacctagagtaaccactcaaagtggttagctttgccagtaaccaattcagtcattctttgcctaattggacttgatagcctctttctttttcatggtttcacctgactccccttcctccatcttctctactttaacaagttagtagcgaaaaatgaaggcagggcaaacaaatgcccctttccgtctctggcctctcttctctcttctatgtaacccagccccatagccatccactgatttcatgcactgtttgaaatttggggcaaatatcccacacatagagccagagttgtttgtgttagaatacaaagtcaaattcttagaatacaaagtcaaattcttatgtatttataggaagaagttatttcaaaatgttaaaattacaatattagatagccaataaaaagtatgttaaggcggctgggtgcggtagctcatgcctgtaatctcaacattttgggagactgaggcaggcagatcacctgaggtcaggggtttgagaccagcctggccaacatggtgaaaccccatgtctagtaaaaatacaaaaattagctgggtgtggtggcacactcctggaatctcagcttcttgggagggctgaggcatgagaatcatttgaacccaggagccagaggttgcattgagccgagatcatgccattttacttcagcctgggtgacagagtgaatggcttgtggccaggagttcaagaccagcctgggcaacatagtgagacccccatctctacaaaatgaatttttttaacagttagccaggcgtggtggtgcacacctgtagtcctggctactcaggagactaaagcaagaggatcacttgagcccaggagcttgaggctacagtgagcttgaatcgtaccactgcactccagtctgggtgacagagggataccccatctctaaaatataaataaataaaccagattagttccctgtgtgtgtgtaggaactagtgtacactagaaaaagttttgatatgcctggagatccttgtagagagtaaatgaaaccaaataaattcttccttataggttcaaatggaccacagtcatttacagttgaacagtggggtactcctgaaaagctgccaagagctcatacctggtaagcagttgtttggaccttgatagaacaaagcctcagagagtgagrttcctctgttagtctagccacagcagggctagtctcctctgtgttatgtcggtggcaggtatggattatgggtaagaaggagttggtgacacccaacgaacaggtgttttgttaccaagttggcccaagcttgaagtccaggtagctgaagatcagagagacccacctaaactgagtgatgagtgatgggctgtcccaagacrggctagaacattccatcttggaggctgaagtggcagagaactcagacatttggaagatgtggtgggggcagcactccacaaggagttgtgcagagtatccatgcccagaacccmgtcctacgtcttacttctacccctggtgaaaagacatattttggtggtgttggaacattctcatcaagaatagcagcattgctctgtttgctgtggtggtacttgctttgtcagtgtctttcataaccacttcctctctgttctttcagttttaatcgcctggacttgccaccttatgaatcatttgaagaattatgggataaacttcagatggcaattgaaaacacccagggctttgatggagttgattagattacaaataacaatctgtagtgtttttactgccatagttttataaccaaaatcttgacttaaaattttccggggaactactaaaatgtggccactgagtcttcccagatcttgaagaaaatcatataaaaagcatttgaagaaatagtacgacaacttatttttaatcacttttaaataatgtgttgcatttacacagttgtttcatkctgtctttagagttaggtgcctgcctaaagccaggcaccaccacacctggctttagagttcacacaataggatataagtcctgtatgacttaaatagtgaattttgtccttaacatttacctcttgtatagtatctgccaggcagttttttcttaaactactgagatgataactgtgaaatatttgtgatacgtgtcatgtgtgaaaagtttgatgcattttgagatggaaaactgaaatttggaaaaagaaatactttactattgagtaaactacaatatatttagtgctactcgcagctatttattattttgtagacctgccttatgcaccttactgcctagatttttgggaaaaaactttggaaagtgtgttacctatatttctagccaactaactcacagaaaaactgtttacttcttcactttcgaagtatttggcttttgttaatatgcagttttactaaacagatggttcataagacatgtgaagcaaattcatatttgcaatgggtaaaaagtattaaagcctktctcttgcctgcatatcctattgaccattggtatagtcatcactttttcatattttagtgtagttagaagaattccttcttcaaacattaaagatccacaaagcagtatttctaaatatgccttgaagaactaaatgaagtgtatagcacttgcctttactagatattctttacacttgtacaattatgtagtaaatgtatgtttacagggtttatcatgtttacagattaagctaatttctgtagtcgcatttttatatttttagtatcactctagtaaaaaaaccaaataakttgtttaaaataaccaaagagttgttataatgcataatttgtattaaatttattactatttcttatgccttttaaaatactgtttactatgaagacaatgtttttaattacaaatccagaattctgtaggcaaaatgctacagttcatatcttcctttaaccaaactgaagtacataaagaccatgtacatgtattcatcaaacgtttattgaatgctgcgtgcctagcgctgtgctatgctctggggtaagagttgtcagcttcagagaagctgagtcctgatcctcaaggaacttgcaaatgtgtctatgaatttgtaaaacaatcaaaagtaggcrtaagcagaataaggcaaaagggaaagtgttctaggttccagcacacctgcaaagataaagtgtgccaagactgtatttatatttcatacttatattgtttcatccttatattggaatgattatatagaaaatgctcttaaaaagattaaacctatttctcagtatggtatcttggtgatttaggaataattgtaaatatatgttacgaatcttcttaaatatatatatatacacaccctgtgagaactgtaaaaagtacctctggttcttggtttaagtttgttggggtataacatgatgagtactcattagcacctgatagaaatctgaaatgtgacagtagcaaaaccactttctactttccaaacaccacagcatcagcatggtttaggggaagcaattcacagattaatgtaccctgcgttttgtcttcaccattgtcaaccagcagtcaaggatgagcaccaggtatagtcctggtttgatatctcaccagccatgtgaactgaagcagcttacttaacctctctggattcatatttcttcatctgtcaaatgagagtaatcatgcccaccctcattgtcatgccagattgtcagaagttccagacagatgagaaagcaaaaagtactttgtaaagtgttatacaatcagaaggtgctttgtgctgaccgtcagattgtgtcaagtcaggtgtgcaaattgaccacactcccaaagaatcatttaaaagtaaagtgacttctaagagacaaggaagtaggaacatttctgatattaaatatataaataatatggatacacatgtgtatatctgtatatggatcttaccatcataattcattttcttcatatcagcaaagtaatagtaatgtgggccaatgcattttggaaatgtcctcattatgtagaatggaatgtgaaaattatttttgttaaaacaggattttgccacaattatttaaatattatgtttgtgaactatctaagcatgagaaaatacaaagctttctttgtatctggctgatactcatttggatgattctgtgactcatagaacatgatgttaaatgagaccagactcaactgccaccagtccccagctgcagaccttcatccccttcatctcccactaggggctcrtggtctggaagaaacatgtatcaagcaacacagccccttatcccagatagaaaagtgtctcaaatgcattctactgcgggacagtcagtaggatcattttcataaagcaaggacatcatatgtttctagaaattacaagcatataactttagcctacaatctcttattaaaaatttttaacaaaattgtattacaaatgcatttcatcagaactcaaatttaaatggtgtttgttttgggtttttatttataatgctgaagttattccatataagtatcaagttaaacacaattcattttgattataaactatttgactttttaaaatcttctgacmcagtaaatatatatatcaagattgatgtatcaaaatttattgcacmctttaaagtgtaaaatcattttttaaaatcttgaatccacaaataaagttctattctgattttaaaaaacaaaacaaaactgtggttcattataaaataggagtgtttccaagtcagtatgctgggtgatgtcttctggtctagttcctcacagcagcacgttaaattttcagtgcaatcctaaacttattacctgatgaactaacatgattataaactctcaaccacagataattaatttccactttacaaaaaggtcgtattgcataagtctggttgttagtgaaatagccagaagataaaaataatagctaaaaatggactggatttcaggcaccttgctgctcatcaaagaagccattcttgtagccaaccactatttacaacatcatttctatgagaaaaagagttcggagtgttaattcagaacgaagtgtcttttcctccttcctctcaggcatgagaattagtttcccagttagaagggaatccactcccacccactcaagccagcctgggaaggtgctgttccagccccctgtttctgccataatccaggccatagcttttaattttggggacctaggccatggccctctgcttccacgtttcctgttctagccaactcgggcagcagctagcccacagcatgccccacctgtacaagaagtccttgctttgctgtccatcacggcagacatttattttataaatgatattaaactaaggtataagaatgtcaggacctcattatgaagaaagagacttagtagatttttgtctttttccttgaaagttaaagcctatcactacactagcctcctctttctgttccgctcatctcttcccctgcaatgcatcctatgcagtccctccatcacaatcagtgtttcctttttagcacacagatttgatcaggttactgtaccgccaaaaaacctgagagctccccagagccaaaagcatgaagcacaaacccgttagcatggaggttcgcatggaatgcagtccatcctcagcctaaggtctcaattccaccttccatcatacctcactcaggtgcccttggttcccctccaaatcagagtccttccagcccctaatcactgcagactccggtgccacctgaatgctttcacttctcatgtctacttggtaagtcactccactttctggacacagtggaacggtgctgtggcctcagcagttggtatatactagtgcggatgacactgcattacaattctttgtttacataattctgtcctacagacttctgggcagtttgaggacaaagacaattatgtatccatctttttcatatgttcatttcccaatgcaaatatttgacgaatttgagcttaaaagtactgtttgtgtatagaatccatttaggagcatggtgtgcctggaactgcaataatgtgcaggagctctgtagttaggtggacattggggactacgtaaatattcaagcagagagggagcttgattgagatcctgctgagtgctggattctgcagtaaacactttatgtggatctcatttaatcttcataaaaactcagtgagacaggttttataggctcaaggacaagtaatacacctaaggccacacagcttgtaaactcagtggatttatgaaccacaacaaagaaaagctatggaatccaacaaattaccaagatgtatccgttttcttgggctgcacaacaaattgccataaacttagcagctaaaaacaatacccatttattatctcagatttctgtaggtcacaagtgtacatggtcttagcttagggttctctgctcagggtctcacaaagccaaaatcatggtgtctgggctcttgcctgcatccaagatctttccgattattggcagaatccagttcccagtagctgcaggtctgaagtccttgttttcttgctggatggcagctggggggcactcttaactttcagatgtcacccacattcctcatggattggccctctctccctcttcaagccaacaatgcctctcatgcttctaatctctgatttcccattcggctgcccttttctgccaccagacggagaaagttctctgtgttccaagatttatttgaatagatcaggcccacctgaatagtcttcctttttggaaattgactgtactggccaggtgcagtgactcacgcctgtaatcccaatactttgggaggccaaagcaggcagatcacctgaggtcaggagtttgagaccagcctgaccaacatggcgaaaccctgtctctactaaaaatacaaaaattagccaggcgtggtggcgcrtgcctgtaatcccagctacttgggaggctgaggcaggagaatcacttgaacccgggaggcggaagttgcaatgagccaagatcgtgccactgcactccagcctgggtgaccagagcgaaactccaactcaaaaaaaaaaaaaaacacgaaaaaaccatctcagagaaaaaaagaaaattgtaccataggcgcagaacacagtcatgggaccaagatcttatcacgttcataaacagcatagattaggaggatgagatatttcctagatcattactagaaaatcctgccttccacacaacataaaggctaaggatagaaaagttaaagattatggaggttcaccttgaaaaacacttatgtatatctaattttataatgtgcgttcatttttccactctttgtcaatgaaaggccagctaaataaactaatgctaacaacagccggtaagattccacttcagcagctataaattcacaagtcactactctcagatgagccatcaattcatatttttctcaataccagaaggttgcattggcctgaaattatattcaactcatccttacaatcttgcttcttatacaagcagaaatgaaaagccataattgctccttttattgggaaggttggtgtctttccagtgaaatcatggtcaggattataaggtgggtccaaatcagactacagccatgatgggaagaaagcagttcacagcccagagctgctgaacattctctgcagatgtgtttagaactgctttaaatctctggagagatgtgcaagggagggcctccaaacgcccaagtaaatgaaagttcctgtgcaatcacatgaccctggaacaaagttttttctcctggtgaaattaaccaaagattaaagccataactataggctcatgagttatactctattcattatttaggtcctgacttaagttctcttctgaaaaataatcaattattataaaggcaaacatcatgccttcttaaaagttgtttttctgtaacaagaatattttataaatgagaaattcaagcatattttctcaaactaataggaggtaatgagcacagtgaactaagataatctcagtttaaacaaacaggattttcactgatgttggacttgaaaacactatccagattaatgactttgttaatacccagtcactgggcataagtccaagtgtagcataaatattcttccagacttgatgacagtgaaatattctatgtttagccctccgaagggataactaagttctcagtgattgatggatggcagccaaataggttcgcttttttagtattgctgtttgttggaatggggtcatgcttgtgaatagatggtgatggtgtgtggttttatgaggaattgtgcaatgttttatccctgtctgccccttcaaaagaagtgtacgaagagaaaaaagaaagctctattaactcagccactactaggactctggaatatctgtggttcccccaggggctcaatttatgtacttgccctatctccatctggggacattgtgaaatggaatttgggatttattgtcaagacctctaattactaatataggcattgacaaggtaggggaagggagttacactcagcacgtactgcaagcctttggaaggcacattaagacacagttgagcctacaatatcttaggattagtccagcactatttaatagtcatataaagcaggcaacatgtgtagttttaaattttctagtagccatgttttaaaatataaaaagaaaattaattgtagtaatctattttatttaactcagtatatccaaaacatcatttcagaacaggcacagtggctcacacctgtaatcccaacagtgtgggaggctaaggcgggtggatcacctgaggttaggagttcaagaccagcctggccaaatgatgaaatcccatctctactaaaaatataaaaaattagccaagtgtggtggcgggcacctgtaatcccagctactcaggaggctgaggcaggagaatcacttgaacccaggaggccgaggttgcagtgagccgagattgccccattgcactccagcctgggcaacaagagcaaaactccgtctaaaaaaaaatcatttcaacatgtgataaacataaaattattaatgagatattttccatttttggtactaagtctttgaaacccagtatgtaccttatgcttacagcacatcttaattcagactggccacatttcaaatagccacacatggctggtgctgccatactggacagtgctggaatccatgggcctaacgacaaacttccacacaacataaaggaattgagaggcagctacaagtggctcacctagcgatgttgctaaattatttttcttcctccagggaaccccagagactaggaagaagttcttccaggaaagccaaatgttgaaattcaaacaacattctaatctagacagtcacgttttgaaatttaaaatttacacttagaaattatttcatccattgtggaagacagtgtggtgattcctcagagacctagaagcagaaataccatttgacccagcaatcccattattggatatataccaaaaggaatataaatcattctgttataaagatacattccagcgtatgttcattgcaacactattcacaataacaaagacatggaatcaacccaaatgcccatcagtgatagactggataagaaaaatgtggtatgtatacaccatggaatactatgcagccataaaaaggaactagatcatgtcctttgcaatggatggagctggaagccattatcctcagcaaactaatgaggaacagaaaaccaaacaccacatgttctcacctataagtggaagctaaatgatgagaacccacagacacatggaggggaaaacacatatgggtcctgtcagtgggggcggggggtagggagagcatcaagaacagctaatggatgctgggcttaatacctagatgatgggttgatctgtgtaacaaaccaccatggcacacgtttacctatgtaacaaacctgcacttcctgcacatgtaccatggaacttaaaagctgaagcaaaaaaacaagaaaatatacaaatagccaacaaacatacaaagcaatgctcggacttattttatgttgaagactggaagtacttttgcatgtcttctgttctccaaaagtttgtgcagtactctggcatgtatttaattgttaacttttttgaaaaaatctatgccttcttttgaaaccacctttttttttttttttttttgagatggagtctcactctgtcgtccaggctggagtgcagtggcgcgatcttagctcactgcaacctctgccccccgccccaccaggttcaagtgattcttgtgtctcagcctcccgagtagctgggattacaggtacccgccaccacgcccgctaatttttgtatttttagtagagacagggtttcaccacgtttgccaagcaggtctcaaactcctgacctcaagttatccacccaactcaatctcccaaagtgttgggattatagccgtgagccaccgcacccagctgaaaccacctcatttaaagcatctgttttcttacagtttctttcacctctttaaattttaaaatcacttattctgttttattttaaatagaacatgtacaaattgtagaatgtttagaaaatacatgtgcaccgccagattaaaatgcctacaccaaaaataaaaaaatataatttcca

SEQ ID NO: 95929 - DNA, 34184 bp, Homo sapiens
  misc_feature (1)...(34184): n = A,T,C or G
tccattcccagggtggctcagacctcctggtgtggggcttggggaacaggggcatccatcctgaggcaacttcacggggcctttagtctctgaagaactgaagttttcacagtctgaaaacaggttttggggaaagaaaaccacagtattttgaagatgtctcaattcatattgccattctcttgggaaaagttacacattgaatcaacctcagtgattaattcccaatcgtaaattcatttgtcaggttggccagctgagcccacaggaaagcagccatccacagtgtcaagttaatagaagatggagaggactagctatttcagattttctcacacttcagtgggcattaggatcacctggggagcatgtcaaatctcagattcccagaggccaccacacccctaattctgcagacctcgactaagatcaagaaaattttattttaacatgtttttcaggtaaggttcccaggctggtggtgagagctacactttgaaaaacactggtaaaaacattgtagacccagttataggaaatatccagaacaggtaaatctgtagagacagaacacagatcaatgggtaccagggctgggaaaaagggaaatgggaagtgaattaatgggaacagagtttccttttggggagatgaaaaagttatggaactagagagaaccgatggatgtgtgctgtgaatgtacttaatgactctcattgtatactttaaaatggttaaaacagtacattttatgtaatgtctattttactgcaagttttaaaataaacaaataaataaaaacactgcacacatttaaaacctctgctgccatcatcaccagtgagctgaccaagtctatgtttgatttgctttgtgtttctgcgtggtcttagctttgtggctggttaccccttgtgggtaaatgtgtaagtcagcttaggagtttgaatctttacccctgtgttgtttggctcttgtgtcttcatcttactttctatggcccccaggtaagaagatggagaataatgtatccatttgctgcttttagtttactgcaatatgtggtcatttagatggcacataatatcaccagtgcggtcccactttacacaaaaaataagtagggtcagactgtattggtagagtgaaattaatatggttaatttgattaaaatgagacctttaagtaatagaaccctcacataatttatcatgagaagaggagtgagtttgaaaactttttgtggcacatgtgtgctgggtttcttattagcaatgtagttacagtcattggccactgtagagattagtcacttttattttacaataatcaagcagttcaaatctgctcaccttttctgtgataagtggctatcaacagtatgctaacagatttttaaacttattttggaatcattttagatttatagaaaagtcgtgcagagagtccagagtcccacatacctttttcccagcttccctaacatgagcatcttacacatccacagcatgtctgtcaaaaccaagaaagtaacattggtgcaatatattaactgcaggctttattcagctttcactcgtttttctaatatgtcctttttctatcccaggatccaatccaggacaccgcattgcttttagttctcacacttccttagtctcttccagtctagcgttttctcagccttgcttttcttgactttgacatacttgaggagcagtggtcaggtattttgtggatgtccatcctttggggttttatttatgttttctcatgatttgagtggggttatggatttcggggaaagaaaaccacagaggtgaggtgcccttcttgtcatgtcctatcagggggacctaacatgactcatccctgatgaggttaacctggatcacttggctaagatagagtccgctgggtttcctcaccagaaagtcgccattttcccctttctgcattctatctgtgggaagcaagtcagtcagtcgagcccctactcaaagggaggagaattaagctccatttcctggagggggattttctacatagattacttagaattcttctgagagacagacttgtttcttgtcctcagatatttatttattcaatcatttatttatatcagtatgtcctcatatatatttattttattctgtgtgttagaatccagtactatcgttgtttattttgttgtgcgattgtctcagtttaggccatcggggggttttctcagtttggttcctgtgtctcttcgacatgtgcctcccccaccctcagcatttccttattctttggcaccaacaagataccccaagctcattttgcattttccctgactcagttctgcaatcagcttcttttctaaggagtcctggtttcttttactggagaataaaatggtattagaagcaagtctgtgtattgagaatgcccatagctactggagtgccactgtttctaggtagatggacagatttatattaatgtctccaactctaatccagtgtcacagagttcaattctagtctttctcttttgcttgtttttaacttctctctctgacagtgtgaaatctggctcccatcatctgcaatgtttttcttcatttgcttaatgctagtttacatgtagtttcagaattgctaactcttaccccagggagaagggaattcaccaactgaagtacagtgtttatgtacagattgttttgtctttagactttagatattcagtcaaaacactgttttctaaagttacctggatccgcatctcttttcccacgccttcagtgaggttatgttatacgtttgtaatacagttaggtctttttctcacagactaaattctatcctggtattccccaacatcctggatgatttttttaaagtttgcatacaatgaagttccccctttgtggtgtacgggtctacagattttgacaaattcatgaagccatgtttctactaccccagtatcatagagaacagttccaatgacctaaaataaaatagaatgtgtgtggttcctttgtagtcaatttctcctctaacccttgacaatcactgaactgttttccatccctataaattttgccttttccataatgtcgtatatatggaattatatataatacgtatatataatagtaatcttttgggtctgccttcttttatttagcaaaatgcatttaagattcatcctcattgttgygggaatcaaatagctcattcctttcattgctgagtagtattccattgtatggatagatcatagtttttgaatatatttgcctgctgaaggtcatctttgttgcttccagttttcattgattatgaataaagctgctataaacatgggttagcttgtttttgtgtgaatgtaagttttttattcacttgaataaatacataggagtataattgtcggtttatgtgataagtccatgtttaattttatgagaaactgactaactgttttccaaagtgactgtaccatttgtatttccaccagtgataaattggagttcttacagttctgtgtcttcatcatttggtttcatctaattgattttagcaattctaattagtgagaagtgatatctaattgtggttttatttactctttcctggtgacaatgatattgatcatcttttcatatgcttgtcatttgtatatcttctttgaaatgtctgcttaaatcatttgccctttttttaattgggttatatgcttgcttatagttgaattctaagagtcctttatatattctgaatacaaggctttcatctcatcagacattgatttgtaaatatttcttccaatctgtagctaatcttttcattcccttaacagtgtctttcaaagagcaaaagttttaaattttgatcaaatccaactaatcagtttttttttcttcctttcatggattgtgcttttgatgttatatctaaaatttcattgccaaacccaaggtcctgcagattttttatatttaacttaaagaatttcatcgtttcacactttttacatttaggcttttgatccatcttgaattaatttttgtatgagatataaggtatgtattcttcaatatgccttatgccttgttttatttttgttgttttcgttgttttgcacatagacagtcttattttagtaccatgtgttaaatggaacatcatctttccattgaatttaatttgcatctttataaaaagctacttgactacatatgtgtaacactatttctaggctctctattttgttacactgtcctatgtgtctgtttccacaaatatcatcctgtcttgattactacagctttatattaagttctaaaatcaagcaatatgagtccttcaattttattattcttctgaatagttttgcctactctagtccctttgccttttcatatcagttttaggaccctcttattgatattttctaaacaatttttctgggagtttaaatgggattccactaaatctatgtattaaatcttaataatattgactcttcaaattcatgaatatggtgtgtctttttcatttactcaggtcttctttaattttccatctgtcttatagttgtcagtatatatatcctgcacatattttgttaggtttaaatttaagtacttcatttgcatttgtgtactattgtaaatggatttttttttatttcaaactcttattttctattcctagtatataagattgtaaatggcttttgtatatttacgtcatatctgaaaacttgctaagcaagcatttttgaaaaagaaaaagacaatccgtctctattttctcactggtaagatccctatttcaaagcattttgaaaaagatgtttgagggaaaaacctatacattttctcatattatagactgttcacaagaagtccactaatggcttctaaagataaaaaagaccctcaagcagcttgaaataacgaaagttgaaattgaaactctgctgaaaaattatgtttcatctctaatattgagaaatattgaaacatttgataacacagtgtgctatcttcctgatacaagcccatgtgaaaggcaatttggcaaatatctagcaaaattacaaaattataccctttgatccagcaagatattcttgtaaagttacaaatgacatatgtacaaaattactggttgtaatatgtttacaatagaagaataaaataagtgtgcatcaatatgaaattggctaagtatgctatgttgtatctgtataatgcaatactatatgaacttcaaaatagatttcaacaaaacctttgcattattggcagatggaatttaagaaaatataacgattagttaggtgcagccaacaataaacttctacttagatctacatattctaatgagaattcatttcaaatgtgtcactaaatctgaacattgaaataaatagaccttgaaaacagccctttagttattgattcacaaagtgttaagccaaatttttcaaaaataataaaatcatgttattacaaaaatattttattaataataatttgactatagcaaatgtgctgttaataaatttttaatgttaatttcacctctatgtcattaattttcaaattttagttttatgtatgttgataatttatgtagcatattagtactgaggtacagaagtatgatttataactcaatgtacatctaaagaggatacatgcttaactttctttattaatggaatttgtgataaagtttgcagactgttgcctcagagaagagctctcacttggacaggaggccctggccaagttgtgtaatgaggagggttgttgaggggaaaagacaaaaaacaagaggtattaagccccagaagacagttatcacctgcctcagaacacaagcatgcaggatgatatagcttttagtgccaagaagtagaattctagcatctctaggtggtgagaaacaaaggattaagaatttttctttctctaacactctaaagaaatgttcttgagctaggaaaggattactcgcgcctcgttagaatcagacatggcttcaggggatgcaggacgctcccctgagctgcctgtcaccgactargtggagcagtgtttcttccgcagactcaactgagaagtcagcctctggggcaggcaccaggaatctgccttttcagtaagacctaaattactcttatgaagccaactgtctctgagaaccagcaatggcaggttcttgaaggatgtagaacatgatgcttggggttatcattgctgcgggttttctttggacttgtttgagatcagtaaaattctaaggcaggggatggaaaccaactctatttgtaagctctgtatctttttttcttttttcttttcttttyttttttttttttagacagggtctctcactctgctgcccaggctggagtgcagtgtcacaatcatggctcactatggcctcaaactcccagcctcaagtgatcctcccacctcagcctccccagtagctgggaccacaggcacacaccaccatgcctggctaatttttgtatattttgtagaggcagggtctacctttgctgcccaggctagtctcaaactcctggcttcaagcaatctgctcacctcagcctcccaaagtgcttggattacaggtatcacccaccatgcctggccttagctctgcatcttaaacctcgtttgtctgtccctcacagcttaacacagtgctgtacacmrcggactggcatgctctctctgaaaagggccagataataatatgttaggctttgtggtctatacggcctyaaacacaattactsaactctgccactgtagttggaaatcagccaccaatgatatattaccaaatgggtgtagctatgtttcaataaaactttacatacaaaagcgggcctggtttgcccacgcttgctattcaygtttgtaatgtacatgcccctcatgcaatgcagttccttaccttattgcttagtcaccttaaagccctgcttgttactyggtgcggtggccttgctgatgactacttatccctgttttgggcctagcctttcaatgcaggaatccagccccagggagagaaactaatgactggagaagtttctaggcaagtgcasaaaatgacacsggatgaacatatgtaagaacatcaagttcaggatcccgagtagttgtcagaaatttcacttcaccccatcccagcaaggctgttgtatttrgggaagacattatttcaagaggggaagagattgtggaaaatcagtaggcagcaggagacagctctcttgatcctactcccatttcagatgattccgcaggggtctctttattgcccctctgctcccccagrtgctttcctcctttcrtgaggcwtcgtcttcyatccctcttgctccccagtcaggygccagacttttaggaggcccccyggagcactggtggtgaagcttagcaaagcaatgcatttgcaatctaagataaaacactcatrttttgggctgggcatggtggctcacacctgttatcccagcactttgggaggccgaggtgggcagatcacaaggtcaggagtttgaaatgagcctgaccaacarygtgaaacctcatctatactagaaacacaaaaattagccaggtgtggtggtgggcgcctgtaatcccagctactcaggaggctgaggcaggagaatcgcttgaacctgggaggcagagtttggagtgagcccagatggcgccactgcactccagcctggacaacagagtgagattccatctcaaaaaataaataaataaataaaagcactgatactttggaagcaaagctcccacatttggaactgaatcaagaaaagaaaatgaaagagtaggtgcttaatcttcactcttcgataaacccccaaacaataacccttaaagttttccatacaggcccacgtgtctttcatctgtggctgaaatgggctgtctgtttctacacatccagttgayccttgaacaaatgtaggggtcacgggcaccgacgcctgctcagttgaaaatctgcatgtaacttytgactccccagaaacttaacgactccatagcctactgctgactggaakccttactgataacataaatagccaataaacacatattttttatgttctrtgtcttctrtactggattcttacaataaagtaagctagagaaatgaaatgttattcagaaaagaataaggaagagaagatacatttactatttgttaagtggaagtggatcatcataaagggcttcatcctggttgtcttcacactgagcaggctgaggtggaggaggaagaggaggggttggtcttgctgtctcggggtggcagaggcagaagaaaattcacggataaatggacccacgcagttcaaacccatgwtgttcaagggtcagcagtatagggaatgtttcacccctgtattctatttttcattcatagaattaaaatrgaaatcctaaaaatgccccytgtggttttcacctggatgtgtattaaggarggttaatttttttgcttgcttaaccctgagaacacagcattgacttgaaagttactgtatggaaaagcattaaggaaacagcctkcagttgccttccttccctggaccgtagagtggcnggttttccctgatggtggcwctgaatgaccaaagtgacaggcagcatctaggcagggctrtgcacagtcaccaccgctggatttcaaagttcctgaancaagatcrtctgacctgttctcckgctctttggcaggttctgtctccggcaggctttgaggatgaaggctgcgggcattctgaccctcattggctgcctggtcacaggcgccgagtccaaaatctacactcgttgcaaactggcaaaaatattctcgagggctggcctggacaattactggggcttcagccttggaaactgtgagantntttctttcctgctctcnttctgtccttgacctttcccctgagatgttgaaggtcctggccacactccctgctgtgtctycccaactacccctgctctgccctcaccrcacncaggggtggctgctagcctaactgtggctctctgggtctcctctccttcctcccctgcccctcatttccttattcctggagtcctgtccttatgacactagccagggaaggggaaaataatgccacctctgctggcattgtggggagtggggggacctgactgttggtctagattaggctcagcccctgactgggtgtrcagcttcaggtgtgccatcccagccccygatgtgcccctcgtgtgccccctgggygcatgcccgccctgccctgcccaaggtgtattgggaggaagcagtcaggtaacarggatraggaaactygccctyagaccaagcttagagcaaaagatgcacttcctttgctggcgtttctggctttcccycctccagggatctgcatggcatattatgagagcggctacaacaccacagcccagacggtcctggatgacggcagcatcgactatggcatcttccagatcaacagcttcgcgtggtgcagacgcggaaagctgaaggagaacaaccactgccatgtcgcctgctcaggtgaggctctgactttccagtgatgccatcctcaggactaggcgagaaagccgacaatgggatcaccaaccatgtcttgctttaactaaaatttggagttcaggcttgcaaataggtctgttccagattggtaaattatgcaacagtttccaaggtgacactcaggatcctgtggctgayttctccaaagatgacttattccttgtagacagttttatgaagcccccactaaagcaggtggatggacaaacaaccctactgccctttcatgttagagatatttgatgtcttcagtaagaaaaaggaagctgcctgccagctgctttccataagcaattcgctcagaggatgcagtttgtacttcttagtgcagaatgagatgaatacacttkaggtttctttcttttcttttcsctttttcttttctttctttttttttcttttcttttcttttytytttttttttttttttttgagacagggtctcactctgttgcctaggctggaatgcagtgatgtgatcatagctcattgcagtcttgacctccaggccccaagygatcctccctcctctgggtagctagaactataggcacacgcccggctattttgtaatttttttgtagagacagagtctggctayggagtcccgttatggggtcccacctgggctggtcttgaactcctggcctaaggagattctcctgcctcggcctctcagagtgctatagttattggtgtgggccagtatatttagctagccacatgtcttaaacattagaaattaagctagaatttactttcatgtcttctactttagtcattccagaaatacatatgagcacagcattgaggataacaaaatacatcaggcatgaattctgctttaccgaactttcatgtgacatgacaagaaaagagaatatgtgcttacatgaagttaaatcatgtaaggaggagtgcgctgagtgccatgggcttcagaggaaagtgacagtattaagaaaaccatggagccaggcacagtggctcatgcctgtaatcccagcactttgggaggccgaggcaggtagataacctgaggtcaggagttcaagaccagcctgaccaacacggtgaaaccccatctctactaaataatacaaaaattagctgggcacggtggtaggtgcctgtaatcccagctactcgggaggctgaagcgggagaattgcttgaacccgggaggtggaggttgcagtgagccgagattgcaccattctactccagcctgggtgacagagaaagactctgtctcaaaaaaaaaaagaaagaaaaaaagaaaatcatggaaaattctgtaaacacagtgatatttgacccgagacttagaagatagggaagatttgggtagagatagagaaaagttatcccaggccaggggaagagcaaaagcaaagaggtgcctgtgggaaggtgtgaagcatgaacagagagtagggagaggcttgttttttctgtaacaaagtgacatgaagagaatcccaggraaggcaggtggagaggctaacgaccatctgagtgtgaaaaacccaggctaagaggctttcactgatttctgcctgcaagaggaaaccaagagaggtcagttaattaagcattgcttcagcaagatcaatctgcaagcagggtgtgggatagattaaagcagagaccatttaagtgtcaccacagttattgagctaagtgccataaaaagactgaatgatggtcatggttggtgacatggagaagactgatgcaagagatgctgaacaggcagagggcagagctcagtcaaaggcatyttctctgtgctgcctctagagtgtaagtcccttgagggcagagagttctgtttcattcactgatgtatcctcaatgtctagaatggtgcctggccattgcaggagctcaataaatgtttattgaataaatggagagaatgaggaacaagagtgaagtcagagagtcataaaatattctattgcaaattctttcagagcagaaaataaaccgttttaacttctctttgccacatccaggagtcctctccttattgaagggagatacatcccaagacccccagctgatgcctgaaactgcagataatacctaaccctgtatatactatgatttttcctgtacatagataccaatgacaaagtgtaagttataaattaggtacagtaagatgttaacaatcaataataatgggataattataacaatatactgtaataaaaatatgtaagcaccttctctctgactctcaaaatatgttacattgataaaactaaccaaccactgctgagtgtaaatgaaaacttggaaaatgaaactgcagataagggggaactattgtacaagataatcagtatatgggtttgaatgtttgaatgactgaataatatgttaagttacctagtatattgtccctaccctaacattgataaagaatgatcactacctcctgagatagatctcccgattgttggtcagcccttaatttagaacattcctttgttaggccaaaatctgtcttcttctaaccttctatatcaatcctagtttttccttctgggtttattcaaaacaagtttgctttatgttacacataaaaacttattaactgtatgcaaatgatttataagtacctctcatctcyggtttcttatcttctgagctaaaacattcagtatattcactttccataggcatgacttttgaacccttctctgtcccagtcaatcttattagcattccctaagagctcaccaatggagtctttcagttaaatatgaggattaaatgtgtgcatttacctcccatggtgggctgagtccccagcttccaaatgtccactctctaatctctgaaatctctcactctgttaccttacaaggcaaaaggaactttgcagatgtgaggaaggatctgagatcaggtaggggagattatccgggacaatgtgggtggaaccagtctaatctcatgagtctttaaaagcagagaatcttgcccagctgtggtcagagagagctccaatgatagaagaagaaagagagattcaaagtgtgagagggacttcacccatcattgctggctgtgaagatggagtaaggggccatgagtcaaggggtgtgagtggtccctagaagctgggaatggccctcaggtgacaacctgcaagcaacagggatctcagtccaacacccacaaggaactgaactctgccaaaactcaagtgagcaaggaaayggatcttcctgcagagtgtccagaaaggaaaacagacctgtcagcactttgacttcagccctgtgaatcccctggcactcttccagccatcggaactgtaaggaaattttgcagtgttcaagccacaatgtttgtggtaatttggtagggcagcaatagaaacccaatacccctctcctccctcttggtgtcctgccaaattaataccaaagggattcgagaatcaataagataaaaagataaatccacatatacaagataaatggaagaggaaacaataccaaaacatttagaagctggaaagcaggaggcaagtggtgactaacttagtgattaaagacatctgaatcctaaatcagcagagagaaagctgagaagcaaacacagaaccaacaacaacaacaacaacaaaaagctcygaaatcagtagcattagctacttctggaagttagaatgaagacagattacaaacaggaagacacatttaaagttcacttaaggagtagttagaacatccagtcccttcctgaggcattcacctactgactgcccctcactcaccctggcagaatactgggactttttcctctagacragtaaagtagaaaacctctcaactgagacctcaacaatctttgaggttgagagctccagaccacagacatgggagattaagttatagtttctatagttccaaccaccatctccactcagaccccacaatgatggcagccaggccagactctccagatgagaagattttcttctagggatctggccaaattgaaaggaaattactaatgactctgagtgggactccccagtgaacaagactggtcaaacctccctgcagtgagatccacagttgaaaatccctacctctgagcacagggctctgccagcctttagtgcccctctcttaaatagttgcagagagccaaggctcaccagacttcagaggagtagcagtgacatgaaaaaaaatgaagcaaaaaccaaacagataaaactttttgaaagcagagtttatgcaaggaaatgaaacttcaaattcagaaaactaccattaatatcttcagatagataagagaggatgcttggatgaaacaaagcaagatgctttttttgaaaaaaaaaaaaaaagagagaaaaaggaaacattcagataaccaaataaagaacctttggaaattaacaatatgatacagaaatggaaaactcagtaaagtagttagaagataacattgaagaaatctctctaaaagcagagtgaaaaaaagagatgagtgaaaaataggagaaataagaatgataaaataaatggatataaaaatactttttagcaggagagaagagaaacaatagatagcacacaacctttaaaaaacatttccagaactaaagagcatgtgatttcaatttgtaaggttcatcacatgaccggtacagcagtcactccttgtctatggttttgctttccatagtttcagttactcatggtcattgtgtgactcaaaagtattaaatagaaaattccagaaataaacaattcataacttttaaattgcatgccattctgagtagtgtgatgaaatctcgcaccattctgctttgtctcatactggatataaattatttctttgtccagcatatccacattgtatacactatggtcccattagttacttggtagctgtctcagttatctgccttaaaaaacatagtatatgtagaatttggtactattcatcatttcagaaatctactgggagtcttggaatgtatcccccttggataaagtgattattgtacactcacactcaggaacatcctcatacaatttcggaacatgatagaaaaacagaatatacaacaggcttccatttgaaaataaaagttccatacaaaaaatcaagcatcagagtgacatcagacttctcaaccacaacactggaagctagaagaaaatggaaaaagtcttcaaaattcttagggaaaaccatttccactataaaattctgtgctaccaaattatcagtacattttgagcatagaatgagtacactttctgagaaccaagttgttaaattctttacctcctgtatcataaagaatcctggctggaagacagaacaaacacaaactgggtaattggaggagaatattaataaagactctacttacaaaaatctgatcaaatcatagaaaaaacatggcaatagtgaagtaagggattaggaatcacaggcaattaccwcccccttgcccaatgaggaatggaaagagaactatgaccagcaccgaggtacaaggggtctgcagggagaggacaaccttctaggatctgagaccttccttcaagggatgtgacttgtgctgagtgacctgacagaaakaaagctggaagatattatatgtatatsccaacctcagtgtccctcctctgtcccttccctgctgatgcctactcttatttaaaccccttcagaagtcagaggacatgggagaccattgacggcaactgtgtgcgttggcctctgagtgcacagagcatggtggagaagggtagagagtggatccgtcagggcaaagatgacatattcagctcacctcccatgcaccctctctcacaaaaccgtaggaaaacatgcttcacaaaaaggataaactaaaacaataaagaggaagacatggttcaggaaacaagggactcgatgagggagaaaggcaagaggaatgcccagcctgattgtgaaggatgatcccaggatgagcttttattatagatttctagttacacctcattatggtcagagaatatggtctatatcagccgtccccaacctttttggcaccagggaccagtttgcagaagaccaattttccatgaaccagagggaggaggatggtttcaggatgattcaagcgcattacacttattgtccactttatttctattatcattacattgtaatatataagaaataattatacaactcaccataatgtagaatcagtgggagccctgagctgattttcctgcaactggacagtcccatctggggatgatggaagacagcggtagatcatcaggcattaggttctcataaggaccgtgcaacctagatcccttgcatgctcagttcacaatagggttcgcactcctatgagaatctaatgctgccactgatccaacaggaggtgaagctcaggtggtaatgcaaccaatggcaagcttgtggctgtaaatacagatgaagcttagctcacttgcctgccgctcacctcctgctgtgtgacttggttcctaacagacaatggactggtatccgtctgtggttagggggttggggatccctggtctatatggtttcagacctctaatatgtctttaatcttgttttacagcacagcaaatgtgtcttatgatgaatatgcatttgaaaaaaaaaatgtgtattttatatttggtgggtagatgttctataagtgactgttatttcctttctgattttcttactgagaacttattagacagatcttactagaactatcatatagtgagagatagatattgaaatttgcaactatcattttagttttgtctatttctcctttcagtcttgtccatttttgaagctttgttattaggcacatattcatcgaggactgttatgtctttgtggtgaattgacccttttgtcactggagtccgtgtttctccttaactctggtactatttctcatccagaaatctaccttatctgatagcaatacagcccactctcactttctttggggaagtctttgcataatatgtttctttccatccttttacttttaacccatctgkgtctttatatttaaagtgaatttcttatagatagcatatagttatgtgttgcttttatatccattctggtaattactgcttttcagtaggagtgattaaaccataggtcagcaaatgtttgcctaaaaggccaaatggtaaatattttaggcttttcaggtcatatggttttgattgcaactactcaaccacgacagagtgtgaacgcagccatagaaagtatgtaaatgaatgggactggctgtgttccaataaggctttatttacagamacaggaggttttcctgtgggacatacatygtggaaccttgattagatcatttacatttaatgtgattattgatatggttagttttaaatcccatcttgctattctgttttctgtttatgccatctattcttggttccattttttctgctttctttggaattaaaaaaaaaattattattctctttcatttcctccattggtttgttagctatatctctattttgtttttagtagttactctagggtttccaataggcatcattatcgtattacattctaccctcaaataacacaccacttcatatataacatatgagtttcttaacagtattctttaatttctcccatttcatcctttgtgccatgttgtcacgcatttttcttttatatttatatacctcacaatccatttttattatctttgctttaaacaattgtcttttaaataaatttttaaatgagaaaaaagttctataatatttattatgtatttactatttccaatactcttcattcctttggtggatttatttggggaagtagtcaatcgatatcactttccttcagctgaaagaactttctttaccttctttttggttttggtttyggtttttttagactagaggtctactggcaagcattttctctgcttttgtttgtctgaaaatatctctattttattttgattttgaggaatattttctttacatataaaattctgggatgacagttgttctcctctcaagttgttgctgttttgagacagggtcttgctctgtcacccaggctggagtgcagtggcatgatcacagttcactgcagcctcaacttcctgggctcaagtaatcctcccaccttagcctcccgagtagctgggaccacaggcacatgccacaatgcctggctggtttttattttattttttgtagggatgggtgatatggttttgctgtgtccccaccgaaatctcatcttgaattgtaactcccataattcccatgtgttgtaggaggaactcggtgggaggtgattgaattatgggggcagttctttccggcactgttctcttgatagtgaatgagtctcacaagatctgatggttttaaaaacaggtgtttccctgcacaagctctctttttgcctgctgccatccatctaagacatgacttgctcctccttgcctactgccatgattgtgaggcctccccagccatgtggaactataagtccattaagcctctttcttttgtaaattggccagtctcaggtatgtctttatcagcagaatgaaaatggactaatatatggggtctcgccatgttgcccaggctgatctcagactcctgggctcaagtgatcctcagcctcccaaagtgctggggttacagctgtgagtaatcatgctcagcttcaaattgttaaagatattccattgccttctgtcttgccttgtgtatgatgggaaaccaatgattttcttatctttgtcccctgtatgtaatatgtcttttttatctagtcatttttaagattttctctctattactcattttcagcaatttgattatgtgtgatatttgtgtttatcttacttggcattcattaacattttgtacccctgagtttataattttcattaaatttgaaaacatttcagtcattctttcttctaatactcttcttttctccttcaaggattctaatggcacatatgttagattgctgctgctgtcacatttatcaccatggctcttcatgtttttagcctttttccctccctgtgttttattttcagtagtttccattgttatgtcttcaagtccactgttacttttttttttaatgctaatctattaagcttattgattggatgtttcttttcagataccgtattttttatttggtgttaggcaaactttcgtatctctcatttcattttattcatgtttttcttgaagtccttgacataagtaagcatgtttataagaagtgatttaaatttcttatctgctgtagaatcaactgtcatttctgggtcttgcccttgactgatctttctcctggtatgtgccacatttccctgcctctgcacaaggaatcattttttattgaatacatacatagtgtgtgtgttgatggctgttgtaagtcctcgagtcttgtcttcttagtttaaaagaatttcaacaagagatacacagcaaaggagatgtagcatagactaatttattgaaaaagaaaaagaatattttgtaagttaggtgcagaatggacagtacaccctgagagaaacttcagggcaggctgctcgtaaggatgagacatcaaaggccggcacgagggatgctccctttaatggagtcttccatgattattcataaacgggtgggaagaggtgttgctagtaagcatgttctgggcggtcctyttcgtgcatttgcgcagtagctgtacatggatgttcatatgtcgcatgtctcattagcatcttaaatctccacccaggtgtgtgttttttattattataatgagcaaagcgtgagtttgaggacaggtaaagtcaaaatgcgcatgttccctacaggggaaattcccttctggagacagctttgtttgaatgagctggccttcagtgtgaatgctgaggctcatcgtgttgactggccagtcaccatagttgccgtaccccgcrgacacagttgcttccttgcctacctatcctgcctcatatgcaacattgttgagtgtctagactatgtgtcttcctttaaagagtgttgaatttcttttccaaccagctaagtttattctgatcagcgtaactcttaaactttgttagtgaagttctggagtagtttttagggtagggctagtttagtcccactaccaaggcataactaagcatccagtgtctcttttgaatgtgctgaggattcagcaaggtctattcccttgggctagtcagaaatcaaatgtcttccagccccgcgaggtctgtaattgccctgttccctggggtagttctctgcctagccctgtggaaatttacctgtgcatacccagtttagccttcagtcaaagactgggtggaatccctttgcagatttctgctgctcttcttctgggtagctcctgcctcccaggtattctccacaaaatctgagctgccttggcgtctgatgtctgtctcctcctcttagatggccatcccctgcctggttctaccttcctggtctgcagagctcctctgggcagaaagtcatggcagtcacagggttcactgtgtttttctctctctcaaagatcatgatcctgcattgccagttgtccatatccgaaaacaatttttcatctattttgtctagtcttctggttgtttacagtgggaagagaaatctgtgactccatcgtggtcatgttggactttaaatgcagattactaatttaacattgttcagtttcattccagttaaggaagcctggggcaaaggtctatctgcaagacaatcttagattctaagaaattaaagtgttggacggttcatggtcagaggtaaaaggacactcatatctgttttcttatcgtgaagagcatgggattttgggggatagccttaaaatagaaaacaagatgttggttttataactaaccaccctccatgaaaggcctcccttagcctcaggccagagagttttttattagaacaatgtcattctgtcccacatattacagaagtagggacatttgtcatgggaaactgaaaaaaagtyagcattagggtgtgtttacaaggtacgtgacgttatatgcatgtacagcatggatacacttcatgatctttttcttctttttgtttttggtagagaagggggtctcgccatgttgcccaagctagtctcaaactcctgggctcaagcgatcctcccatcttgacctcccaaagtgctgggattacaggcgtgagccactgcacctagcccgtgaccattttctgaagctggacagtctcctcactctcattccaaattgtattcctaaaatgccttcctactttccctaaactatttggacagaaaattgatgctatattcatatatacaaagcatacataagcacacacgttcatatacctacacatatacatacacacagtgtacaaaatgcctgatgtgatgacagtatttacccccaacagcacagatttcattaaaataagagcatttgaggaaaaaatgattattgactctctatctagtgtagtctagtgcacttatattaattttatttttcatcaccctggtatctgaattggcctttgtcatctcacrggggaaagagatgaacatcgagggtgtgtggctgctagatttcacttgggaggcaggaggatgccgaggagagacacagatactttgaagtagaactaacataactgaaaataggactgaagctctttttgtgtaaattgttgctgttttctgttggatgtggaagaataaacgattctttgctgttcaacataaccctttctttattcatgtttgacaggacagactgtctatttaaagtaaattgagcagaaacaattactggcaagagtcctcatttaaaaagtgccatctgaactcatttctgcccctctgctgcccttctgtggctatttcttgtaacaacacctcagtgctcagggctgggaggcaggagggagctcttgatttcccagcccctactttccctaacatattttcccaagcaaattcagtcaagtccaactttcaaaacatcccaactgcgcaactaaatgctataacaaagtaggaggagacaaacaactgtactcggtgtccacttcctggtccaatatggccccaccgtcccagaaatccttacagggcatccacaatcaaactgccctgcccctagtacaaaatgtgctctttctgtacatgcctgggatgacctccaatcccagaataatagaatgtgatctgcttcctcctcactatgtattatataatctgtgtccctccaacctctagagaccgccccaaacccacatctcccagaaaatatgctagactacttccaaacacaaaccacagtgtctcagcatttatcaagcacccgaaataaagtgtctctaagtaacttgaacatgtatcaggtaccaaatgcttaaatttggataacctcatagataattacttgaaaaattaataaagtatattttaattattaactttattaacatatagtgttttatgagcaggaatctttgcttaagtgacttctgttggaagaagagatcagaggaaaacagaatttaagccccctatcagaatacaggctcattaactgggtgtgtgaccttggtttatggggataaaatggtacccacagaaatggttgttcagagaactgatggagattttgcgtgaagagatttaacatgtgcctgacatagagtaagatttctataaaacataagctagtagtaatagctattattatctgaaatatttatatgtcaagaagataggcaggagattttataagctgatatagctttagttttcactgtagaattgtaaaccaaatgccagcgaatttgcatatgttgtttcaattgctatctcttactgatgatatattttgtcagtttttctcctggttaatagaattttgttttaaataaaaattaagtcacattcagaataaatttgcttaaaagaaatctgtcactacctttatcttctagtgaagctgaactgagaaagccacaaaattagcaactcagggaaatagcatgctcgagggaaaattccacttccaacagagttaacaaaataatctggtattacaatgttctactgaaatgcaacattttatgctagcattttttacaattatttttttctggtatcaaaaatagtgcatttctactgtaaacaaattttagaaaatacgcagcaaagacttaagagcattggtgatcccacagttaagagccaatccttcttaaagtattagtgaattaatgactgtcttttttttctaaaccagtgctgtctaatagaagtttccgtgatgatgaaaatgtcttccatctgtgctgtcaaacatgagaaccactagccatgagtggctataaagtatctgaaatgtagctagaaaaaataaggaacttggccgggcgcggtggctcacgcctgtaatcccagcactttgggaggccgaggcgggcggatcacgaggtcaggagatcgagaccatcccggctaaaacggtgaaaccccgcctctactaaaaatacaaaaaattagccgggcgtagtggcgggcgcctgtagtcccagctactcgggaggctgaggcaggagaatggcgtgaacccgggaggcggagcttgcagtgagccgagatcccgccactgcactccagcctgggcgacagagcgagactccgtctcaaaaaaaaaaaaaaaaaaaaaaaaaagaaaaaataaggaactaaagttttaattatgtttaatgttgattaattaaaattcatagttttttgaatttttcccagctttagtgaggtataattgacaaatcaaaataatatatatttaaagtaaataacatgataattttatttttgtatacattgtgaaatgattattacaatcaagtttaacaaatccatcacctcacatagttaccgcttatgtatgtgtgtgtgtgtgtgtgtgtgtgtgtgtgtgtgaaagagattgagagagagagagagagagagagagagaagaacacttaagattctggctctgtcacccagcctgaagtgcggtggtgcaatctcagcttactgcaacttctgcctgccagattcaagtaattctcctgcctctgtcttctgagtagctgagactacaggtgcatgccaccacgcctggctaatttttgtatttttagaagagatgggcttcaccatgctggccaggttggtctcaaactcctgacctcaagtgatccacctgcctcggcctcccaaagtgctgggattacagacatgagctactgtgcccggctactctcagcaaatttcaagtgaacagtacagtataattaactatggtcaccatattgtacattagatccccagtccttcctcaccttataactgaaagtttagacccttccatcagcgtctccccattttcctcaccagctactgctctactttctgcttttatgagttcaactttgatagattttgcatatgagtgagatcatgtggtatttgtctttctgggtcttccttccttcacttagcacgatctccttcagttcattcatgctgctgccaatgtcagcatttccttcttttccatgactgaataatattccactctctatataaacatatttttatccattcatcggtcaacaaatataatttaaatgtaaattgtcacatgttgctaatgcctgccatattggcattagccaatacagctctcaatggatatttttatgatattgggaacttaacattgcattgggagcatttcccccatgttataaaacatcctgggaaaacataatttaaatggctgtttattttattaaatgaaggtattatgattaatttgaacatcactgattatraggcaattggatttttttcattttaactcttgtaaataaaactagagtaaaccactttgtaaagaaatatttgtctagcatcatgactgtttccttaggatagatctggagagataaattattaggtgaaaggataaacacctctttaaggctctaaacacatgctgctatgttggtttcctaagacgttgaatccattatacgcccacgagcaagtatccagagaacctgcctctctgtgcccttgtcaacgtcaagcattacccaattctctaaaaawcaaaaacaaaaacaaaacaaaacaaaacaaaacctttgagtaattgacaagcagaaatgagatcaagtggtttgagtatttttgtccttgattggtggttgtggtggtcatggagatgggcctcccagatcccctgctaaggaaagacgtgctgccccygctgcagttgtgtgatgagcagacagtacctgccacctgcttcaggattggcttcaggtgcaggttgttcccttcyggggtgacccacacccagtgacatgtgaggcagaggcatgcggacctggcatgtgggcccgacttgggccactctgatgggcggtgctcactcgggagctcatggctgggctgcccaatgaattgctgggtctgcgtcacaaatggacatctccgtctgcccatcctgcttcctccaccccattcctttcataggtgtggatccctgaggaatatctagcacctcaaacccatcgcagcgtctgttcctggagacccaaattgcaacagaagtgatattggacttttacattttatttgccgttttctgtcatgtttgtgttgagaaggattctgaggctacttttcaggcaagcaggaaagaatgcggatatcaaacaatacatttcaatcaaaagatttgttatgtctgaagcaatagaaaatgtaataagtggccaggcacagtgctggctgtartatcagcactttgggagccaaggcaggaggatcacttgatccccagagttcaagaccagcctggccaacatggtgaaaccttctctctgcaaaaaatacagataataaaaatggccgggcatggtggcccatgcctgtagtcccagctacttgagaggctcaggtgggaggatcacttaagcccaggaggttgagactgcagtgagctataatcatgccactgcattccagcctgggtgacagagtgagatcctgtttcagaaaaaaggaaaagtaataaagatagagatagacgtatttgacttaaaacttaaaactttttgcatatgaaaaacaccctagactgggtgcgatggctcacacctgtaatcccagcactttgggaggccgaggtgggtggatcacttgatgtcaggagtttgagaccagcctggccaacatggtgaaaccccatctctagtaaaaatacaaaaattagcccagcatggtggcacacacctgtaattccagctactggggaggctgcggcaggagaattgcttgaagccaggaggcagaggctgcagtgagccgagactatgccactgcactccagcctgggtgacagaatgagattctgtctcacaaaaacaaaaacaaaaacaaaaacaaaacaaaacaaaaccctggataaaaattttttaaggcacaatatgaaatgacaatagacaaaggtttaatatttacctccaaagagaacttatatgtcaaactaacccacatagagaaaacattgtgctatcctgtcttatgtgccatttttttttcttaagacagggtctcactctgttgcccaggctggagtgcagtggtgtgaacacagctcactgcagcttcaacctcctgggctcaagtgatcctcgcacttcaggctcctgagtagttgggactagaggtgtacaccatcccacctggctaattttttactttttgtagagatgggatcttgctacgttgcccaggctggactcaaactcctggcctcaagggatgctcccacctcagcctcccaaactgctggtattacaggtctgagccaccatgcctggcctgcgcctatttctttaagacataaaaaacattcttgcatggcattttctctaaacacatttccaaaaacccttcaggattgggctcttcctctgaaacatcaggtagtgcaagatgaaaacggtcttaaaacaacaacaaaaagttctttttgaagaagcttaatgaaaatragattgtggctttgcaggcaaaatcatagttcttccaaccctcttgatccaaaaagactgagaaaagtgaagtaaagttgagttgaggtccctctccaacaacaaagtctcgcctaaccctgatgtcttctctcttttacagccttgatcactgatgacctcacagatgcaattatctgtgccaggaaaattgttaaagagacacaaggaatgaactattggtaagagtgttttcttgggagacttgtgctgtcatgggcaaaacctagtgtgtgtatttatcacagttatggtggaattgacaaactcacctccgcagagtggtccaaccaatggaaggagaccttgtctatattctyctccatcagtgtgtgggtgtgcagtgaacatagtagtacatagaaagggagaggagacttgggattgggttaagataatttgcaattgcttttcatatgaacgtattccaaacaatggagaaaggtattttctaaagtgacttggaaagggtcaactgaatcaattcgagagaggaaaaaaaaaaaaagcttgagtttgttctagatttggataagattttgaaggttacagcaacattttgcagggaaagagaatgagcagcagcaagaggaaagtgagcaggtctgtgtcatggcgactcagcagaaagcgtccccagcattgagcctggggccttgcattcgctgctgctgtgttctggtgaacgttgccagccggccccactcagagaacccgaattttcacagatgtgggtgtgacatggaatgacccatccttacaaaagttgattgcttgttgctgaagctaacaatggctaggagaaaaccaggagacaaaagtctgaactaggcaaaaggacagcatccttgaagctcagaagcaaatgaaacccaacccagggttccgctggcgattttggttaatttctgtaggctttgrractaagacggtttggattgtcaygcttctttctgctgctcctgcttccctctcatcctcaggcaaggctggaagaaacattgtgagggcagagacctgtccgagtggaaaaaagrctgtgaggtttcctaaactggaactggacccaggatgctttgcagcaacgccctaggatttgcagtgaatgtccaaatgcctgtgtcatcttgtcccrtttcctcccartattccttctcaaacttggagagggaaaattaagctatacttttaagaaaataaatatttccatttaaatgtcttcaccccgtctcagttccaatgatgtcataatagcatggtgttaagacttgaaaaatcacctccacaatgctctagccttggaaaaaacaaagctcccttcttcattgtagggagtcctggtttctgtggccctgaaactgctgctcattcaaaaataagactccctcatcttcagggccatcctcagaaacaggacacatgcagaagggtgaggttaggaactaggagcacctgaggggccgaatccccttaagagtaccccagaaggaccgtctatgcatgcccacccacaagcctagacaccatttatctatctacacgcacgcaagagacgcagagagatagggcaactgagattcactgtttgatattgaaattctcataaaagttctcagttgcattttttgtattttgtattctgcattttccaagtttttcctgacatattttgctattaaagaaaaacatcaccaggcacggtggctcacgtgtgtaatcccagcactttgggaggccaaagtgggtggatcacttgaagtcagaagtttgtgaccagcctgaccaacatggagaaaccccgtctctactaaaaatacaaaaattagccgggcgtggtggtgcgtgcctgtaatgccagctactcgggaggctgaggtgggaggtggaggttacagtgagccgagatcatgccgctgtactccagcctgggtgacagagcaagactctgtcaagaaagggaaggggaagggggagggaacgttttttttccggagtaaaaaataagacccctggccaggcacagtggctcacgcttgtaatcccaacaatctgggaagccaaggtaggaggactgtttaaggccaggagttcaaggcaagtctgggcaacatagcaagaccctgtctctacagcattttttttgttttgttttagttgcagcttttatgcctaaatcctgctggaaattctaatgggtccaaacagataaaattgtagctcttacccctgacatcaagagagttccccatgttattccacttctgcttaaatcaagcttgtcaaacccatggcctatgagctgcatgtggcccaggatggctttgaatgtggcccaacacaaatttgtaaactttattagagcattatgagattttttttttttgtgatttctctttttagctcatcagctattgttagtgtattttatgtgtggcccaagacaattcttcttccaatatggcccagggaagccaaaagatgggacacccctgatttaaattaaatctatccaattcaaaaagccatgcttacaagctcacaaccccatgacaaagttgttttcaaccttagacgtgcagattttattcgtatggctaggaacttggtgaccctctgatggaagtctggtgacatggcagtgagctgagcatctcagaccccaaagcgatattcccaggatgccttctgctccgcacagggatggcaccccctcctggctcccatggcggggtggttctgtggcacctgctgggttttctcttgcccattatcaatccacatgcctctgttctgctggggcagagctggttggagctgtcttgttctaaatttaggtgaaggtagtaggctcatgttgaatgcaatttgacctggaaaatgccttcaattgatgtttgttggagaattggttatgccaacaagtaagtttcccacttagaagaaagtctccactgatgagactgatggatactgtgacagcgcctaaataacccttcaatatgctcttactgccaactccccaggcctcaactgatggctcctttcctgcccaccggcttgccttgcatgcagaggctttaagaacgcctaaccgctacttgcctaaataaataaataaacatgttatatatttctaaacatacatgtcatcctgggacaatttaacaggcattataaaccctgagggaaaaaaccttttgaaccccatctaagaattgaaaagtaattttataagatagctgaagaaaatttgaaaaatgtagaatccattaagctgcactaaatcaataatctgtgcttacagaaggccataaatatgcatttttcattattattgtcctgttagtcatctgccttgcagccccattcttagccaaatttctgcttcattaaaaccaacggcacctatttatgagctaagttagcatgaacctggcaccagccattcaaagactgggggaaatattttttttaaaccaactccaaaaataagtgttttaaaatttaaggtaaaaagacattggctgtcctaacattagactcatctatctttttgcaaaactcacaagatttctaagcatgcaatcctactcttccccttcccccwtgtttgatttatttctataaagaataatttaggatgaaaagaatacattttcccagataattttccataattaaagccttcagaaattcaagaggacatgaatacttctatgcctgagttatctttatttaacaaaagcatatttcagaaaaacccacactcatattcccctttatagtttctaagacacttggaagtagattttcatttactcctcgtggccacattatctgctggttaccagatacactgagcagaccattgggtattaggggatagtgattggcttatgtgggtacattctttctgtggggactcagctctgcctgattcttgggacacctcccactcccccagcatctggctctttgaatcccaacttgttccctgttgttcctcgatgctttctggtctggtctggtctgtgattttcccttgatgccttttatacccagtatatcatttcccctcaggtgtccttgctcttggtttttcccatacatggaggttgtgccactcccctgcagcctattcaagcctggcccagccaacacaagctcccagctcctctaacccctaaagctcttgcctctgaacacatggctggtgtgtgctgtaggattaggtgactggggattagtgtcctcatccaacctgtaagctctttgaggcctggaccatgtccttcactgctatatttccacaatccctgctgcagtgctaaacacataatagttaacattcaaaaatatttgatgttggccagcactgcaggaggccaagacgggaggatcacttgagaccagcctgggcaacacagtgagaccccatgtctacaaaaagtacaaagattagctgcgtgtggtggtgcacacctgtagttccagctactcaggaggttgaggtgggaggatcgcttgagcccaggagtttgaggcttcagtgaactatgaactagccactgcactccagcctggatgaccgagtgaggccctgtctcttaaaaaaattaattaaaaaatttgatgttggttttttgtaccactggacacatgtggaatcacagaaagtttacaaataagaccttgcatctagaacatttttgttttcaaatcaagttcatgtttattatttcatacgctcctcacaacaatcttgggatataggggaatgaaaacttcactccatatacacgtccctgagatacggaaggggtaactatcgcccaggggccacagcgcaayggcagagaatccaagaggcccctgctgccctgcggggatcttcagaactcagtgacagaacgtgtcctagttcctttacgaacagggagtgcctgagcccttcacctgtgttccacacagccacttccttgagtgtctcaaatatggcacaaaccctaagccagcccctgaaagatctgcaggaacaatttagtctcttcaaggtgaatttaaaaaaataaagccttcatcaagagacccaggaagatttcctctgtgtctccaaaatagaaggaaaatgctctggatgtctaaaactggaactgtcaataaacaggaactactctttccaactagaaatacactatatttttttgatttaaaaaatttaggccgggcgcagtggctcacgcctgtaatcccagcactttggtaggccaaggtgggcggatcacctgaggtcaggagttcgagaccatcctgcccaacatggtgaaaccccatctctactaaaaatacaaaaaaattagacaggcatggtggtgagtgcctgtaatcctagctactctggaggctgaggcatgcaaattgcttgaacactgaggcggaggttgcagggagccgagattgcatcactgcactccagcctgggcagcagattgagactccatctcaaaaataaataaaaataaataaataaataaataaataccataaaaataaaaagtttaagggctcgggtgcagtggctcatgcctgtaatcctaacactttgccgaggtgggaggatcccttgagcccaggagtttgagaccagcatgggcaacagagtgagatcccatctctacaaaaaataaaacagattagccgggtgtggtggcctgtgcctgtggtcccagctacttgggaggctgaggtgggaggatcacttgagccttgaagrtcaaggctgcagtgagctctgaccgtaccaccgcgctccagtctgggcaacagagtgaaacactgtctcaaaaaaaaaaaaaaagtttaaagcatgaaaatgtcttccaacataggccaaatagccccactccagccctgctcagccccccggtgatgcttctccaggttgccaggcttcctctgcagtgcttctgccttgaagggtccgactgcttgaggacagacatcgccatcccccagcgcttgggctgcaagcagttctttacacacagcgatgtcaggggaaggaaattcacacatccagcttgcagaggagtcatggccagggagagcttaggatctggatctgggaggaactgtgggcacagtagaagcttctggaacaaaatggggctccttgagggcaggaaggcagcttcacagcactctgccttgagcaggtaattctttccctcatttttctcccttctctcatctgattccacaagtgcagggaaatagaacaggggacactcagaaactgttccgattcacagattcagcagtcactttggtttaaactgatcctccagtaacaggagaaagagaagaggaagcccaaggtcagaagctaatgaagagagtcttgctggagagcaggagagagaagagaagcaacgaatctttctttataccaggctgcagtttgcacagtttttaccactggggcctcctcactgatgtaacccaaaagaaacgctgtgttttgaatggagacattgttttactcaccttattggttaggctctgttcataacaataatctacattctttgtagaatagatagaaaataatttccaaaactgaaaaaaatccataactgctattaatatattttgatgttttttcttccaggttttttttttctttttctttttccttttcctttttttttttcttttttttttagaggcaatgtcttactctgtcaccaggctaggctagagtgcagtggcgtgatcttggctcactgcagcctcaaactttcaggctcaagtgagcctccctcctcagcctcccacgtagctgggactacaggcgtgagccaccactcgcagctaactttttaatttttttgtaaatacaaggtcttgctatgttgcccaagctgttcttgaagtgctgggctcaagcgatcctcccacctcagccttccaaattgctggggttaaaggtatgagccatcatgtccagcctcttccaggttttttacagatttttaataaagttggaattataggatacctaattttatagctatttttaaattaatacgacacaagattttccccacattaatattttctaacacatgacacataggaacagcataacagttacttacgctgacctgtgattcacttcctctctcccctatggttggatattgaggttgtccagtacca

SEQ ID NO: 95930 - DNA, 32483 bp, Homo sapiens
  misc_feature (1)...(32483): n = A,T,C or G
cctggctggtttctcacttgatattcagtacccccatctccaatacattctgtatgtaattgcagggatgatacatttcaaagcataaacctgatgaagcctggtgcagtggctcacacctaaaatcctagcacttcaagaggctgaggcaggaggattgcttgaacccaggagttcaagaccagtctggcaacatggtgagaccctctttacaaaattaaaaaagtagccaggtgtagtggtgtgcacctgtaggcccagctactcgggaggctgaggtgggaggatcacttaaacccaggcaaaggctgcagtgagccatggttgtgccactgcactccagcctgggggacagagcaagacgctgtctcagagaaaaaatgatgaatttaaaaaatttttatagagatgggggtctcactttcttgcccaggatggtcttaaactcctgggctcacgggatcctcccacctcagcctcccaaagtgctgggattacaggcgtgagccactgcacctgggcgagaaattcggtttttaaaagcttgaaataaaaacaaaacactcagaagacgtgttcattgaattagggctcaagaaacaaaaaaaaatttctatttagagatgttgctttaggtaacagtgaaagccagctggaagtgtctacgcagcggcctttaaagatcaagaatcaaaactggagaacctgtggactcagaaggtaagtcttgcagatgtgcaaggcgtgtccaagggaggaaaggtgaatcaattttttttttttttttttgagacagagtctcactctgtcacccaggctggggtgcagtggtgcgatctcggctcactgcaacctccacctcgcaggttcaagcaatgttcctgcctcagcctcctgagtagctgggattacaggtgcctgccaccacgcccagctaattttttttttttttttttttttgtattttctgtaaaggcagagttttaccatgttggccaggctggttttgaactcctgacctcaagtcatccgcccacctcagcctcccaaatggatcaaatcttgaggaaacctcccctacttcttttccaggagtgagaggagaagcctcttcaaaagtttactaagaggccgggcatgttggctcatgcctgtaatcccatcactttaggtggctgaggtgggctgatcacttcagctcaggagttcaagaccagcctgtgcaacacagcaagaccctatctctgccaaaaatagctgggcatggtggtgtgtgcctatagtctcaggtacctgggaggctgagacaagaggattgcttgagcccaggaggttgaggatgcagtgagccgtgatcatggcactgcactccagcctgagcaacacagcaagaccctgtctcaaaacaaaacaaaacaaaaaaaacgaccaagagcagtcggggtaaaatcagtacagtttagttttcaaagcagacaggaaggaaattgtcaaaaatgctaaatacttaaatcagccaggagggacgaatgagaaaaaaaaaaaaaaacctatttgattcaaaagtcaaaatgacataaagatgtacattgggaaattttgctaccagtactgtccttgtctattccattccctgcatgataccccacacctttaatgaggcaaacaagtacatattatggaaaaggacattttgattggtctgttagagaaggttattggtaattaataatagtttgatttggaagaaggggagagagcagaagttgcacctcagtgctaaagaataaagtggggaggggaacgatttgttgagcacaggagtcccagacagtgagctagggagccagcatctatttttgctcttgcacctaacacctgggatcatcagtcacattttataggtgggaagacttatgtgctgaaagataagtaacttccccaagtaacacagctaataagtggtagcgccaggaatggtcggtgaaaaggcagacagaaaatgaggactccatgttaaggagttaccacggcaagtgaagacgttcctatagtggaagagacctaggcatttaaaaacaaaaccctcagaggagctgactgcagtggctcatgtctgtaatcccatccgttcgggaggctgaggtgggaagatcacttgaggccagaagtttgagaccaactgggcaacataacaagaccccgtctctaagttaataagtaaacaaaagtagacgaaggcgatggcacgtgcctgtagtcctagctactcgggaagctgaagtgggaggattgcttgtggacagaagttcaaggcagcagtgagctatgatcatgccactgtcttctagcctgggtgacagaccccatttctaaaaaactaaacagcctgagacaaggtcttgaaaaataaaaaatcagaggagaagggaaacagaactggggtgatgaaagatataagacaaaatgatcaagcaagatcttttcctgaatgaggaagaagactcaggtagaaacttgtttggaggaggaaaagtaacagcaaagtgaagcagaggaagaacagaggcctagaagactgaggagatcactgagtttacaatgggcatgggtacgtgctctggtttctcttcagattatataaatctttccaccttttacaagaggcatgggtagaaaatgagaaaagtaaatttatcacagtgtatcaaagcaatgagtgccaggaagcactctgcaaagagtggggagtttgatggagcaaattcttcatctttccagaactgtgactgccctcacccccaaaaccagtcctctgcagttcaagaggggaggtggaagaagacttcagtgacgagcccaggtgactgacaggcttctctgatggcctgaatattctgaaattggcactctagtcaattctgacagctaactctggagttcaggtggaggcatgaacaagccagggaatgaggacaccgaggaagtgtggaggaagaggaagtatagtggcagaatctaacttgtatcatggctattgtgggcgttatttctcttactgggctaggctcctttggggcagcatttatgcatccagcaaacatttactgagcacctatgctatgccaggtttggggctcagtgccaggaacacagacatgatctcttgccccactgagtttgccatcaatgagcaaggcaagcaacactgaattctggtaagagttttgaaagagatgccaggaggtctcagcatccagccgggcgtggtggctcacgcctgaaatcccagcactttgggaggccaaggtgggtggatcacctgaggtcaggagttcaagaccagcctgaccaacatggagaaaccccgtctctaaaaaaaaaaaaaaaaaaaaaacaacgaaaaaacaaaattagccaggtgtggtggcgcatgcctgtaatcccagctactcaggaggctgaggagggagaatcgcttgaacccgggaggtggaggttgcggtgaacagagatcacaccattgcactccagcctggtcaacaagagtgaaactctgtcttaaaaaaaaataaataaataaataaaagaaaaagaggccgggcacggtggctcatgcctgtaatcccagcacttagggaggccgagaagggcagatcagaaggtcgagaccatcctggccaacacggtgaaaccccatctctactaaaaaaaatacagaaaattagccgggtgtggtggtgggcgcctgcagtcccagctactagggaggctgaggcaggagaatggcgtgaacccgggacggggagcttgcagtgagccgagatcatgtcactgaactccaggctgggcgacagagcgagactctgtctcaaaaaaaaaaaaaaaaaaaaaaaaaaaagaagccgggaggtcactcagcatctaagaaagcccagaggtgtggagggagaacactgtcatgggtgctccataggtttttgagtgaatctgtgaatgaaagcaggaatgggaaggtgactggaaaagaagttattgtcaaagaaaagatcttgaagccttgatatctaatcatgtactttttttttttttctcttgagttggagtcacactttgttgcccaggctggagtgcagtggcacgatctcggctcactgcaacctccacgtcctgggttcaagtgattctcctgcctcagcctcctaagtagctgagattacagacacctgccaccacgacctggctaatttttgtattttgagtagagatggggtttcaccatgttggccaggctggtctccaactcctgacctcaggtgatccacgtgcctcagcgtcccaaaatgctgggattacaggtgtgagccaccgtgcctggcccttaatcatgtacttgtaatagtctagaaatattatggttattggaaaagtgaagttaactctcagcaaataaactgggagttaaaattggaattcctccacaggtctcattttagtaaggcactcagaaacaagtaatttcaaagcagcatagtactgggctcaagcgatcttcccgcctcggcctctcaaagtgttgggattacaggcgtgagccaccacacctggcttgagtgtctttagattcctcacgtaaaaggcagagagctaggagttaagtgcaggtggagagggtgcaggcacccggctcttttcgtttgttttgtttttgagacagggtctcactgttgcctaagctgtagtggcaaaatcatggcttactgcagcctcaacatcctgggctcaagtgattctcccacctcagcctcccaagtagctgggactacaggtgcacaccaccatacccagttaatttttgtattttttgtagagacagtgtttcatcatgttgctcaggctggtctccaactcctggactcaagcgatctgcccagctcagcctccaaagtgctgagattataggcgtgagtcaccgtgcccagctgagacacctggctcttacagctccagatgaaccctttcctgtgtgatcaccccactggcactccagactgaacaacatagcaagaccctgtcaaaaaaaaaaaaaagggggggggccacttgagtgtttctatttctatttatttatttaattcttttattttttggagacggagtctcgctctgtcgcccaggctggagtgcagtggcgcgatcttggctcactgcaacctccgccttccgggttcaagaaattctcctgtctcagcctcacaagtagctgagactacaggtacaggccgccatgcccgactaattttttgtattttagtagagacagggtttcacgtgttgcccaggctggtctcaaactcctaagctcaggaaatctgcctgcctcgacctcccgaagtgctgggattacaggcgtaggccaccgcagccggctcactgggggcgcagtaaatgccgatttcccttgggtatcttcatttctccttagagccgagctcggtgcgccgcgggcaggagtgggtggggcgacagtaataagagtaacagcaagcgtacacacggccttccaagtgtgccagacaccgctctaacactgaatccgcacaacccgaaaggcaggcctttttttttttttttttttttgctttttgttttttagagacgggagggtctccctgtgttgcccaggctggtctcgatctgtcggcctcaagcgatcctccggtctggggcccccacagtgctgggattacaagcgtgagccaccgcgcccggccaaggaagtcttaatgtacctcttttcagacaggaaaactaaagtgtagcgcggctaagtaacgtaggaagcatcaatcatgtttctggtcaaagaagcgaaccaagtcaattctcaggcagaagcagcggagattctccgcagccggcagcgcccagggcgcccggaacccagagagcgagaccgcgtgaaggaagtcccgccccgccccgtcctgccctggcctccaggtttccgcttccgctcttccctggtccagtccaccctggcggggtcgcagggttgggatggyggytggaggcgatcatggttcgcccgacagctaccgctcacctcttgcctcccgctatgccagcccggagwtgtgcttcgtgtttagcgacaggtataaattccggacatggcggcagytgtggctgtggctggcggaggccgagcaggtaacggatcccgggctgaggggctgggcsgggagggacgggcccgccccagcacgtgccgggctctgttccgggctgggcttagccaccccggagctgcggcccggctattttcngctgggtgttccctgtcctgaggagctgcggccccaggaaagcaagggcaggagatccgggagccgccacctgttgcctcacgtgttctnagtccgagagggttcgagacgcggaggaggctgggagaaattcagcctgtagtttcagggaattcathttggccatccccgcaggagtacgctgctaaccacagacaccgagcgcttgtttcgtactgttgtgctcattatttcactaatcttttcttgtgtaatccatgaagatcttgcaggcttgatggtgtttttcccacattgcaggggagaacaaagcccggacagcttgttgtttgccctagcccatccagctattaagaacggaactgggatttgaacctgggtgcactccagagcctgagctgagcacgtagccccttggttttccacagtgcctgtgtagttagtgacaggactggaatgcttgttttctaggccaccgtttctgcctcactggcctccgctttgcctcttaggagaagactccgggtaggggtttattaaacggggtttataatttcttttctaagggctgcatagagaacttcttagcccagcggtttcagaaatagctccagaagagttgaagcaaactgaaggtgatccagagagcgataatgtttctcctcaagtttcagaggaaagtgccacaacgagcaagttggcaatgccctctcaaacggcacagtaaacatggaaacaatttgacttcgggcctaggacctgtaccatggaactctccaaacaggaaactttcattctagattccctccctccccttatcactgccctccaaaatattgggcgatacactacaataatagcagacattcagatagtgccttctgagacccaggtcttaaccctttacacatggttgcttattaatcctccaaacaaccctgaagagtaggtatgaaatactatgactgtacctgttttacagatggaagaatgaagcatcaacttaataaactcttggcgtagatagcgatagtagtagaccttaatcatgtgttgtggtttgtgatgtactagtgtgtactctttctatttcatctgatattctattctgtagatgagggtagtggtactcaagactttgccagggtygccaaagctagtaaatggcttcaagctggaattggaatgtagagtctgagtatgtgttctttgtgttggcctaaaatgcatacaattttggctttggattatctgttagggtgtcaaaattaccataaattgcataataacttagtagctaagaaaaaacttggagaataagagattaggaggaatgcagaaaatttgtagtaaggaaagtatgaattttgaaaagataaattgcttgaggggaggaagcmgtatggccgtgctgccctctgctgctttgctttggaaggagcccagaggtgtcatgtcttctgtgactgtaaaggttccaggcmgttctgccacatgtggctgccgagtacttgaaatgcagctagtgtgactgagaaactgactttttacttttatttatatatttaggttttgagactgggtctggctctgtcgcctaggctggagtgcagtggcacaatcttggctcgttacaacctctgcatcctgggctcaagctgtcctctcacctcagcctcccaagctggaactagaggtgcacgccaccacgcccggcaaatttttgtgttgttttgtagagatgggtctcactgtgttttccagtgcggtctagaacttctggactcaagcgatccaccgaccttggcctcccaaagatgtgagccaccatacctggcctgactttttacttataaatattttccaatactttttaattaatcaatttaaatttaaatagccatatctggctagtagctcctttcttggataaaaaagatctaagatgcaagatccttcccggagtcactgtttgcaagtttcaagtgaggtttaaatcagtttcaccactgtttgtattcagcccttggatctaagttccgagctgcctgtgggctgccagctattttttgcagcctaatttttccagtgatggatgaatgtaagacatcaatgtgtttattttctcatcaatatctcctggaattgctttcagttgcactcatttgctgtatataatttcctggcaaaactacttacagaatttctaaatttggtttctgtaaatccatctaagtaaaatggccaccatcatgccaagcactaaggattaagcaataaataaaacaaagctcctcaagaagtattcattctagagggaaatgacaggttaataaatatgtaaaaatgycatgtggtgataagtgctgtaaataaaaccaagtgacacagagtgtgttttacattgaagtcagggaagacctctttgagaagatgacatttgattccagagagcagaatgtgtgagggagtgaaccaagcagaggtctcaggcagaaggaacagtcaagagcaggattatgttgttgttttatttattggagctttcttttttttttttttttggagacagaggcttactctgttgcccaggctggagtgcagtgccgcaatcttggctcactgcaagctctgcctcctgggttcaagcgattctccaacctcagcctcctgagtagctaggactacaggtgcacgccaccatgcctggctaattttttgtattttagtagagacagggtttcaccgttgttgcccaggctggtctgttggagctttgttatagtatactttaccatgattcattgagaagttctctcccaccccacctcgaccccactacccctggccagtgtactttcaacttggttgcctcaaattttaatttaagggttgggagatagggtagtgctgctaacatgaatcagttttttttccttggtgtcacttcattcaaataactgtgacactgagactattttattttattttgcctattctgcagacattgggtttgcctatcacagatgaacaaatccaggagatgaaatcaaacctggagaacrtcgacttcaagatggcagctgaggaagagaaacgtttacgacatgatgtgatggctcacgtgcacacatttggccactgctgtscaaaagctgcaggcattattcaccttggtgctacttcttgcyatgttggagacaatactgtaggcgcctgtgttgtttatacttaaaactcagtctctagaatctatttgtcaattttatttgatgttgtccagttgaggaagtgacactatagatcttttttttttttttgaggcagagtctccctctgtctcccagactggagtgcagtggcacggctcactgcaagctccgcctcctgggttcacaccattctcctgcctcagcctcccgagtagctgggattacaggtgcccaccaccacactcggctaatttttttgtatttttttagtagagatggggtttcaccatgttagccaggatggtctctatctcctgacctcgtgatccacccccctcagcctcccaaagtgttgggattacaggcgtgagccaccacgcccagccagatctttatttttaaaggtatcttggttgaaaacgctgaggaattttttcagcttttagtgtgcttccaatctaaactgtaagcaccaaatgacctctataaaataagacctacagatcctgcttatgcattggtttgctggatgtaagccaaggccttagcattttaatggctgaggtaatttttcaaaggaattttttttttttctttgagatggagtcttgctctgtcacccaggcgggagtgcagtggcatgatcttggctcactgcaacctctgcctcccaggttcaattgattcctgtgtctcggcctccccagtagctgggattccacgcgcctgccaccacgccgcctggctaatttttgtatttttagtagagaggggttttgccatgttggtcaggctggtcttgaactcctagcctcaggttatctgcccaccttggcctcccaaagtgctgagagtgctgagattacaggcatgagccactgtgcctggccttcaaaggacttgtgaaatcctttgaagacctttgaaggactctgaagtccttcaaagaccctgtctcaaaaaaaatactttgagacagggtctcgcttctgtcacctaggctggagtgcagtgacacgaacatggctcactgcagccttgaccttctgggctcaagtgattctcccacctcgggctcctgagtagctgggaccacaggcatgtgccactgcaccaggctaattaaaaaaaaattttttttttttttggagacagagttttgctcttgttgcccaggctggagtgcaatggcgcaatctcagctcactgcaacctctgcctcccgagttcaagcgattctcctgcctcagcctccctagtagctgggattataggcgcctgccgccacgcccagctaattttttttatttttagtagagacagggtttcactatgttggccagcctggtctcgaactcctgacctcagacgatctaccctcctcagccccccaaagtgctgggattacaggcgttagccaccacgcctggcaaatttttaaratatttatagggacagtgtttcaccatgctgcccagaatggccttgaactcctgtgttcaaacagtcctcctgccttagcctcccaaagtcctgggattacaggagtgagccagcgtacctggcctagcttgtgctcttaatcagagtatacccatggaggttgaagttagattccagataaacgtccaatttgagaataagccagtaatttttaagttgcctcaaatgctttcttatttttttgagacggagtctcgctctgtctcccaggctggagtctcctgcctcagccttccaagtagctaggactacaggcgcccgccaccacacccggctaattttttgtatttttagtagagacggggtttcactgtgttaaccaggatggtctcgatctcctgacctcgtgatccacccacctcggcctcccaaagtgctgggattacaggtgtgagccactgcccctggcctccaaatgctttctttagtcttaaatgaaacataattaaaggcatctttgtgtaactggcgagtcagatagtgggagaagaacagtcttcttacttggaaaatcctttaaaaaagtmcccagttgtgtggatgggctcaacaattaccgtttcatatcgacatgtgttggagctaactgaaatatgtacatctggagattaccttcctcacgagcagctttatgtttcctaaaccttgatattctgggtcattcctttccttgttagcaactgtaggcaagaaaaatgggggaggctgggcacggtggctcacacctgtaatcccagcactttgggaggccgaggtgggcggatcatgaggtcaggtgattgagaccatcctggctaacacaggtgaaaccctgtctctactaaaaatacaaaaaattagctgggcgtggtggcgggtgcctgtagtcccagctactcaggaggctgaggcaggagaatggcgtgaacccgggaggtggagctcgcagtgagctgagatcgcgccactgcactacagcctgggcgacagagcgagactcccatcttaaaaagaaaaaaaaagaaaacgggaggaaagtaatggaatgtgccatatggaagcttctcagaagctcaagccctcctctctgggaaaatagaaaccttgttgacttgcacattttccagtcattttttcttaattgagaatttttttaatattggagagacagtcttgctgtgttacacagactgatgttgaactcctggcctaagcagtccacctgcttcagcctcccaaaatcctgagaatacaggcatgcgccaccatgcccaaccttcagtcatcttagataccatgtaccttgggctttataagtataaaggttttgttccttacagatctcagtagtactgttaagctggtgtgcttttcaaacagtaatcaggaaagaacaacttgtgttagtattttctggcgtgcttagtgggttggtagtggtgatataggctggtagctgagcaacccagcctttctggccaaaaagtgttatgtaataatattgtttgagcaaagctgctaaatataagatcattgcattttctttcrtaggacttgattattcttagaaatgcacttgacctgcttttgccaaaggtaaggagttggcagatgtttsctaccaaccctagattccctatgttaggagataggcaccagttacaactaaatcaacacagtgtaaatttttacatagaytatcattttttcaggtgaatgacaaccctatgtttaatctgtagaactaattgtttcttcttctcctttcttcttctcttcctccttctcctttcttcttcttcttgagccagagtctcattctgtcaaggggcgtgatcaaggcttattgcaacctccgcctcccaggctcagacagctctcctgtctcagtctcccaagtaggtgggagtacaggtgcatgccacctcacstggctaattttctgtagaaatggtttttgccatgttgcccaggctggtctcaaactcctgagctcaagggatccacccgtcttggcctttcaaagtgttgggattacaggtgtgagccaccgcacccagctgtctctttaaaagactaaatggtttttaaagcatagccttttttttttttttttttttttgagatggagtctcgctcagttacccaggctggagtgcagtggcacagtctcagctcactgcaagctccacctcccaggttcatgccattctcctgcctcagcctcccgaacagctgggactactggcacccgccactacgcccagctattttttttgtatttttagtagagacggggtttcaccgtgttagccaggatgatctggatcttctgacctcgtgatccgcccgtcttggcctcacaaagtgctgggattacaggcatgagccaccgcgcccggcccaagcataggcttttaaacgaagagagtgcaaccaaaggcatgttgctgggatatgtgggtcaggattatgattttgttctgtttttctgccgtggtcttaaaatagttcatgacattttaggtagtcaactcagttttcaaattttggttactgtgaactcttccaggcactttagggtacaaagatggaaggatatggctgctgcctttcatgagttagyggtctaattttatacaaaattatctgaaagttttgttcctaattatgtaatgaacacaacctgaattcaacctctttctatcacatgatctttcttgtagcttgccagagtgatctctyggcttgccgactttgctawggaacgagccagtctacccacattaggtttcacacatttccagtaagtgataagattacttcttgtttatgtgcatatggctttcagctgcttcttgagttctctgttttccacagtaaccttgaggtgaagaatctgaaaacatgatttaaatataagtaatttgggatgcttataaggaatgagcctgatatccactgagagagtaaatctaacagttcatttgggaaacattgggawatacatatcaagagccttgaaaaatattctttatgatagtawacattagaaacaatstaaatgggccggktgtggtggctcaygcctgtaaacccaccattttgggaggtcaaggtgggcagatcccttgaggttaggagttcaccaccagcctggccaatgtggtgaaacgctgtctctactaaaaatacaaacattagccagatttggtagcatgcctgtaatcccagctactcaggaggctgaggcaggagaatcacttgaacccgggacgcggaggttgcagtgagccaagatcgcaccactgcattccagtttgggtgacagagcaagactccgtctcawaaaaaaaaaaaaagaaaaaaatctaaatgttcaataataagagaataagtaaggcatagtattcatacatccataggttggaataacatgcaaccatttaaatgatgcttacaagatctaatgtgcaaatgcacttaggtttgtgttatggtaacaaagacagtttataaattgcacaaaaattggttgaaagtacaccatgatgtaaatgttgattactctggtttatgagataataggaaaattaaatttctttctactttttgagttttgttttgtttttggagagggagtcttgctctgttgcccaggctggagtgcagtggtgtgattttggctcactctcactacaacctctacgtcctgggttcaaatgattctcccgcctcagccttcctagtagctgggactacaggcgcctaccaccatgcccggctaatttttttattgtttggagagatagggtttcgccatgttagccaggctggtctcaaactcctgacctcaagtgatctgcccacttgagatccgcccacctcggcctcccaaagtgctgggattacaggcgtgagccaccgcgcccggcctagacatttcatataaacagaatcgcatacaatatgtgaccttttgtgtctggcttctgttgctgttttcaatatccatgttgaatcagaacttcggttctttttatgactgaaaagcgttccattggttgtaccatgtttcatttacccaattgtcaacaactgatggacatttgggtaatwtctactttttggctactatgaataatgctgccatgaacaagtccatgctaatttacttctttctttgcttacaccaataatctgttagcagttaacaaggaaaacagtaagattaattttggggatatactatagcttgtgatgtgcctcctatggacattcstagtgttacgccttgatgttcctagctgtcagtgtcattagcctaagaggaaagaaattccatttggaataggttaggttatctattagaaattaggctgggtccaggtgcagtggctcatgcctgtaatcccagcactttgggaggccaaggtgggtggatcacctgaggtcaggagttcaagaccagcctggctcacatggtgaaaccctgtctctactaaaaatmcaaaaaaaaaaaaaaaaaaaattagccggacgcagtggcgcatgcctatagtcccagctacttgggaggctgaggcaggagaattgtttgaacctgggaggcggaggttgtagtgagccaagattgcaccattgcactccagcctaggtgacagagcgagactccacctcaaaaaaaaaaaagaaaagaaagaaagaaattaggctgggcggttaggctgggcagccgggcgcagtggatcgtgcctgtaatctcagcactttgggaggccgaggcaggtggatcacgaggtcaggaaatcaagaccagcttggccaacatggtgaaactccatgtgtgctaaaaataacacaaatagctgggtgtggtggcagatgcctgtaatcccagctactcaggaggctgaggcaggagmatcacttgaaccccggakgcagaggttgcagtgagccaagatcgcgccgctgcactccagcctgggcgacagagtgaaattccgtctccrwaaaaaaaaawaaaagaaagaaattaggctggtcatagtgacttatggctgtaatctcggcactttgcggggccaaggcaggacgatagcttgaggcatggagttcgagaccagcctgggcaacatagggagaccatggctcttaaaaaaaataaagttagccaggtgtggtggcttgtgcctgtagttccagccactcaggaggctgaggcaggaggttggcttgagcccaggagattgaggctacagtgagctgtgattataccagcgtgtgccagcctggggtgacagagtgagaccctgtctcaaaaaagaaagaaattggacattagggcaacttattcataattatatattttgtttttttgttttgttttgagacagagtctcactctgtcacctagattggggtacagtggtgtgatctcagctcactgcagcctcagcttcccggattcaagtgattctcccacctcagcctcccaagtacctgggattacaggtgtgcaccaccacacttggccagtttttgtattttttgtagaaacagggttttaccatgttggccaggctggtctcaaactcctggcttcaagtgatccacctgcctcggcctcccaaagtgctgggattacaagcgtgagacaccgcacctggcctcgtaattatgttttatgttcagaaacagaccttcagtggcttgatttgggctttttttttttttttttttttttgacatggagtttcgcttttgtcatccaggctggagtgcagtggcacaatcttggctcaccgcagcctccgcctcctgggttcaagtgattctcctgcctcagcttcccgagtagctaggattacaggcatgcaccaccacgcctggctaattttgtatttttagtagagacggggtttctctgtgttggtcaggctggtctcaaactcccgatctcaggtgatccgccctccttggcctcccaaagtgctggaattacaggcatgagccatggcaccctactttgatttaggcttaatgctggaaacaaagccattagctgctgtgtttgagtcctctggttatgtgtgttgtgtagctgttctccatagcatgactattcctcactggatcttgactcctcacaaaggctttcctctacttccaatctagagcagccatcaccattaccttcatcgttcttttattcttttagcacttaaaatctcaataattaatcttgtttcttttttttcatttgtttttttgagacagaatctggctgtgtcgcccagtgcggtgtcacagtctcggctcattgcaacctctgcctctcaggttcgagtgattctcctgcctcagcctcccaagtagctgggattacaaacacccgccaccacgcccagttaattttttgtatttttagtagagacagggttttacctgtctctgttggccacgctggtctcgaactcctgacctcaagtgatccccccgtctcagcctcccaaagtgctgggattataggcatgagccaccgcgcctggcctaatcttgttttgttttctttttttactcgtttacaatgtaagcaagtgccactggacaaggaccctgtctgtgttattccttgttgtatttccaatagtaagagtacatcagatacttggcaaatattacacgagtatctaatgtatttcttaccaatgtctgtggatatagccatgaacaaawgggacattgtccctgcccttataataaattgtctcttgccgtgcatcacagtggttcatgcctgtaatcccaacactttggaaggctgaagtaggtggatcgcttgagacatagagtttgagaccagcctgagcaacaaagtgagaccccgtcactacaaaaaatttaaaaattagccaggcatggtattgcatgcctgtggtcccagctacatggaaggctgaggcagaaggatcacttgagctccagaggtcgaggctacagtcagctatgttcatgccactgcacttcagcttgggcaacagagcaagacccagtctagaaataataataatttaaaaattgcctcttgatgaagaaagtactatgctaatcgccttttagtttcatactccttgactatttgtaaatgacattgaatctccgtaacgattatttggttaaacattttatctcttgttttatctttaccagttactccctctcttacttaaattgttctccctccaaggggtaatggtggttattaaaagaagcaatgaaaccttgatgatttaaggtctcggtctgagactttcgtgtgttctctttgggttttcaggcctgcacagctgaccacagttgggaaacgttgctgtctttggattcaggatctttgcatggatctccagaacttgaagcgtgtccragatgacctgygcttccggggagtaaagggtaccactggcactcaggccagtttcctgcagctctttgagggagatgaccataaggtattctgaaagtgacctgcaggacacagaaactcaatggtggagcctaagagacaaggctgcctttgaggatgataggagagattgactgtgggatgggtggggtctttcgactagaaggaagttgtgggggttagggagcgagacctgggtaggatgacaggttgaggcattctcacactggacacatggattattataaggatgtgtcttttctttccaaggtagagcagcttgacaagatggtgacagaaaaggcaggatttaagaggtaggtaaatgggaatgtgttggcctccctgttaagttgatggaagtcctatattcagtatacctgcagatttgaccttacaatttttgcctttttcttcctttgttcttctacccatttttttttttcctgtctctatcctgggttttactttcttactatctggattctttttttttttttttttttttcgcctaatcgtcttgctgacatattttctggatttcattttattttattattgtttttgagacagggtcttactctgtcacccaggctggagtgcagcggtgtgatctcggctcacggcagcctccgcctcccagtttcaagcagtccttccacctaagccccctgtgactacaggcatgcctggctaatttttgtattgtttttgtataatttttgtattgttttgtagagaccatgttgcccaggctggtctccaactcctgagatcaagcgatccacctgcctcagcctcaaagtgctaggattataggcatgagccaccatgcctgacctgcattctctttttgtataatctataggaaaaaagaaaatgatttacttctggtttctttagaatacctttatccatgttgttaccatttttgtttctttacttagggcccccaacaggttaggctaaatctgaccatttccattgaggtccaccaggttccaccatggctccttctcccaggcatttctattgggctgtggccagacatgggcacgttgcaccatgtatccttcttgagtcaggccattgtcctgagtattagtgaaaagggtggaagaatagtttattccaggagcaagttaccactcaggtccactggttgagtataacttagcataccaataagaccaagcttttctttaggatgtgtttttccttgtttgacagagtcatgttttgaattattattattttataagagtctcccagtgatgcttaggctggccttaacctcytgagttaaagcagtcctcctccgttagcctcctaagtagctgggactacagtcatgcaccactgcaatggctttaaaatattttaacctaagtctctcttgtacttattcctagagctttcatcatcacagggcagacatatacacgaaaagtggatattgaagtactgtctgtgctggctagcttgggggcatcagtgcacaaggtgagtggtggcagcatgtggggtggggacaggagctttgggcaccacagacagactgaattaacctcagacttttacttaaccatctctctcaagcaatattttacattagttttaataatttgtggtctgtaaatgaaacccttaaggggaagactcgttttggcattttctttaaagttatctcaagcactgcaaaacatccatcttgttcagtggtatattaaattaatctttttttttttttcgagatggagtttcgctcttgttgcccaggctggagtgcaatggtatgatctcggctcactgcaacctccacctcctgggttcgagcgagcctcccaagtagctgggattacaggcatgcaccacaatgtctggctaattttagtagaggcagggtttcaccatgttggccaggctggtctcgaactcctgacctcaggtgatccacccacctcagcctcccaaaatgctgggattacaggtgtgagccaccgcgcccatcctgaattaatcttgtgattttctttccatgatgccttaagcagtgtttcacaaaagcgttttcatgctccttgaatttgtcatcccagtccttcgggaacagagaggagtcggagtaagatactctgcaggagctctttgggaggatgcgctggtcttcagctcagccwcagcacacctaagagctcatctcyttcatcagcctagtcacagctcccagactctactgcacactgacagtgtggggtgatgcttattcccctacctcccccagatttgcaccracatacgcctcctggcaaacctcaaggagatkgaggaaccctttgaaaaacagcagattggtgagtgctgtgtakagacctgtgagcacacattgctgctggaaggctgtggatgggggctgagagctcattcagcatgcttgcctactcactatcctctgaagtctctctgcctttgcatcttgtcctttttttacatgggcaggctcaagtgcgatgccatataagcggaatcccrtgcgttcagaaygttgctgcagtcttgcccgccacctgatgacccttgtcatggacccgctacagacagcatctgtccagtggtttgaacgcacactggatgatagtgccaacyggtcagtggcacagggacatcacatacaccaagttgagtggaggtstgaaggagggacctagaagtaaaaggacatatttgagcatctctacagtctccttatccccaaggatcccagagtctagcagggaggcaaaaacataaaaaggacagtgtgataagtgttacaattggagtgtgtactgggtactgtggagcaaagaggaaggaatagtgtttgaggagtcagaaagcttcacagtagaggtgatgccttaagacttaagaaatacatgcatcttttaaagacaagatcgggagcattataaaggcacaaagcaggagaaaacacacttgagggagttactactacttgagtagccctggggaatgaagtcaacatgtgccaggaggtggggcaggacatggtcacagatagccagtttatgaaaggtcttctgggtcttttctgaaggcagatagatgtcagttgtggtgtctaggcacaatgacatcttgattagttatgagatgagtcagaaataatttgtaactactgttgaggtgccaacatgcgcatcattttctgttttatgtatatactcacttaaagcagattggcattactctcgcctgctcgcattttgctggaatttcttgagtggatacggatgtatagttaaacctagctttctgggatctgtgcataatccacgatttatctctggaaataagtcatgtgaactcattcagaagtcagccattgaatactttttagcaaggtgtgaccctgtaggtctgctgatttgcctgctaaaagaccctagcaacagtttggagagttggctgtaaggagacagggatcatgtcagaacaagttaggggctactttaaaagtctgaggccacattggtgcagtggccatgtaaatggagaggaaggatatagatccagagtcgaaggyagactggccagcccagccctggtggttgaccggagtgagtataaagagcttggtgagtggggcgctactgccatttactgaggcaggagctacaagggaggaatggcaggtatgtaatggtgagtaggaggaatgagaaagtggctgagttcagtttggggattgaggtacccatagatcaaccaggtggacgtctcactcagtaggtatgaggtctggcacttgagcaagtggtctggcctagaggtgacagatttgagggtcgtgaggttattggggtaatcataagattgaaggagattatccagagagtacagtcagtagggcaacttgttgggacacacactgcatttcactgaaattatttgtttaaagacatactgaatggctatttgttttctagacggatctgtttggccgaggcatttcttaccgcagatactatattgaatacgctgcagaacatttctgaaggattggtcgtgtaccccaaagtaagaagcctcaattcaaaagtaaagtactagggaggggttagaatgtgggagggagggtgctctggggtgtgttgagggagctgtattctgatccgataggcattcttcccacccgagctcatccttcagttcataagctctagggaactagctcygtggaattcatagacacattatagaaacagaaaaagaagtattttaaattgccttaaactatctagcagcatgaatcatcagctctggtgtgactaggcagagtagatgtctccatttgcctgtttttaagtacttgaggcagatgggttcatttctctcctatacttagctcttgaggctgagcactgatatgtaacaaataggggttttaagaattctttcaggccaggcgtggtggctcacgcctgtaattccagcactttgggaggccgaggcgggcagatcacctgaggtcaggagttcaagactagcctggccaacatggtaaaaccctgtctctactaaaaatacaaaaattagctgggcgtgttggcgggtgcctgtaatccgagctactcgggagactgaggcaggaaaattgcttgaacccaggaggtggaagttgcggtgagccgagatcgtgtcattgtactccatcctgggcaacaagaacgaaactccatctcaaaaaaaaaaaaaaaacctcttcctatgtggcaactttttttaagttaatatttcctttttaaaaatcaaaagtctgacagggcgcggtggcttacgcctgtaatcccagcactttgggatcacgaggccaggagatcaagaccatcctggctaacacagtgaaaccctgtctctactaaaaatacaaaaattatctggacgtggtggcgggcgcctgtagtcccagctactcgggaggctgaggcaggagaatggcgtgagcccaggagacggagcttgcagtgagctgagatcacgccactgcactccagcctgggcgacagagtgagactctgtctcaaaaaaaaaagaaaaaaaaaatccgaagtctgagttagtaagaaaactgaaaaaacatcatatagaataaaacaacttgttactctccataatgtggtagttagtgtctgtgctgtgcattttgtttgacatcctgctgtgtttatgactttaaccttgaggcacctttcttggtcattcaccgtatcttttcctataggtaattgaacggcgcattyggcaagagctgcctttcatggccacagagaacatcatcatggccatggtcaaagctggaggtagmcgccaggtttgtaacccctcatgttcctggrtaagttgagagtgcacgtttggtcctgctctcttctccgtgaaggagagcagatgaaggtgtttatgtcattaccttcagtcacagtaatggtacagagcagtggccataatctgccatctatggagggtgattttggtgaactgaatttgttaaagtgaattacttaatcacttgtaggaaaagtccactcctagtgaaggaatgaggtctgacattctgtaggaaatgagcaggaaacgagcaaatgattcatgaggctttacagaagagggccagagcaaggtgggcatccatttcaggcttgtcmtaagatgtgggcagagagttgagaagaccctggtacagatagacacaggaaccacctcagcctagaggggttttgtgtagagctgtgtagactgcatggatgggaagtatctgatgactttktaaaagtgttcaaacgccctgttagtagggaactgacaatacttcactgtcttcccaggattgccatgagaaaatcagagtgctttctcagcaggcagcttctgtggttaagcaggaagggggtgacaatkacctcatagagcrtatccaggttratgcctacttcagtcccattcacycccagttggatcatttactggatccttcttctttcastggtcgtgcctcccagcaggtaagcttccaagaagcctcttttctgctgggctgcagaacctggggtactctctttgatgtttttgctttataggaggtatggtgggaatgggctagttagaagaaaatcagagcaggttgctggctaaaacttagatatttcggttttgtttctgttttgttttgtttttttgagacagagtctctcatccaggctggagtgcagtggtgctgagtgcagtggtgctgggattataggcatgagcccccacaactgaccaagataccgctgttttgagctgcctttatttctttgtgtagattttttggaattatcttttggtcttgagaatgtggtataatggacaaagaattaggttttattgtcaggtggatctgggttaaatcgtaacctctggcatttactggctgagaaggtaaaagtaaatatctcagtgttgtaatgattgaaatgcctgagtatatactaggtgctcagtatgtgttcaggtactgtatttaattctggggattttaaaatgaatagataggctgggcgcagtggctcacaccagtaatcctagcattttgggaggccgaggcaggaggattgcttgagctcaggagttcaagaacatcctgggcaacatggtgaaaccttgtctctacaaaaaaatacaaaaattagccaggtgtggtggtgtgcgcctgtagtctctgctactcagggctgaggcgggaggatagcttgagcctaggaggtcaaggctgcagtgagccatattcattcccttgccctctggcttgggtgacaaaatgagatcctgtcttaaaaaaaatacaaagatgaatagataatcctcatcttcagagagctcaaaacttagtggtgaatacttgtaaataggtcattatgataccaagcagtacgtgcaaggactgagggctaaaagactaaaactggaggtaggagaccaataaggaggctactgcaacgggccaagcagtagatgatgagagcttgagtgaaggcagtggtgagagacacagaccggggagggagaggaggttaagctcttggtggctacttgaagagggctgggaagcaggaggaaagaagctgtggtgatttttaggttggatggaaatggtgaaaccacctgagagaacacaggctgggccagtttgcgggaaaggttggtgagcatgtgggcatggtggttgaatcatctgtgtctaggcagaaattcctgataggcagttgaggaaaacaagctcagtgttggagtaaaagcttcatcaaattaggtttcagtggtatcccctgacattggaaaaggtattatctgctaatatcttaacattttcttttgtcttgtatttgctttcctctggcaggtgcagagattcttagaagaggaggtgtatcccctgttaaaaccatatgaaagcgtgatgaaggtgaaagcagaattatgtctgtagagttggaagagaattaaacgaaaatcattgttaattgctgaggcatgaaaattgtgttactataatgccttattttacctcgagaattgttaccttaaattagtacagcactttcttcttcccatggtgctttcctgtttctcagtctcacatttctcaacaaggcaaaaacaaagagcgttgaagttgactctgctcttgcatagtaaatgtagttcatacttgatctctgttctttcaaggcatattttccagctgcctcaagtttagtccttttcacgtgttcatttgcttgtaaagtagcaagaaatttctggtcctgtcttctaaaagtgaatttgatctaggtctagcaaaataacctggactcagtgattgagtcaatggtcagataccttttatttcggttatttttggctagtataagtgatgaagtttggaactacagtaaatacttaaaaaaaaaaaaaaaaagaaccaaaccctgatgtgaccatcaggctgattgagctgaagttgtgcccaagctcatttcatcttttgataaggcttatacagcagggaaatgctaattgagtatattgatttcatcagggccgctgacagtctttattccttgttgcatggattttgttgttgaggcttgctctgtcacccagactagagtgcagtagcacaatcttggctcactgcaacctccgcctctcaggttcaagcgattctccagcctcagcctcccaagtagctgggattacaggcgcctgccgccatgcctggctaatttttgtatttttagacgggatggagttttgccatgttgggcgggctggtcttgaactcctgacctcaagtgatccgcccatctcagcctcccaaagttctgggattatagacatgagccaccacacccagcctaatcttgttttctttttttacttgtttacagtgtaagcaagtgccattggacaagaacgttgtctgtgtcattccttgttgtatttccaatagcaagagcacatcagatacttggcaactaggcagtcttccagcttctgccactgcgcccgacttccttgttgcatggatttatagctgattgaagcaactgtagccaaagattgagttaattacctacctgccaggagagcactagtgttatttagcccattctcatcctacatatttttcggcatagatgaaaatgaaagcttttgtttatcagatttgcagatgacacaaaactgggagaattaacaagtatgtttatttggtaaaataagttttcatctctaacctaaatcggctgaaatgatgtgtcctaaactagaggaaaaagttaataaagatcaatgtaaataagttaatcttaaactcagtatgcaccagaactgagagaagactgttttaggaggtgttaatggttgtccagtgcccaaaaagccaccagaggcttactgctccgcactcttggcattacattcaattttggatacccagtctgaggaatagagatgaactggagagccaacctccaaaaagatcttgtggtggaggaatgttagggctctttatcctatacagaagaaaactcctcggcacttcaaatattgccaggtgcaggaagagtgacttgattgtgtgttgccccaagagacacactgagctcaatacccattactgagactggcttggggccagacattggaaccactgagattagcaacctacactcaatcccccaggtcaggcagaagctggaagactgcctcgttaggaatgttgtgagggagaggaggctgaatcggttccagttttatttaaaagtagccaggaaatcaggttgcgatgatgcgcatttacagtcccagctacttgggaagctgaggcgatagggtcacttgagcccaagagtttagtccaggctgggtgacagcgagcccttgtcacttaaagccaacctaagagaagagcttatccttttggaaaaacaatagaagacaattctgaaaaccaaattctgaacataggctagtatagcaagcaagcagggatagcatagagccatttgctcaacttccagaaagagttactctgttcatctctaaaaaatcttgaaaagggccgggtgcggtggtggctcacgcctgtaatcccaacactttgggaggccgaggcaggtggatcacctgaggtcaggagttcgagaccagcttgaccgacaaggtgaaactccgtctctactaaaaatacaatcaaccgggcgtggtggcaggcgcctatagtcccagctacttgggaggctgagacaggagaattgcttgaacctgggaggcagaagttgcagtgagccaagatcatgccactgtactccagcctgggcaacggagcgagactccatctgaaaaaacaaaacagaaaaaatcttgaaaggatactaagtctgacacaaggaaattaagtcatgggactctgaccagatattctgtctacttccttctctgctatgggcaacttggaggcagcaactactatcagtttatctgtaatgtgagaatttatattacataacagatactggggatataggataccatggattttagttaatacatttcctcatagaaaataaggaaataacagtcttgttcctgtcctaacaattctgttagactaatgatctccagtgattggcgatttgacctggtttcttcctggactatttgaatgggtggatttgttggtgcatctcttgtcttctttccttttccattctcctttatttttgtatttacatacttgtatgcaactttgtaatctgattttcccatgtaacattttaatttgatgggtggtctgcgtgttcactggaaaacatatatatattaaatgtacatttatgtatatatataaaatatacattcatatatattatatataatatacattcatatatattatatataatatacattcatatatctatcttttatatatatatatagacaagatcttgctctgtcgcccaagctggagtgcagtggcatgaccacagttcactgcagccttgatttcctgggctcaagcgatcctctcacctcagcctcttgagtagctgggactatggcacacacaaccacacgtggttcattttttgttgttttttgtagagacagggtctcactctgttaacccaggctgttgtattttctttaagattggtttaaattcacacggactccagcatcagaactacccagatgtcaggttctgggcagaacttggggcaactgatgaaatgtctgctcagctgaagtcagacacctggacacttaatgccctctttccctggctgatgctcagtttcatttaagaaccaggagagcctgatgtttgtaaacacagctttagtggaagcacgagggttaggagtccctagaaaggtgatatgaagcctaggtggatgtgagggttggtgagatgggaattgcacagcatagaatctgacacagaaggtactcagaaaatttcgttttccggcctggcgcggtggctcacgcctgtaatcccagcactttgggaggctgaagcgggcagatcatctgaggtcaggagttcgagaccagcctggccaacatggtgaaaccccgtctctactaaaaatactgtactaaaaatacaaaaaaattagctgggcgtggtggcgggcgcctgtaatcccagctactcgggaggctgaggcagagaactgattgaacctgggaggtggaggttgcagtgagccgagatcacgccactgcacttcagcctgggtgacagagcgagactccatctcaaaaaaaaaaaaaaaaaaaaattagcaagttatttgcagcgtctatctcccaccaccctgactgctggtccacaccatactgtcccaagcttctcaggctgcggtgcagacgaagaaatcatcgctatgcatgctggccttgggatgggggcgcaaagcccctggacgcgccccgcctagtgggcgggaacgactacagcccccagcatgacccgcggccgcccatgccacgccccgccacgcgtgcgcttaggcgccgctgagcgctgactgggtgcgagtggggaagctgctaacccgacccggattggcgctgaggtggcccgtggggcaggtgagtgcggggcgggagtcagcggagacccaccggcgcctacaagttcccctcaggcgggggctgcggggcggctgtggtcggactgtccgaccgagggtcgtatgggccgaaggcgcccacgagagaagcaccgcctcgggccggagagccgccgggccgaccttgctcgcgtcgccgttggaatgggggccggggacgcggcggggcggggaggtcggctgcgtcctccggtgcggccgcccctagacggccgaggccacctcaggtgttcggggcgccagccggaatccaccgcgctggcagccgggagcggttttacgaaaaccgcgcctgaggcggggggctttctaaaaagagcctggctggctctggcaccgggacagctgcagactcctcctcaggtttaacttgcggttttccctttaagattcagatccaggtgcagaacccgggctcggatccaggcccgagactcggaacaccggtgtgtttgcattttagcacgggggaaactgaggcatacgttagccagaatcatccggtgtggttaggactggaattttgaaaattattctcatacttagtttactgacctaggctcttttttatttggaaagaaaaataaagatgtttcaaaggttgttttcagtgactgggtgactagtgtatcttccagtctcacgctgcacgtttgtggtgggttgatggctcttttttgttttgcggtgggatagagatgtcctggaatgttctacacctttcttattctttcttagtaaattcaagtcaaatcagactctgattcacaaaaactcattttcaacttcgactcgtttactcgtagtttttgtgacaggtttgtgattaggtttataggtacatatgtttcccgcttttcttgctcttttagttccaattatctctgcactctaaacagttgaattacatctttgtttttacactatttctgttcttggtgattaatttgtaattcttcttttcttttcttttctattttttttttaagacgggagtttcgctcttgcccgggctggagtgcaatgacatgatctcggctcactgcaagctccgcctcccggattcaagtgattctcctgcctcagcctaccgagtagctgggattacaggcgcccgccaccacgcccggctaatttgtgtatttttaatagagacggggtttttcgccatgttggccaggctggtctcgaactcctgaccacaggtgatccgcccgtctcgggcctcccaaagtgctgggattacaggcgtgagccactgcgccaggcccgattaatttgtaattctatagatatctttcctggcttttgataatcctaagtgaatgtagctttttcatccctaattatcatagtagcctgagctttagttcttctccctgtccccccccccttttttttttttttttttttttgagacggagtctcgctctgttgcccaggctggagtgcagtggcgcgatctcggctcactgcaagctctgcctcccgggttcacgccattctcctgcctcagcctcccgagtagctgggactataggtgcccgccaccacacccggataattttttgtatttttagtagagacggggtttcaccgtgttagccagatggtctcgatctcctgacctcgtgatctgcccgcctcggcctcccaaagtgctgggattacaggcgtgagccaccgtgcctggccctccctgtccctttttaagcgtggaggtgtgtggtctgggaggggagagggtgaggtgtctattgatcagatatgggtaataggttaacataacccatgaccagaacattaaaaggctgtaaacaaacaattgcttcaatataaaaacgcatacctcgtgaatttggaaacatgtcaggttgatagaaaagtgaactcgggtagaacctcacagaaatgaacccgacattagggtgaaatattgagaagggaagggaggagataatcatctcttttattttacagccatctttctatgcctggagtggatgtaggaacagcctgctggctcagaagcttaaaaaaagctctgtgtgttttcagtttttctcttcttagttctcaatgaaggttttggcaggagcccaaaatcttgtacatttgataatttaacatcagtttcatctgcttactctccagatagcctgttattcagctggtgacgtcagtaattttccacagcagccattcatgagctcatgcagactgtcacaaggaaatgggaatagcacaatga

SEQ ID NO: 95931 - DNA, 163587 bp, Homo sapiens
  misc_feature (1)...(163587): n = A,T,C or G
agatttaaaccatttccaggttatataaaatgtattcagatgtgggactgaacaaatctccagtttcttgggttatttaccattggttcagttacctctttcactaggatgataactaagctttactctgaaaagctgaattctctattttgtttcagctcccacaacagaacttaatacttattcatgttctctgcaagagtttcttgggacatttctgcttacccacactttcctgctgttattaaataggtggctatgttccagagacaacattattgagtttacattatgaaaatttataaaagctagttttcagtgctaccctgtcccagggacaaagtggattcctgtttagggaaggaatacacatttcctttaccctcaggcctttaaatctaagtaagtttcttggtgccactttatattgatgctttagacatttattttaagaatacattcccagttcttataaagcagaaataaaacttaaagtacccatttaaaaatatatttagtatttttatttcatcttttcaaggatcatatattttcacttcattcttgattctaactctttcagaatcactgacatggaaagattttctgttggatatttttagatgtctataactctgctgttaagaattcgtgtatcaagtaggtggagatctaccaaatgagctgttcttatcttaagatcccaaagtgattggtctgatcctgctcaaggatttaagattttcttggacagcactgttaatcttttagatactctatattagttttgtttattggtaagtagtaaacttgtagtctttaatttttggttaacttcttagtgtttgcaactattgttaacaatggatacgattatgttagatgcatatataacataactttctaattcatgtaaactacctaaactgtacccaaattaaagaatataatgaaaaaaatatgtgaacatacaaagctcagaacaaagtgttttggcaggatatgcttgtgatctagggaggaaaactgacattggtaatagttctattgacaacttatataccaggcattttacaaatattatcccactcaatcccagtttggccatctgctaggtgtggtgtcttcagcatattacttaataggtttgtaccttaatttccccatttggtggaatgaaacaaaagaaaaaaaaacagaaaaacaaaatacttacatagttatgctgaggattaaggattacatcaccttgttaagactagtgcctgagataaagtaaacaccatatgaatgtttgatattaacatccttcactgataaggataccgaggttctggaaagctagagaaccagaccatggttgaagaacttacaagagatgacttgagctcacacagtgttctctataccaagcagtttctcattttagtcttggctccatgtttagctaatgttgtaatactgctgagctttggttttgtttcttagaaaatgaaagtgtggggttaacatttacagcccagttcagttctagtattccatacattttactttgagctttggtaaccaatgaacacttacctggctatgggaaaaatttgtttttctctagaaatgggcaaggactaaaatagttggctctagacatgtggtgrtcattaaaagtacatggtagactcatcactggaaagtacccacatggtgggaaaaggtcaatcccagaagctgcgtttaagatgtcttagtagcaggtagcctactctccaagtttgggaaggaaaaaacttcttgctcattttgttacaccaggatataggtgacaacctaaattcgtctgacaacacaacaaaaacaagataaatgaatggtggaccaacttaggcttctgtaagacaggtatgggtgaaaaagggaaagcttttcagatttttgtggccatatgaggatgaaaacccatgactgtccttgagttttcttaggcacaggagaaaggagttaggtggcaccaaagttatttgacaccagaaatctgaaagacagtaaacatagtttcattccaaatgctgagtcattcttatggggaagaagagaaacacttaagactctcacttccctgaggtcttggtcttcactagattgccttctgctgaaataattacttcatgttttaaaatttggttatggtcattgtttcctttctcataaccccacttagtcttcctacacttttagttttaaacctctttatttgtttgatttggttttaatactataagcaaaaaagaagcagtagcaagtgtttgttgagaagggaaggtttttgttttttgcttttttttttcaatattgtctgtggagctggcatagtaattactgagagcaattcctaaattaatgattatctcccacttctccatgaaagtatcttaataatgaaaagaaagtgcttaggcatataggaaattgtgttcctgttacatactctaatcagcaaccaaaccctttcagtggaattcttgttatattaggagcaagacacagggctagagatagggaggcagaaagctacttagatactcataaaaagaattgtcaaaaaaggctttaaagtgttatgtattaggctagaaagaaaaatttgttattatattttattctctttagaaaagattcatggaataaatagggcatagtgttttattttatacgtgtctgcgtgtctgtgaaatctttttttttttttttttttgagatagagtctcgccctgttgcccaggctggagtgcaatggcrcaatctcagctcactgcaacctctgcctcccgggttcaagcaattctcctacctcagcctcccgagtagctgggactacaggcgtgtgccaccagacctggctaatttttgtattttttactagagacaaggttccaccatgttggtcaggctgctcttgaactcctgacctcaggtgatcctcctgccttggcctcccaaagtgctgggattacaggcatgagccaacgtgcccggccagtatctgtaaaatcttaaaagaatgatcataaacctctacattttgaaattaatattcattaaaaattttttaatttccatttttattttagattcaggggctacatgtgtaggtttgtttcaagggtagattgtgtggtgctgaggtttggacttctattgattccatcacccacatactgaacatagtaccaaattggaagtttttcagcccctgtccccctccctccttttggattccccagtgcctattcccatctttatgtctgagtgaaaccatgatttagctcacacttacaagtgagaacatgtgatacttggttttccgttcctacattaatttgcttaggataacggcctgcagctgcatccatatgctgcagctgcatccatgttgctacaaagtgattttgttcttttttagggctgtgcatttttaagaattaacaactttgaaaatatgctctaaataacttatgctctaattgcaagtcagcaatgttttattggagaaaattatctactatacaacagtttcctatttattttattcaagtcaatagttgagattagatgtgtgtgtgaagagtgggagagtgggaactatagagcagaggtgcacggtcttgaaaaagaagattcagagtaaattgtatgctgatcaggtgaagcttctttccttgtctgtgccaattgaccccactctcatgcacacctttttccttctgtgtccttcctgaatcccaccagatgccaacatctttctgctgtcctttggttgttctgggccccaaatttggcaagaggaatcacgtccagtgctcctgacttttctcaggaaaaggtggttagtgaaaccacctttgcaaaattatgacctagacagtgaaagagatctaacttaaccgacttcaacttgtttctaacctacaagctgtccttgttcattcctgggcgtaggctgaactaactttgggaaaaacttagtttacagtttatagttttaacaaaggtggtaacagcccattcccaaagcagacctccctcttgcctggggactagattgcctttgtaggactaacagccacaaaagattagaaactatggttaaggagtcattctgacgctccctaaactgcttctaagatcagtgcttgagatattttgcagaccctgcacttgacggatcagctggtaccacctagatcaataaactgactcctctgaccttgtggccctccacccaggaactgacttagtgcaagaagacagctccaactccctatgatttcatccctgagcaatcagcactcctggctcactggcttcccccaacccaccaagttgtccttaaaaaatccgctccacgaatgctccggagtctgatttgagtaataataaaactctggtctcccgcacagctggctttgcgtgaattactcttgcaattcccttgtcttgatcaatcgactctgtctaggcagcgggcaaggtgaaccccttgggcggttacactagctagcagtgtgactaggactagtggggaaaataatcagctgacatagtatggattggaccagatcgctcacctaagcattcatttcaaatcaagaaacatttaaacatcagttatattcaggcactatgctaggcactagagtacaaaagtgagtaactgatggtcccatttcccaagcactgaactgatctgggataatcagtgagaaggaaatccaggactggcacccaactcaaccagattattccttttctgggtaacatgttgcatttctagataaatgatgagggtttgaaaaaaatgataaaaatattggtttgatttgtcaaactaaagaaaaaagaactgaggcatacttaatataaccagtctcatgatgttgcccagtcacaagtttttatttatttattttttgagatggagtctcactctgttgcccagggtggagttcagtggtgccatctcagctcactgtaacctctgcctcccaggttcaagtgattctcctgcctcagcytcctgagtagctgggattacaggtgtttgccaccatgcccggctaatttttgtatttttagtagagatagggtttcaccatgttggttaggctggtcttgaactcttgacctcgtgatctgcccacctcagcctcccaaagtgctgagattacaggcgtgacccactgcgcctgcccggccacaaggaagtttttaaaggaaaagaagaggcagtttctaaattgtttaccaataatttacataaaaaaacaaactattaattgtctatagattgttcttcgtatcacaaattccaggaacatgaagatatggttgggtagtcagtcatgaacaaaatgcctttaaacaatcgcctctgagcatgagtgtggggggtgcaacttatgtcccatattcaaggtctctctgggcctgataaattttgcatacctcacattgctcaaatgctctgaactatttttcttttctcaactacaatttcctttttctggttgctcatgattcaactgggggagcttttaaaccgtggttctcaaactttaatgtgcatcagaactacccaaagggcttgttaaatctgggtagctcagccccagccccagagtctatgaatcaggtcactggagtacagtttctgtcaagttctcaggtgatgctgatgctgcgggctccagtgactacacttttagagccagttttaaaatacaaggacttgcagatcccacgtccagactgactcattggacttggggatggaaatctggcattccacccctccctgccccctccccccaattttaatgtgtccaagggtgagaatcattgctcctctgtggactatggatggttccctgaagttactgagtttgggatttaataaatatatgcattcctctgggtcaactacaggaattctgcggtatttaaggacattaaatgagtgacttaatactttatttaaaaaaataccactgctttttggttcacactaattttcttccttcttttggaaaggcatttccgtccatctcctggatattttccaataccacgatagaaaggttattagtacagcacccagaggtcttcggagcaaagctgttaaagaagtggggtccatttgagccccaactttgccttccttaggtccccttgggcttgtctagccctaggagttccaacaagtaagctgggcatgctcagtgggcagggtcgttttttttttttgggtggcggggggttgcaagtgggaagcctgctgttcagctgccggggctctccgcctccccccacctgtatgaggctgggtctggggaacctgtgctcagcattccaccccctggagcttgggcttggtcttccctgcgggtccctgcgctgacattcaggcggggagccaggaggcctggcgcgcctccagagcccgccgggggagccgggcgagggttctgggctctgacggcggggtcgcagggtcgcccgcctcctggacacgtctgtaggcctagggaagcctgccggccgggaggtacagagtaggagaagccagatcccagggcggacaacgagaagtcgtcaggtaagccagccccgccagcgtgccggcggacgagtgtctcctctcccgcaggcagatggccagggcggcccgcatgggcgagggcacaggaaatcggacaccgccaccgtcttccccagcctggcctagctcaggctttccagtccgccagcccgctggcaaggcggggcggaggtctggagtccggcatcgccgaggcacaaagcaggaactgcagccaggggcgagggcccttgcgtgtggcgctgcgcgaccccacccggcggcaggacccgcgtccccgtctagtcacgttcattgggccacggagaccacctcgctcgccgcccgctgttggcttttccctcccacacccccgccaaccccggccccggttcccgcccccacttccgcgtttccccgctgggccggaggagcctgggcccgaggtatccgggcaggaggtggcggcctcgccgccctggtcaggcctccgggagggagcaggcgcgggagcgggaggaggaagtcgggaagagggaaggcgggggcgcggcccgcccggcgctcgagttacacccgcccagcccgcctcgagtgacakccccgcgcgcctcgctgggagcacccgggccgaggctctgattctggggggaggccgactccaccctggctggaggaactgggtgctcctgcccgctggcccctcgcgcgtgaggatctatctcaggtgtgtgcttcctgggagaccccttcccccgcctctagtattctagggggggagtggtccctttctgacccgggcgagtgttctgggactccagtcttggcggtaggtggtggcgggaaacgggaaagatttagaatttcttcccaccagcagaagatggattcgctcttctctagggtttcgttgtttatgttttggaggcggcatttgtaaaatagtaaagtggcaggacttttggggcgagggttggtaccccattgaaagttcatgcaaacttttagcttgtagatgcggctagtctgataaggattgttgctcccttccgaagcaagagtgagaacgagtctggaggagggctgaggcttctttgagaaactcagctgctggcgtgtgaccgtcctaggaggaaatggaaggtgcacactgataacttaaaacagcctccactccctatgtagtaacttctaccagcaaaaatagatttgcaaagagtgctttggcwggaaggtgtakctgggtgaatgaagtgctgctcttagcaratggtctctagtctggcttccaccttgtgcagtggaatattcactcccagaagagttccagagtaatttacaaacacaaattcttgcaaagtgttagtgacatgggcaacccaaatcacacacaacacattataaatatcataggaggcagctatagaaatagcagctagtcaacttatacttgtataaataggtgagggaaggaagttagtaagtgacagggagtctttattgctaaaacaaaactgttagtattttgcatgtgttccaagtttaaagagatgtgaagtttctttttggcgtgtggacggtgctggcagctgtcacactgggcccaggcacttcttcgtagctactgaccactctagtcccagtcctacagttcttgctggctaccacatgacatctggatgccattgcccartggagaccgtgtgcagtctggggaaccttgtgatgtggatgttgaaayccccctctgtttctcacaggggcgttatgtcaaattacaacactcccttgacttttacaaatcaactcgtgaaataatacagcaatattttaatgaataaatgggtaaatatggggttttgggtttgagaaccaacaatggattcattgcaactgtccattctcatagcttatagagtcactttattttataaagaaattctaaacagcattagagctctgcttccttctttctcccttgtgattcattcaaagatgcaatggcttggttcaggaattgacaaaagggccacagtgttaccaattgttagtgagtgttaccaccccctttagttttttttgtaactatttaatctcattgtagatattttaaaagatttgatgattattgtgcataactcatgttggcaaactattataactctgaacttatcctgtttggttgttttctttcatctctagcgtgtaagttctatgagagtagcagggcttgttctgtcttgcatactttcaaaactctaatgcctggagtggtgactagcttgtaatacaccctcaataaatgttttctcaatgagtgacctccaatgcctagaggggtgactagcttgtaatacaccctcaataaatgttttctcaatgagcgactgaactgtggaacaaactccagctgagggtagttgtggagcggggagccaaagactttggccttaggtcatcttttaaaactcagcctcaattgtctcattggcaaaatatggataataaatgctatgacgtgtgtaaaattgctagcaatgtacctggcaagtagtagacttcaaaagactagcttccatcctatatttttccttcttatactcaagtaggaaaatatgggcaaagaatgtagttagcttgaaaatwtgggcaaagaattcttgcatgttgtgcatgaattatccgtacatttttttcggttagttgagtgtgttgggatggggagaggagaggcgagttagtggtagctatggttattagagaagggaagcaattttcagatcagtatctaatttctcagttttagtttttgaatgtgatgatgtttctgtttaggttttccaaaacttgattctttctgtttgtcaacacctggactcatggggctatcctaagtgcagaaacaacacttcagaaagaggactagaaatcaaatatatgaacactagtcttcttaaatgaaattttctgtattcttgtgcagcattatattgtgtaataagtgctaaataaaaaaatagttaacctcttttgagaagcttacagttgtttaacaaggtaaaacatagatggaaaacaattggagaccaacataagacctcgtacaatcatttttccagtggtaggatgttggccagaactgatgtgattatgaaggaaaaggttaatattggctcaagtagttggagacagcttcctggtgaagggaatgccacttcagtaacagagagacttaacatgtcctgaagactattggaaagatcacctttgttttaggaatgtttgctattgtgtacttcattgtatgaaaaagccaacataatcttgtactttcaaaaatgatctttctrttgaaaattatatgggaaatcttcagtaaaattctgcatatgcaagaaatcaatacttgtcactatgtctgtgaagtttaaagctcaggattggcgtgaaaatggtaactcttcattcttgtccacctttaacacacttgcttaaaaatgtgtcagataggccaggtgcagtggatcacacctgtaatcccagcactttgctttgggaggccaaggcaggcagatygcttgagcccaggagtttgagaccagcctggacaacatggaaaccccatctttacaaaaaaatacaaaaattaaccaggcatggtggcacgtgcctgtagtcccagctactyaggaggccaaaacgtgagaattgcttgagactgtctcagaaaaaaaaraaaaaaaaaaaaaaaaaaaaaaaaaaaaamcaagccaggcaggcacagtgactcacacctgtaatcccagcactttgggctgggaggcctaggcaggcggatcacctgaggtcaggaattggagaccagcctggccaacatggyaaaaccctgtctctactaaaaatacaaaaattagccgggcatgatcgtgggcacctgtaatcccagctactaggaaggctgaggcaggagaattgcttgaacccaggaggcagaggttgcagtgagtcaagattgtgccattgcactccagcctgggcgacagaaggagaatctgtctcaaaaaataaataaataaataaataaataaagtgtcagatggcctgccagttattytattcagttttgacaatggggtatattttatatattttttacctggagtataaggagaaaattattagtcatcagggttgagacccctcaacccgctaaattcaaaattgttacttgggagatagagaagaactgaatggaactaaactaagaagatattattaagtaagttttagttgctcatcaaaatacttaaataattccatcatgtcttaagacttttgagataagaagaaaacttggaagtggtatgttaggggaagaagaaactaataaagtgtgttttacttttctttgttttagaattgttgacatgatgcgtgaaagaaatgtatgaggaagatatgatcaaactcaactccaagtgagaaagacaagggccaatgtgactgcaagccaggaaatctctaacaattttagaatagacttcttcctgtactatatgaccagggagtgatctcaggaacatttaagaaaaagaaaggaagagatgttgatggtttgaatacctgaggatgtttagataatgattgtggtcagaatgcatccagaattctaatttgtgtcctgatgtgaatgtgaccatgtttgtttgtttgtttgtttttgttttccctttggcttgtgttctgggatttgatctctcgttagagactcttactagttctttgagttgtgtatttctttctatatcatatcggtgctcttatttcctatttttcagtagagaattttatgttctttcaaaaccaaatttctgatttatgcagcaaaaacatgatttctgatttatttaggtcaagcttcggttcaattagttcacaaaattagtgggaaaaattggttaatagatgtctctccttctcaagtacaaatgtattgtgacatattgtgatatagtaagaaagatacttgtccccagttctgactaaagaacttttaagacccttcgaatctctggaatgatgagtgtctttttctacactgctgagatgacaggtgactcttggtagaaccctagatagcttcaggatggagatgggagctggtgccagaggaaccaactatgtaattagagggttggaatttcagcttcactccagacctcyggggagaggagaggggctggaaatccagtcagtcaccagtggacaataatttaatcaatcatgcccacatcatggagccttcataaaaaccttaaattttggaaagcttctgagttggtgaatacatggaggtgctggaaggaaggcatgcccagagaggacaccccttctcccatttcttgccctgtgtacttcttcatctggctgttgatttgtgtcttttttaataccttttgtaataaactgttatatgtaagtaggcctgttgtggtggctcacacctgtaagcccagtactttgggaggccaagacaggaggataacttgagctcaggtgtttgagatcagcctgggccacgtggagagaccctgtctctacaaaaaattaaaaaagaaaaaactagccaggtgtggtggtccatgcttgtagtcctcactaccctggaggctgaggtgagaggatctcttggggccaggaggtcaaggctgcagtgagctgcgttagtgccactacgctccagcctgagtgacagagcaagaccttgtctcaaaaaaagaaaaaagataaaaaagtaagtaaatttctgttagccactatagcaaattatcaaatttgaggatggggttgtaggaacccctgatttgtagctaagtctaacagaagtgtggatatcccggggcccactatttttgactggcatctgaagtggagggcagtctcatgggactgagcccttaccctgtggcgtctgcacaaactctgggcagttagtgtcagattgagttaaatggtaaaacattctagttggtgcccctagacagagagtttcttggtgtggaaaacccatacatttggtgtcagaagtattgtgactagaggaataagttttctttacatatgtattgacaaaacttaaagacattatttgggtacatcttttaattattcaggcaaaatgaaagaattacttatgtactgtatttttgacagtgagatactgtcaaagtctgggtactttagaacaatgattgtttgatttagatttttcaagccttatgttttttkaatactagtatgtcctctgtggaatctcatatttgattgtgcacatatatccttctataaaagggtttaatatagtgggaaaaacaaacctgacaagctatgacagagagactgttttctgaaatcgagatttctagaagctgctactgtcaaatgagataacctctgagtattacttggtgacaatggggtgacatgcttagaatgctttgctacttgtatctgctgatgaccaccaaggccaagtagaaactttagatagctatatacttatgtggaacaaaagtttatgttcagggtaaacttattaggaaaaactttggtcaagatttcaagaaaacataaaataagcttctaagtgtacttcaaaagtgatgaaaataatgcagttcagagtactaggttctcaaaagttgttttcttttcattttaactgaataaaagaaaggatattggctaagtgttgkctcatgcctgtaatcccagcactttgggaggccaaggtaggasgatcacttgagccyaggagtttgagaccagcctgggcaacatgtgagaccctgtctctacaaaaaataaaaaataagctgcgtctggtggtgcrtgtctcctacttaggaggctgaggtgggaggatcctttgagcctaggaggccgaggctgcagtgagccatgattgcrttactgcactccagcttgggcaacagagcaagaccctgtctcaaaaaaataaaaaagtaataaaaaataataaaaagaaaggatgttttgtttcattgtggtaatgcccaaactgctttgatcatgtcactctctctgctccatgcttccatggattactctgccctatttgatcacgttctaaatatttgtcttggaattaattcagagactccttcattctcaccctaatattaaggtgctgtccttatcttctctatgatccagtcatattggactgattggaattccctaaatataaaagtaggaattccctactgttgtccctattctgatgttcttccttctatttcactttttgaaatcctaacaaaccttgagtgccctgacccctggctactagttttatgacattttccctcacagccccagtcagaaatgtcttgtatattttctaaaccctttagctactctttttatgctactcataattcccttatagatgcttgtctcctgtaattatttgcaagcatgcataattttctttcctatggaagatcatgctggatcttacacaattttgtagacctcacatgcctaatccaagtgcctttcatgtgggtgacacctagtaagcagttgttcattaatggttgccccataattcagtcatcccyaattcagcaataagtgataagagtgtgctgggtgtgattggacaccagataccacacaggcaggtgtatttcaggtaatctattcaactggatactttaagcttcatctttttttaggcatctccctccctacacatttggcagttttaatctttttatttttatttcaaaatttttttccctcccaaggtgctgagaggtttaatatcttaaggatatttaggagagggaaggggcgaagtgacattataaaaggaatccttgaagaaaatcagtggaggaatctacaaataaggaggccacttaatgtccactgaggactcagcacctctgtcaggacaccagggcttccttctcttcaccaatttctcccttccccctacttacccacctaatccaatctcttaagaaagaatctggaaaatgaattcctaacaagatgacttacaaaaattaccttgtcccccttatcaaaggcgttggattctatggggacagcgcattggggaccatttatgtgggctaggtcaaaggtgggcagtgcctacttctgagcatccctgcagccacattatagccactcaagtgtggctttggtcactgtctggacctttcacttttctccttgtcaaataaggtggctggactggatgaatttgaagtccatggagagcatraaatgtttatttctcttgtcctgcctaaaaggaagccagtcatggccactgggttctgtttgcctctggaccctggcctagattttccttttattacctggagtttggggtttccttgctctcagcctctccaggtatagcattcacatctagaggctgccacattccttttatctctcttcaggattatgctcataggacctatcataacaagtatattttcacttttttctttcactgtgtttgctagtattaaccccttttccccatccccatccgccattaagtagctgggatacttatctaaaaaatatagattccgcagggggcagtggctcatgcctgtaatcccagcactttgggaggccgaggcaggtggattgcttgaggccaggagtttgagaccagcctggccaacgtggcaaaaccctgtctctactaaaaataccaaaataagctaggcgtggtggtgggtgcctgtattcctagctactcgggaggctgaggcatgagaattgcttgaagctgggaggtggaggttgcagtgagcggagaccacgccattgcactccagcctgggcaacggaacaagactgtctcaaaaacaaatacacacacacacacacacacacactaacataattttatttattattatttttaaagacagagtcttgctctgctgcccaggcaggagtgcagtggcacatttatagctcactgcagctttgcactcctacgtcacgcgattcttctcctcaacctcctgagtagctagaatgacaggtgtgtgccaccatgcctggctaatttaaaaaaaattcttagagacagtgtctcactatgttgcccaggctggtcttgaactcctggcctcaagtgatcctcctgcctttgcctcagaagtgctgggattacaggcatgagcccctgtgcctggccagattcacagaattttaaaataggaaggagtttagcaatttaacctaacgtggtctttttcttattaataataaacagcaatgacaagtatttattaagcagttgccattttctaggcactgtgctgagtactttgtgcacattttttaatgtatcaacagtgaaccctgtcatatcagggagcaaaaaggcacagagaagttaagggacttaaagccatgcatgtggttattttctggtatggcagaaactcccttaaaaactgttttaaaaacaatagaatcgagagataatcctattcctatttctgtaatgtatttcttgacttttgcaacattgtattccactgcccaaccattgaactgtgccatttaacacttacacttcctaatactttaccttgtagttcaccagttttcaccaatgatgctgaacttgtttaaatagttgcatacatagcacagcatgcctataatgacattgcttatgatttgacttgtaggaatccacgaagttgttaaaattttcttagtcttaatggatgtagaagcaatgtgcaacttggtatcagtcttcttttctactcctatacttgggtttctgatggttattgtgaaaacgaaaatgattrtgtgtattggagatgtataaaaatgtatgttctccagccttagtcatgagagagttatcttacctttttctacacaatacctttttctatttcttgctgtagtttttttcaaactttcagcattttctttgagtcttttatgtcacccaggcatttctttattaaaagatgatggttagtggttagggtaggctcaaccrtcataactgaaaggcctgaaaatagatacaagctcaagcacaagtttaatttttgcttatatcatggtctttgttggtggatcactttcctttcaatgattcaggcactctggattcttccattttatgactcagcaattccttagggctttcttttcaactacagccagccagtggatggtgaaagggaaaggcaggaagcatatctactttctaaacacacacttattttttttgagatgagtctcgctctgttgcccaggttgagtgcagtgggacgatctcagctcactgcaacctctgcctcctgggcttgagcgattctcctgcctcagcctcccaagtagctgggattataggcatgtgccaccatgcccggctaatatttgtatttttagtagagatrgggttttgccatgttgaccaggctggtctcgaactcctgacctcaggcartccgcccgcctcaacctctccaagtgctgggattacaggtgtgagccactgcgcctggccttaaacacataatcttgaaatgaatgcattagttctgttcatataccattggctggaagtctgttgtgtagtgatacttagctgaaagggagattggcacatgtagtctagctgcaagtccaggaagaagagaatatgcatttttgataatgacttagctgtccccttcacagtgtccttgcattttttttttttttaagatggagtctggctctggcacccaggctggaatgcagtggcacgatcttggctcactgcaacctctgcctcctgggtttaagcctcagcctccagagtagctgggattacaggtacgtgccaccatgcctggctaatttttatatttttagtagagacaaggtttcaccatgttggccaggctggtctcgaacttgtgatttgcctgccttggcctcccaaagtgctgggatcacagacatgagccacagcacccggcccttgccttctattattctgagagaattgaaataacatgtcaaatcttaaaatttttctcctttccacatcatttttatatctgaatccatcaacycctcattaattcttgacttagaggtggttatccgaagttgatgctttcccccgtactctggatcccccattcccttcagatgccttattctatgacatttttctatgcttacctgcatgtatttatttgtttgtttgtgttggagatgctgagatgcatttcaaatatttacaagaatgctcaagattctcccattacaaaaacaaacaagaccaataaccaacattgcacctgtgccccattctgccctcttgctacatgctctctttctcctttccttcaagctgttcttccttaaagtactttttgtgcattatttttctacttcttcaccttccattccctmcacaactgttggaatctgtcttcgatctcagatgaatctctctctttttttttttcctgagacagggtcttatcctgtcactcaggctggattgcagtagcacaatcatagttcatggcagccttgaactcctgggctcaagcgatcctcctacgtcagcctyctgagtggctgggaccccaggttcaggccatcatacctgattgatttttactttttttatagagatggagccttgccatgtggcccaggctggtcttgaactcctgggcttgagcgattctccctccttagcctcccaaagtgctgggattacaggtgtgagcctggcccaactctgctcttgttatgattatgagtgtcctcttgactgacaaatcaatgagattttattayttaaaatttccatgattctgctcattctcttttctgtgaaactgagttttcactaggctactgtgacatcttctcttggattactccttatggatctctctgcaggttctttgccttgatattggaattcccagggtctgtctttagttcactctcttttctctgttgatgctttttcaacaagttcatcaatatccctgatttcagtcaatcccaagtcaacattcttgggcagacttattcgctgaactcaggcatttccacttgcatgtcccacagttgagtcaggacccataatttcttcctgctttcccatgctattcctttccttattgacaaatgccatcatcttttctctcactgcctacatcatccatccatttgtttgttaggtctatcaatcacctaatatgtgtcagcaattttccctttttttttttttgactcttgctctgttgcccaggctggagtgcagtggcatgatctyggctcattgcaacctccgcctcccaggtacaagcaattctctgcctcagcctcccgagtagctgggattacaagcacctgccaccatgcccrgctaattgttttgtatttttagtagagacggggtttcaccatcttggtcaggctggtcttgagctcctgacctcgtgatccamcaccttggcctcccaaagtgctgggatgggattacaggcgtgagccactgcgcctggcctatgtcagcaatttttctacaaataagattatagtggtgtacaaaacaaacacagtttctgttcttgtagaattatgttttagtggggaacaaagaaataataatgcttaaataaaggagagacatgagaagataagagttgtatgcatactttggatttgaataatttgggaaggcctctctgaggacttgacatttaagctgagtygtgaatgactggaaggagcttgccatgcaaagttgaggagcagagcattccaggtrgaggcagctggccccaaaacactaatagtaatcctgatttgacagacatcagaaggcaaataaatcyggaacttagtgggtaagagtgagaggtgtctgtattggtgtcctgtggctgctgtaacaaatgaccacaaacttggtggcttaaaacaacagaaatttattctttcatcattcaggatgccggaaatctgaagtcagtttcactgtgccaaaattaaggagttagcaggatgtgctcccttctgaggagtgaatatggtccttaactccttcaggttctggtggcttctggcattccttggctgtggctgcatcactccagtctctacttctgtggtcacatcattgcattctcatctgtatcaaatcaccctgtcttcttcttacaaagatgtaaagtgattacatttagggttccccctggtaattcagaataacctttccctcttaaggtcttaatttaatcacattggtgaatttttttttttccttataacattcacaggttccagggattaggatgaggatatgttgtgsgcgtcattatttaacctactgcagtgaagggcyggatcctataggtctttataatccaaggtgagatgtttagatttcattctagggtgctagaaaccattagaggattatatgcaggcaagagaaactgtgtggttttgctataaagtagtctttcttaatttcttctcactgtacctttccaagaagaaaaattaaattaaaattaattaattaaaaacttaatttctccccaacaagagagtactgcttaaatgctaagaagattttgttgggtagagttgaagtttggagggccacagacaattgtaatatgcaatattttttcacctgccaagaagcaactgtgggtgatattgctctcattgagaatacatgccatcaaagattatgctggctgctacaagtaaacagaatatgggaagtgggagttagttagtctgttttggttgcccaaccaagaacttattattgaatggacaaccattgtattaaagatagaaaaaagtggcctgggcgtggtggcttatgcctgtaatcccagcactttgggaggctgaggcgggtgaatcacatgargccaggagttcgagaccagcctggccaatatggcaaaactccatctctactaaatatmcaaaaaaaaaaaaaaaaaaaaaaaaagccgggcatggtggcacatgcctgtaatcccagctactagggaggctgaggcaggagccttgaacctgggaggtggaggttgcsgmgagccragattgtgycactgcactccagcctgggtgacagagtgagactctgtctcaaagagaaaaagcatagaaagaagtggatagattcaggatatatttttgagatagaattagttgggtgaacttgcctgctagattatttggaggaaaggaagaagaataaaagaaaggcttgcattttctatttgagagctggtccacttactgagaaggggagrgctgggagagaggcagacttgatggaagatataaagtgttctgctttggctaagtttgaagtgattattagatattcctttggagatgtcagacaactgggtgaatggggtttggagattctgagaggggtttggctgaggatacagacttaggaattatttgcatataggttatatttgatactggatggagttacctacagagaatgtatatagagagaagcaggccattgagcaactattatatagaagagaaggaggagttgccagtgggatgggatggaaagcagaagagcgtggtgtctctgaggctaagaattcaaaagatattaaaaaagasacggttctactatgttaattatagagattacatttggtgaaatgaggtcatttgtgattttgacaatttgacatatagtttaagaagaggctgggacaaagtttattggattaaattgtggaagtggagacagttcttatagacaactcttttttttttttttttttttattgmtcattcttgggtgtttctcrcagagggggatttggcagggtcayaggacaatagtggagggaaggtcagcagataaacaagtgaacaaaggtctctggttttcctaggcagaggaccctgcggccttccgcagtgtttgtgtccctgggtacttgagattagggagtggtgatgactcttaacgagcatgctgccttcaagcatctgtttaacaaagcacatcttgcaccgcccttaatccatttaaccctgagtggacacagcacatgtttcagagagcacagggttgggggtaaggtcacagatcaacaggatcccaaggcagaagaatttttcttagtacagaacaaaatgaaaagtctcccatgtctacttctttctacacagacacggcaaccatccgatttctcaatcttttccccacctttccccccsttctattccacaaaaccgccattgtcatcatggcccgttctcaatgagctgctgggcacacctcccagacggggtggtggccgggcagaggggctcctcacctcccagtaggggtggccgggcagaggcgcccctcacctcccggacggggcagctggcagggcggggggctgacccccccacctcctttccggacagggcggctggccgggcgggggtgctcctcacttcccagtaggggcggctgggcagaggcgcccctcacctcccggacggggcagctggcagggcggggggctgacccccccacctccctcccggacggggcggctggccgggcggggggctgacccccccacctccctcccggamggggcggctggccgagcgggggggctgacccccccacctccctcccagacggggcggctggccgggcgggggtctgacccccccacctccttcccggacagggcggctggcccggcagaggggctcctcacttcccagtaggggcggctgggcagaggcgcccctcacctcccggacggggcagctggcagggcggggggctgacccccccacctccctcccggacggggcggctggccgggcggggggctgacccccccacctccctcccagacagggtggctgccgggcggagacactcctcacttcccagacggggtggctgccaggcggaggggctcctcacttctcagatgggcggagggtctcctcacttctcagacggggcggccgggcagagacgctcctcacctcccagacggggtcgcggccgggcagaggcgctcctcacatcccagacggggcggcggggcagaggygctccccacatctcagacgatgggcggccgggcagagatgcttctctcttcctagatgggatggcggccgggcagagacgctcctcactttccagactgggcagccaggcagaggggctcctcacgtcccagacgatgggtggccaggcagagacgctcctcacttcccagactgggtggcggccgggcagaggctgcactcctggcactttgggaggccaaggcaggcggctgggaggtggaggttgtagcgagccgagatcacgccacctcactccagcctgggcaccattgagcactgagtgaaccagactccgtctgcaatcccggcacctctggaggccgaggctggcggatcactcgcggttaggagctggagaccagcccggccaacacagcaaaaccccgtctccaccaaaaaaatacaaaaaccagtcaggcgcggcggcgcgcacctgcaatcgcaggctgaggcaggagaatcaggcagggaggttgcagtgagccgagatggcagcagtacagtccagcttcggctmggcatcagagggagaccatggaaagagagggagagggagaccgtggggagaggggagaggggagagggagaactctttcaagaagtttcattatgaaggaaagcagagacgtggaaaagttcttggaagaggatattggtcaagggagggtttgttagaactagaggataatacagtgaatttctatgctgacaaaatgattaagtagagaagaggagctgatgaaggtaggagagagtggtgggtaattgtacaaataaaatttctgaagagccaggaaggaaggggatctagtgtacaaatagaatgattggtctttacttgaaacaggcacattttattagtaaaaggaaggactgcagagagaatgagtacagaggtggataagtcatcatttgggtggtgggaagatgaaatttttacctagttgcatctactttactttcccagtgaagtgtgatgatattggggtgtggaggggtgaaacaggtttgggaaaagagatttcaaatggctattttgaaacatcctggggaaatgtaataggattgtgggtcagtgtggattgcacattaatgatttgcagctatgaatttaaattgaggccagttgtggttgcatgttttttttcccaggcagtttcttcagctgtttgggtggagatgtgaaacaggcagatagttgggtttaactggtttgggggtttgccaagtaaaaatgaagcatgaagagaggagcaagggagttaagggtgcttggaagggagaaattacagtgatggacctaatttaattctcagctaggcagcaggagaagtgactgatagtgaagcaaatagtagggtcaatggactgaagggccagataatgccaagatggtggaatggaaattccagactacagtagataaactgaagaaagagaaggtggtgtttacagtgtagggtgcttgaggctggagtctgcggagttgatataaatagtggggatgcccaaatcagaggttatgataatgaggtagggtcaaacaaaggtcatcagaggtgaggtggttgaggaattggagccttcatgtagttgtagaaaacagcaatgatggccgggcctgtaatcccagcacttcgggaggcygaggckggtggatcacctgaggtcaggagtttgagaccagcctggctaacatggcaaaaccatggctctactaaagatacaaaaattagctgggcatggtggcacatgccygtgatcccagctacttgggaggctgaggcaggagaatcgcttgaacccgggaggtggaggttgcagtgagctgagatcacgccacttcactgcagcctgggtgacagagtgagactctgtctcaaaaacaaaaaacaaaacaaaaaagaaaactgcaatgatgaagacagatgagtctggaaagggaaataggtatgaaggtcatcagcaaataaggggaaatagcagtagttgggtagatgacagcgagaagggataatgggtggtaaagtctaatggcataaacttcagacaggtaagacttttgaaagaggatagaagagaaattggaaggtgagctggagagacacttaatccacctctaggttaggggatcttggggttatgaacagagtcgttactcaaagtgtttgacaactcatgtgaaatggtaacctgctgatgtcggtgttccatcaggagcagggttctgggggccttttgtgaagctagatgttaactctttaatctcttgatcatagctagttgtcaactggttgagaggtattttgatactttagcaactgccatagccatccttgtttatactggctgaaactagacctaagtatgagaatatagggccatgtgtggtgtctcaggcctgtaatctcagtgctttggtaggccaaatgggaggattacttgaggccaggagttctataccagccagggcaacatagtgagaccctatctctatgaaaaaaaaaaagtgataatataaccaagcttctctttatatgatatgggaaaatagtgttattagtgttcagcatctgaaattcaggttaaatcttactttctttatgttttcaaggtttagtttggtgaaaggaacactcagagaagagaatttaatggaatttgctggggatagagtttaagtaccagagggcagagtgggagggagggaggcctgggaaggtgagagatggggaagattggtcttctggtgatgactgaggaaaagagggctgtggagcatgctagggttagtcctggtgatgtcttgggggaaattgggtaggtaccatgtggcagctcctgttgcttagtggccaggggtgagcaaaagccttcttagtgtgtctgtagcctaggtcatctcctgaagacgtagtggccagttggagtataaaggcctccttggggaccagctgcccttcagtggctgatagcatgaggtgctcttagggcctcttctcagccatgatggtggtgtaaccctgggggagagggaggggtcttctgtttgaaggactaaggactgctgctcccagggagcagtcatcttagcaattctccctccaaaatggatttggacttcgtgctgtcccctctgtaatgactgtggttgtcttagtatggactctcaggagttgcgtccagtctcctgactgccctgaatccagtcttctgatttccttactcccagattcatgttcttttagtttatctgtcaagactgctctggaaaattaggaatgagagaatggtcttttaagttcaaccatggttctatctaatcctactaggaatgttatgaagatgaatgtaacatatataaattgactagcacagtccttataacacagtatgtagccaaagcatatgcttaaagccttcttgacaatcctttgtctaatgacaaagtccaaattcctttgactcgtatataagatttccagtgattcttctgccttgctctattgagtttcattgcctccttacttaggattactcattccaccctatgccctagtcagaccacaccctcttgttcttgaaaatgatgtgttgtcttataccattatgtctctgctcatagtcactctggacataatacaccttcactgttaaagttacatattgccttccctagaaacctcccctgatgcttcctgccttctctttccttcaggggtaagtaatcccttagcgccttgtccttatttttatcatttttgtttgtgttagaatgcttctctctaagccattagttttttaaaggcagaaaccagtaagtgattcatctttgtttacccatggtctaatacagtaggtgcccacaaatgtttgttgagtaaatgaaaactcactgcatatttgagtttccatattgcctttgtttggtgaaatctaaattatatattttttgcttctttcttttaacagtgcaggaaatttttctgatgaagtagtagatgagtgcagaaaaaaactgatgtccatgtagttatttaggatgggaaacagacttcatcctgtgttcttttccttctactgagtgacttttactgcttgatttatccagtgattttgctcactattgccattgttttttggtgaattgtaatcattaacgttttcagtggtacaccaaagaaatgcaaacaaatgtgattttctggttgtttaattgggcattttctggtgcccacttagaattgtgggattggggtatggagcattctagaatgttggtgaaaagtctagtcctttaggtttcttcaaatgttggtcttcttgggccaggcgcggtggctcacatctataaccgtagcactttgggaggctgaggtgggcagatcacctgaggtcaggagtttgagaccagtctggccaatatgacgaaaccttgtcactacaaaaatacaaaaactagtcgcatgtggtggcgcacaactgtaatcccagcttctctggaggctgaggtgggagaattgcttgaacttggaaggtggaggttgcagagatcacaccactgcgctccagcctgggcaacggagtgcgactctgtctcaaaaaaaaaaaaagttggtcttcttgatcctacatgaactaattaattctgtattccaaagaattaagataatgcaaatcagatggcagcagaatgaatcaagtaagagtgggaagggcaaatgtgaaatgagggggcaggagtgagtcactcttttgtgtagatggatagggaatgctggaaaggggagggtgaaggtgggttgggggctgtgggagagtctgagcaataaggagatggcgtagcatgggtaaaggtggtttgggcgacacagtggttagcaagctctgtggttagcatgttctgcatgagtgaccaagcaaggcccattttggcacttgagatgggatcactgaccctcgttccccagttctcattgtaaggttaaacaaagatgcagtgtatgctttcatattttgagattagggtatcattctagaagggacacattcttgagaaatagcttgatttctttaaaaaaaaattgactcatagactgtttccatggcattttgattttttattagtattttttcctaaggtacttagatggtgtccagagtttgtgacagagccagaaagcaactccccaccttctctgaaataaaaataaataccaagaagtactattctaaatagaggaccagaaactactcatatgggtcaaagttgtcccaatgacttgggttaactcaggccacaaacctttgctcaggcttcttacagggaatatttttaatctgccaattgacagactactagagatagaggtataaacgttggactccatgtgattagagcctgatctgaagggaaaatcctcttgcctccttctgacctctgtaacaggtaatctgtgacccagaaatagatctgcattagatgttgggcttgatatgggtttatttttgatagaacactctgaaataagagtgtccattctatttgagtgaatgtttatttgggggaaagatgctagagatatgccagaagaggccgcctgcctgtgtcttttcagggaaacaatgggatttatttccccaacctgtgagtgttaagtgtacttggttgttcagaacaaagtgctggttaggccaaagcagggttgtggcccgatggaaattggttggttgcttttgctctctcgtaacaatagtcttctatatcccaattccacgtgcaaatgtggacaatgtgtgaaaaggccagagcttattgtagatgctcagtaatgttatgtattagcagtgggagttgttggatagcagatgtatttttatgctttacttatattacctcgaattctcagtataacttgtgacaaaagagattttataaatgaggaaactaaagctcatagtcacacagctagtaagtggctaagttggaattcacccagggctgtctgtgtcttctgtctcctacactggctgcctcctgcactgaattttctcctgggtgtcattggtgtcatttgaatatgccgaggacagcagcctaggactagcaggtccctggctgtgcctataggagtagctgtgttcctgcaggcaagcactaaattatcacagggtggggagagagagggaatgttggcccccattttaggatggtctgtctcttctctgtgcatctgtggacttcctttagggcctggcacagtggaggggccccctgggtgtgttaactaaagagattctgtagttatggagttgaaatttgggaaacacccaattccaggaaggttgatcagctttgcagtttctggtttgatttgttgttgggatttccagtgttgcattaaaactgcaaatccccgaggggctgtaatgtgcaataactaaaaatgtagggcgagtttaggtgcagcttaactcaagcttaaatggttattgtgtcccatgctcaaggcaaattcattttagttagggtggagatttttctagaatgaggcagataattctgtgacattttccagttcttactcaaagattcctaataaattgtaaaggcaaagtattctttttctttttctatatgggtcttttactgtagttcattaaagatgagaaaaagttgtataacaggaaaatcactcaagtaatggtcagatgatatgggatttggtcaaatgtcagctatccatctgcatggtgctctttggaattcttttttttcaggtctctttctcttatatgcatgcacacgtatattccacatttttttctaattacaagaataattcatgcttattttagacatctagaaaataatgcacacaaggaagaaaataaaaatgattcataatactaccattcaaagatgagatttttaacattttggggtatattcgtctaaccttcacttgtgagtgtgtatgtgtgtgtatgtacatatactttaaaatagaaatatatatatatatatatacacacacacaaagatactgttttatttacttttgttctcttcataattaattttctacttgtccgttaccccatctctatccagagtgtacttaactcagaaaggattaattcctacaaggtgaagaaattctagaatgtctaacttatttaagggtgccatttatttttttagacttttctttattatgattcttttcagtatgaaaktgttgctttttcaagtcagagtgggttaaggggatgttgatggcagtcatttggcmtggtgagtgacttacgcctactgtccggtttaggtggtaaaaatggcagaaggccttggagtgccaaaggcaagggttatgggtccagcagtaccatgaaaaagggaatataggctgggcgcggtggctcacmcctgtaatcccagcactttgggaggctgaggtgggtggatcacgaggtcaggagattgagmccatcctggccaacatggtgaaacctactaaaaactactgaaaatacaaaaattagctgggcatggtggcgcatgcctgtaatcccagctatttgggagcctgatgcaggagaatcgcttgaaccagggagtcagaggttgcagttaactgagatcatgccmctgcattytagcctggcgacagarcaagactccgtctcaaaaaaaaaaaaaaaaaaaaaaagaaagaaaaagggaacatatagaagatctcaatcttttacgtaaggacattgaagtccagggaagtctgatggctttgttcaggctgagactatcgtagggtagactgacatctcaggttgctgactgcccattctgtaatctctgcagagcacttggctgccacatagtataatctgaaaaactggcagctgccagacgaatgactgaaggagtaagctcaagtgcactaggtgaggtcaggcctgaaggtcattggactgatactgaacctggcgttttgacaggaatcctattagaaatgccacttagtcacttgcctcctgactgcttcatggtaggaacagaggctcaaactatggcctgaattttttggattaagtttaagttttacttaatattatcccaattttatctcagacattatctcaaaattatttcaaaatttatggttgaagagaggctgttgagtataaattgctaatgtactctgctgaattccatcagctatgtgatttgactgagaacagtacgatcctagcccactggggtctggtgaattgcatctgctcagtcagagtgttccttgagctggaattgaaatgcatggccctttagtttccagtgtgatgccaacacttcaggcaattgacttttgctcttcagtctccaatagggggaaaattatgaaataaaatggggataggccaggcatcctcaagattcaaacccataaatataaataactgtaattaatcatatgcagtctctcttgcctgttggaaatttatactcagctgggtcaataagcttcacacagctcttaacttcctggcctgtagttggtgggaaatgytctgggtgcstcagcctttagagatgtgacctagggttcttttccaatatgggtccaaaatcagtgcaaattataatgagttgtggggtgagaaaagtcacctggaaacaaccccagcccaaggggaaatagaaatataaaaaagacttctgttggcatttaagaggctctcttagatgacactgtctgttcattgttgttagcctgttagactgagtgagatgaacagtctttcaagtatgtaagttcagtacatatttacattcaagtttatccctaaagtatttgtttccctattatagaatcttgtagattgcagttggtatttttgcctgttttctcatataatttgttaactctttccccctctcccattgtgtcctttttyctatacttgcatctactcattatgaacatggctaatggtatcctaatgaaaaagcaaccctctctctctcctgggggtcattggtgtcatttgaatatgccaaggatagcatcctatcactagcaggtccctggctgtgcctgtgcctataggagtagttgtgttcctgcaggcaagcactaaattatcacattatctctctctatctcttttttttttttttttttttttttgagacaggatctcactctgttgcccagggtggagtgcagtggtgggatctcagctcgctgtagccttgaccttccaggctctacttttactcttattaccctaaaaggcatcctctatactgcagctagggcatttcttcctttctttctgaaatataagtttcatcgtatcattgtactgattaaaattctccactgacttttttgtttgtttgtttttgagacagggtctcactttgtcacccaggttggtgtgatcgtggctcactgtaggctccaactcctgtgctcaagcaatcctcctgcctcagcctcctgagtggctgggactataggtgcatgttaccatgcccagctcattttttctattttttgtaggcacagggtctcactatgttacccaggctagtctcaaactcctgacctcaagcgatcctcccaccttggcctccccaagtgytgggattacaggcatgagccatcatgtccagcctaccccagttatcctctaacctattatttcatctttattttctcctagtaattctcactttcaaaatacttaatttttatgtttgtttacatgtttatttttgtcttttccaatccatgagagtagaggaattcccagcccctggaacagtgctggggatctgccaggtattcagtcaatcccagttgaatgtatgttacctgaaccaatgctcctcctcctgtcttcttcacttgggtaggtccttcacggatactttcctgagtatttgatggaactcttgctttggttatattctaagaaattacaattttaatctttcctttgctattggtatgttttcaataagccagttctcaaggaattttcgagttttttagaagcagcagatggatttttttggtccatttatctgcaaatatttctttaaatgcaggagagcacagaaaaatatactaattgtttctagcacagaagcagagagtgttgccatgttttttcaagataatgtggatctattcagatgaggtagaattgaaataagaattttctttttctaaggcctggactctgtgcatgtacctggtttgacattctttttttctttttcttttttcttttttgagayggagttttgctcttgttgcccaggctggagtccaatggcgtgatctcggctcactgcaacctccgcctcccrggttcaagcaattctcctgcctcagcctcccaagtagctgggattccaggcatgcaacaccacacccggatacattttttttttttttttttttktatttttagtagagacggggtttctccatattggtcgggctggtctcaaacttccaccctcaggtgatctgcctgccttggcttcccaaagtgctgggattacaggcatgagccaccgcacctagcctgacattcttaactctatgtaagaggctggggtagtttgtttcattcacagtgtgtacagcaaaatccagatgttttctagtaagctccactaacctgaaacacataaaagaagggggtaaaaagatccctgaagagttagagccagaacattgaaaaccaagtgttaaaattctagtaagtagctcctttagccttacttagagctatttacttgtatttgaaacagttaaactaacttggctctcatttttctaaccacagtggtaacaatgacgagttaatgggtgcagcacaccaacatggcacatgtatacttatgtaacaaacctgcatgttgtgtacatatatcctagaacttaaagtattaaaaaagaagtgagctcaaagataaacagggaagattatcatcagcctgatagtttggaagaagcaggaaaattgtaggaagcagagagaggaagaattcatacaggaacagactgggacctgagaccactaagtaaaggcattaatagtgttgtcactcctattattcctgaggccatcaccatatcatagcatgtacatatggatggctgtaagtcgtcaataattgaattcatggttaatattatttaagaagccaaagtgtgacttacattcttgaaatatagtattttaatccaaaagaatacagaattttttttttaactgtatactccactcagatgtaaactcttggaatgcagggatttttttgtgtgtgttctttgtttgctcagtgcctgacacatgatggatgatcagtaaataattattaaataaaaccatgaatgcaagttttaattatctaacagtgctaaataaataggacattaagataatgccacatttaatgcatgagggttgtttccccttcttcatctattgaatgaagaaaaaccataaagtaataaacttttaaagttaaaatagctttggacattttgaaggctagctcatatatagttggagtgaggatcagcaagttcaagtgatttgcctgaaatcgcagagcaagttagtggaagagacagaattacaagcgtgtctttccttccagaataccccctgatgattttcttttttaatttagagttttgggaatacaacatagagaattatatatttttgggaaagactatagagttcttttttgaaraaaagatcaatgacagcttcaaaaggaatattgagtcgaaccctttattttctctatttatgctatttaaattttagacctgtcacctctgtgctattagctctgtagtgttgataccaarcatcttatgcagaataactagactatagtacttgaatgcttttcatgagggtttgtgctagcccttttaaagaagaaaagaaatatctttttctttagtttggaaaggatgcgttattcaactgaggagagtaagatcttatgaccaagatcattttagccaaaatgactgagatagaaatacagctttcctcattatttttgcataggtgaaggaaaatgtagtatattttcttcactttttttggagtggggatggagcatttaggaaatacattgttttcacttactttaaatgggaattttgttagcagtatgaattacttcaatctgtttctctcatctgattcttatttccttgtgagtcagacatttttaggaagtgtaatcagtaagctaaatattctaatacatgattattttcactacagtacgtctcaggtttcctttttcatatatgcattgtatctgtactttggctctttgttgtagttccatttatacttgtggattattagatgtacagaggagtaaattttaaatgtaaatttcaacaggttacaggagaaaaaagactgcaggatggaaaaactagtcagcttttttcctagggatcttctctctgttaaggaaacagagtgactggtcttcccaccacagcgcacttcttgatctcttataactctcagtcaccacttatacattaaatatatgtgtagtgatgtttataatagagctgtattcaaattgagaactttcttttacaatgaactgaacaataactgaagttattgtgctataactaattattattaaaaattcagtcataatttaaaaaaataagctcaggatttcttaaaccatcttcaacagatacttccccaaatatatttctaacggcatataatgcagttgcaacaggaasttttgaaagaattggtacattttcttttctttttttttttgagatggagtcttgctttgttgcccaggctggtgtgcagtggcatgatcttggctcactaaagcctccacctcctgggttcaagtgattctcctgyctcagcctcctgagtagctgggactacaggcacccatcacaacgcctggctaatttttgtagttttagtagagatggggcttcaccatgttggccaggctggtctcgaactcctgacctcaagtgatccacccgccacggcctcccagagtgctgggattacaggcatgagccaccgtgcccggcctggactttgttttcttacraaacattttacagtatgtattcaacagccatgattgtagttactctgtaaggctttgttagttttaataaattttgagggaaggcttgatatgttttaatcttaagacagacatttaaaactctttgatttgcagcttattttatagcaaggtaaaggactttttcttttcttttctttctttctttctttctttcttttttttttttttgagacaggatctcattctatcacctgtgctggagtgcagtggtgccctcatagctcactgcagccttgaattcctgggttcaaacaatcctcccacttcagtctcctgagtaactggtactacaggcatgtgccatcatgcccagctaattaaaaagattttttctgtagagacagggtstcgcttcccaggttggtcttgaactcctggcctcaaggggtcctcctgcctgggtttctctragtctgggattatagatgttagccacccaccactccaggcctttttcttgttttgattactgaagtagattctgtaacagcatgtaaaatgtaaaaagagcgtttatgctgccaaaggaatgtcaaacattatcttaacccaataaagggttagtaaaggggcggaaagactgaaagaagcacaggactagtatggtctgtttgactaatgaacttcttttgaatgttatcaatgaatgtgtttcattgataacattcctgcctcctcaaggcagatttaaagtttttctccctgttgtgctatctccttttcatgctaagtcaaccatttcttgttagttgatataaatgcaagtttgtttaattctgtactaggcatgttatctactcagctccttaacctgacttgtgtttttacaaggggttggcatttttgtgaaggaatgcttcaagttttcacttgggagggacattttattttggggctctcagggttaccctcaattatgtatatggtaagcaaagaaggcagagatagattttaatggaatattaaagataggattgtacgactttaaacacaaatccgtgaatatatctggagtgatacagagtatatattaactttgcttttaaaatgaatttaaaatggaatacaaattcacttgcgtgcactaactatagttctttatgacttttatagcaattgtatggaaagcaaacataatagaaactattctattatgaattaagctgtggttatttgcatttaatgaatataatgagcttcattgatttcttataattctatagtgaacctcatgaaataaagaaaaagggtcaaatttgtgactatagttccagtgtgtattttagaaatggtagaaagcataagtatgttatatggcaattgccttggaaatggcatatattttgtaaaaaatcgggtcttaaataatgcatcactactagagtgcaaacgtgtatccttgtgttcctctaaggctccctccctttcaatgcattttttgttttagaggactttgtgaaataaatgctcgattaacagttatgacattattaaacttaaccccccatcacacatcagaaatcccatgtaataatgtttgcaacaaattttttataaacagagacttttaactggctcacttaaaatagttattgaccttattttctccttcttttgtaccttttacttgcattttttgaactctgcccctgaaactagctcaactcgtttcttagccagcttctcctgtcaagcttccaggctcctgccctcctttgaggctgagaagtggtcctgggccaacctcgttctcactgttggtttgcttctaaaatgatataattgacataaaggtgacccagggagactcagaattttctagctttacactatgtgaattgatataaatatagtgtttattttctttcgctttctctttgtttcmtgattttttttttttctcattcttctttatggaaatactcttcctctgctaaaattgtttactttctyttgggctggggtgggcccttctggcagtaattgcctggggaaataaatggattggaagtgaaagaacctgcccttcttggaagcaggctggccttttgatagggtgtggaagtcagggacaaagctagagtctggatgccttcccagcaatgtgtgagtgtgttgctttagcttcttccaccacagtccaaaaatttgtgtatttagaacctgaggattatgtttcacacatttctgttgacttttacttggttttttgatttatcttgcgttatcaggataatgcttttctcagtgacttcggaaaagcctttttgtttgttgtttgatatcctgttcagtgtatatattctttacaactataggttgttattgttgtgtttgtgtgtttttgcttttgatataatagagaaaaggctaaagaaggtgacggaaggataaaagtgtcttctgttttcttaggacttgatacattmacttctttccatagggattgtcttttgtgaagaacccttgggtcaatttcctgtccagtcttggcctaaatcctttttaaaagcaacaacaacaaaagaggagaattcaccttcagtttacagaatagacctcctctctgtttccagagaacaggctaatgtgcctcttctgtttgactgttttgttcatttaggtctgatagctttcaaaaagtacacttgagggctctctgtgtgtttctgtaggaatcacatgtgtaagatacaggtgtgtaagtccttctctgcttggctggggggaatgcgtttgcaggcagagtactaatcatgatccccacagtaaagtaaaacttggggaaagagtagtacatggtatgctttgattgttacttgtctgagtaagcactgtatcagcatatgtttggtgtgtctgaactatgagatacctccttcaagggaattgtacaaaacatttgttatcacattaattggaataataaaaggtttgcttgctaaaacacatctagttcaagccacccagtgatcttgacttttatagttaaaagggtgctgctgggagggaagaggcttttgagctcactccttcttctgttttactgtggacttgctgtcaagctatccatgattacagacccgtttgctaggaccttcyctgatgaggttctatatgcttattttgtaagactcatgcacttttcttcaataagtcactggatttgtatgcgagtgtgaggcctggccctctgagttgtgccttccatgggtgtgacagtgtgacacgactcaaaatagttgaaggagtgggttttgcatgcacagctacaggagcaggtggctgcacagatgaagtgtaaggagcatttgctacctttggaccacaaaaggcttaggtaaagggcttagtgattaaagggctacctctaggttacatcttggggtttttatttaatgtttgaaatgccttgtacatctggatttctcagtgtaggtgattggaagagcatggatcgcttttatttatttttaatttcttttttctttttaatttttctgggtacatagtatgtatacatatttttgggtacatgagataatttgctacaggcatgcaatgagtaacagtaatatcagggtaaatgggtatccattaccttaagcatttatttctttgtgttacgaacattctcttagttatttttaaatgtacagtaagttattgttgactgcagtcaccctgttctatcaacttccagatcttattcattctaactatgtttttatactcattaaccatccccaccccaacctcactaccatctccaacctttggtagccatcctctactctctgactctctgtctccatgagttcatttgtttttatttttagctcccacaaatgagtgagaatatgcaaaatttgtccttctgtgccttatttatttcacttaacatgatgtcctccagttttacccgtgttgttgcaaatgaaatgatctcattcttttcttttttgagacggagtctctcgctctgtcgcccaggctggagtgcagtggcgtgatctcagctcactgcaacctccacctcccaggttcacgtgattttcctcctgtctcagcctcctgagtatctgggattacaggcacccaccaccacgcctggctaatttttttgtatttttagtagagacggagtttcaccatgttggccaggctggtttcgaacttcggaactcaagtgatctgcccaccttggcatcccaaagtgctaggattacaggtgtgagccactgtgcccggcctgatctcattcttttttatggctgaatactacttcattgtgtatatgtaccacatttttgttatccatttgtctgttgatggacacttaggttgattgaaaatcttggctactgtgactagtgctgcaataaacatgggagtgcaatatgggatgcctttatgtcttgctggagaatgcatgccccgaggacagcaaggctggtcgttgaaattactcttctgtaattgatctttgagctgtactctccgcccctccattggtcatgcttgtaagggatggagagaaatatgcttacttctatgctggcataagaatcaaaaccctgagaagttctaaactaatggagagcatggggattagaaaggtaattgaggtttctatataagaaaccagaaagataggagagtttttgtaaacatgaaggtgttacaggaagggggtccccatccagatgcctagagagggttcttggatctcacacaagagttaagggtgagtccataaagtgaaagtgaaggaataaaagaatgactactccatacacacagggctgctggttgcccatttttatggttatttcttgattatatgctaaacaaggggtggcttattttacccagctcctattcaagatggagttcctctggttcacacgcctctgacaaagggacccagggcttattccacagaggagtgayaaatgtatttgcatggaatctttttctttttctttttcttttttttttaagacagggttttgctctgtcgcccaggctggagtgcagtggtatgatcatggctcattgaagccttgacctcctgggcacacatgattcctcccactttggcctcttgaatagctgaaactagaggtgtgcgccaccatgcccagctaatttttaaattttctttaatagagatggagtcttgctttgttgcccaagctggtcttgaactcctgatatcaaagaatcctcctgccttggcctcccaaattgctgggattacaggtataagccactggtccagcccatttgcatgattcttacttatgctaaatttgtattttgataagtaaggcttctggaagagagaagacagggagatgagtaggagagtgagtactttttaaagagatttcagaggccaggaagtgcgatctggttctggaataaatttgcttgtgcatagttgccttgcctatgaatgggaggaggtagaagtggtggatgcactcagggacttacatgaaataggatgtgaggagttgttctttgttaaaagtcactgtctataatgggagccctacaaggacatctaagaattcatctgagccagataagttgcagcagtcaggtacaaacaaaggtcagcaaactttgagaagtggcaaatttagtttttgtttgctagcagtaagtacattttgttgtgtagcaattacatctgtcagttctaggcaaaattttcccaagtacctattactcttgggagttttagacccaaatattcatctgtgctgttttctgagtagatgttccgtcaagatctcaaattttcttagttgcaagctgagcttctcttcttccttaaacctgcttctctttctagatcttaatattgaaatcttggggtcattttccagctgcccraactaaaaccacttattgtgttcagtctcttcctgctgcctcctgtaatcggttgtcaggtcttgtcatgctgtctaattgagtgctgtccttagacagttgtgcaaaacatcagtctctagatttgcactctttaatgttgccttaaaccaggctcttctctcacatgggatctatttcattgccctctaattggtctctctgtcttcgtaagcttcaacactaaaaatctacttgaacagtctttacagaacgttagacaaaacatcttacttccttaatctacagcctctactccccgttgccaacaggatatcayagaaatattttacttcacgtgtacacagtcttcctctctcttccctctggacttctttttaaacaccatttctagctgtacatcatctccagccaaacgagataactatttgtatgcctagaacgtaccatgatgctcccctttctccaccaattgtctttctctataacgttccctactcactcccctccaaattttttccccttcaagacccttctccaaaatcctgtcttcactgaagccttctttaattcttttagtcagagtcaatttcttgcaacattaaaatgatatagcaccttgctttttttttctatcagactataacactcagtatagcacaactagttataagacagagtgcagagttacaagacacactttgatatttaatcctacagatagattaattgcttgtgggcagttagttgataaactcacagatatatttagttgagcaccatttgtttaggttttgccaactgagctggtgttctccttgcaagaattagagctagctctggtctatgtcaatgcagcagctggtcctgagtaagcatatatgtgatttaattaaaaggctataaaacatggatttgaagctatgataaataagctaattctattttttaaaattttttcacctctggtttccttgaacatttattgcagaagttagtaaagatttgtgtatatttttggtccccttctttgctagttttctagtaaagctgttacttagaaggaaataatcttttttttttgtttgtaatcattgtgaaaacgtttctccttacaatggtaaatgggtacatgttgtccacagcatttggtttatatagttctaaatttcattctttcagcattaaaacaaagttcttttttaaattttttattttttgagacagggtcttactctgtcacccaractggagtgcagtggcgcartctcggctcactgcagtctccgcctccgaggctcaagggattctcttgcctcaggctcccgagtagctgggattacaggcgcatgccactactrccyggctaatttttgtatttttagtagagacaaggtttcagcatgttggccaggctggtcttgaactcctgacctcaaatgatctacccacctcagcctcccaaagtgctgggattacagatgtgagccaccgtgccmggccctaaaacaaaggtcttacattacctggcagaagattactagtagatactttgctagagacttcttcattgccttggagattaacccaaatgccaagggactgaacatttgggtgactttgagaatagggccttcttttgggagtgacaacaaaatatggtatagcttttggggagaagttgccttttgagaccaaaggcaggacagaaccaccagggctcaagaacataaactcagtcttgttttctcacttagtaggcagtgactttggggaaatcccccatttcctctgagctaccactgccccttttatgaaattagatgttgtgagggtgaaatgagctgatgtgtataaagaattaaaagcacagtacctgttacctagtaaataataaatggtggtgattattattgtaacattcataacaataacaacactcataatgataatcttaggaaagtcaaatgaaactggctgattcttgcctttgactttgagctagccagatgaccgtacagaaggatttgatcacagtagaaataatgagcccycaagcatacattatttttttaaattatggaaaaaggaaaactctttattgattatagttgatattattgctaactctgcaagatgacatgagaatgtagttttttgatagtattagtggctcattgggaaaatgcatgaaaatatcttcctttgcaagttttggtctctgacaaatcaaattaaaacaatactatcaggtaggcagggaacatagggacccacacatttggaaatactagcttcaaacttaactggctgaatgaacacctctgagaatgaaacattttcattgactgtgttgtatataacttccctgagttggccatgttgatgtgtggtatcctttgtgaggtcaacaatgacattatcaacaagacagaagcaatgataagtcaatcagtcacaacactcatatcctagggaccaccacactgctatgagtcaggcatgtgcgttgtttaaggtaaatagtaaatagaactaggactttattctctgtctccagttgtcagaggaacccagttagccttgagatagcatgctatctcttggctgctagggcttacattgttgtgtgataggcacccatgtgaatgtttacaacagtacattgattggtgatagtgagctatgacaaatgggtacctgctaagttagggtttttactatcccagcaacctaggatataaggttttgcctagggttgactgaatgatgaatggtggcccctagccagcatacaccaactttcctgcataatttgggaaagagaagatggttgatatagcaagggacagtaaagaagagacctccagcagcagagtacatatgcttgtgaaatattttcctagtaagaatcattaaaattttttttagagacagagtcttgttctgtctcccaggctggagtgcagtggcacaattgcagctcactacaagctcaaactcctgggctctaatcctgggaagaatcttaattaaaaagataaagtttagaatttaggagtttgtcaggaagaatgagatcagaagaaaaaaattttaaaaatgccaccacatatcagtatataatttatagtatcctaaaatgagttttctataggatcatagttatcaactatattgcaattctttatttaggatagtatgataatagatacagtttattcagtatggacccaaatatttaaccgtatcataatttatgttgagatactgtttttttagtatcctaagttaaaactaccttcataataaattgttttcttgagttgtgagctatcagtagaatgtaacrtgtgttgtccagacaggccagtgctccacccctacaaggaaatagggtagtggcttccctgtttccctgcttttgtgaatgtaaagtcttaggcaggtcaaattactcaactctagaattttttttagttgatcacacaggattatctttttacgtttaacagtaaaagcggacaaaaggatttttgatggaattttcatttttatgcaatcttcttagtttctgaaagagttaaagaataatttttaagtcctcatcaaaactttagaaaattccattatcagtccagtagtggaaaacaagtgagaggaaagaaagttaagagctaagacaatgcagaacttgagaaatattcagtggagcagagtgtggggtggctcatgtttgtaatcctagcaytttgggaagccaaggtaggagattgcttgagtccagtttgggcaacatagcaagaccttgtctctacagaaaaaaaaaaaagaagaagaaagaaagaaaaaaaaatagccatgcatggcggcatgcacttggtagtatcagctacttgggagaatcacttgcccaggagtttgattttatagtttgctatgattgagccactgcactctggcctgggtgacagagccagactcagtctctacaaaaagagagaaagaaaaaaatataaatacagagagcacaaatatacagtgagtgcttgatctggagggttttctcttaaaattttggtgtcatgcaactctggctagaagaaaactttttctgttaagttcccctaatgaaaggaattacagcaggttaaattggtcagtttgtgaaagtcttaaggcataatacctctgacttcttatctgtaaagtatactctttttttttgagacggagtctagctctgtcacccaggttggagtgcagtggcatgatctcggctcactgcaacctctgcctcctgggttcaggcgattctcctgcctcagcctcccgagtagctgggatcacaggcatccaccaccacggcctcccaaagtgctgggattacaagtgtgagccaccacgcccagccgactctttcaataatagaaatataacactgctggcttttggctgtagtgaaaacttcattagaaagggaaaaacttgggaagggagtcttaccacaatttgaattaaacacttgccaaagaacctgaagcaagctgatgtttattgtcttgttgagtgacccaagacttctttctgctggttctccttgaggagaggattaggtgttgagcaaatttacaagtatagcatgcagttttgttaaatacccaatgacatttcttttcacagttcttttgactttatactgtttaaatatcctcagttatctcttaatttgcttttctttctttaattcctgtcgaaccagaaagtaacttttatgtgatcaattcccttgtctagaattttttggctatttattttgagttgcagtatacacattsgtttgttagtaatttccttattttatgttttcttttctagtttaacatggtttcataatctacacagtgtcttattattgggatggttatgcgataactatcccaattaacttctttttgtttcttatttttctttgtaggctaagaaatggcatttcaaaaggcagtgaaagggacgattcttgttggaggaggtgctcttgcaactgttttaggactttctcagtttgctcattacagaaggaaacaagtaagtaactgtacttgtgttgattacagtatgcaacttaaatctgctaaagagctgtctatggggaatgtgtgcactaacggttttgtttagaaattacttgtgaagtttctcagtttgatctgaaagatactaatttagaacagtgccttaatgatcctggagaactgtgtgtatctccttttttaaaaagtgaatttctttttcaggaagcattatttagcctgtgttttggctctttggtttttaaaagactgcttcatttataagtgccaggatttcttcatttagactttccttgtctaattcatcgaaatgtctggataccttctatgttcctgccaaaagtttgtcttattagaaggcaggcagctgagaaaggaaatggaaaagaaaaggcccaactgaatcctggttttatttcttcaaggtttagttacttatgaagtattactttgtgttaggtaaaaatttaaatgaaggaaagccaggaaaatgagattggtaagaagtttccaaatattatgargtgttcagtttgttttctttttttttctctttaccttacaactgtgacttcccatagttcaaactgatgcccggaaataattttgctgaatggctttgttcttttcaggcttgaaatgctggcaaccaccgtagtagttagtatcagtctcttgttcccccatcccatgtcattaggacattttgtgatactagctgtgtagtgcatttctttctcaaagatgaaggtgaaggaatttggcaaacaatttgtaactgagtgattcatttttcacatttttgtggctgcctttaagccatggtttgtcttatacttcttgtttctgtttctttgtgctacaaggtggtggagccaggcgcattgcttgcaatcccatatcctgaatgaggatcactttaaaaacacatattatggccaggttcactgactcaaacctgtaatcccagcactttgggaggccagggcaggcagatcccttgagcccagaagtttgagaccagcctggacaatatggtgaarccctgtctctacaaaaaaatacaraaattagctgggcgtgatggtgtacatctgtagtcccagctactctggaggctgaggtgggaggactgcttgagcctggaaggtggaggctgtagtgagctgagatcatgccactgtacttcagcctgggtgacaaartgaaaccctgtctcaatcaatcaataaaatgcataaataaaatcacatattaggaagaattagtatgctggcctatcattaaaaaacccaacaagccaatttttatgtgattcttgctaaagatgggtgataccgaaagtcttttgattagcaatagtcttttgattagtgttagtctttttctgcattctgaactgtgaggacatcactctcaatgcatgtatgttgcagtttttattttttgaattgacacataatcattatacatattgattgggttcatagtggagttttgatacgtacaatggtattattaattcactgacttggtattgaaactcttcctcatccattgatcatgcttgatgtactatttcttttaaaagattgccttggttccttaaaagcaagtgtgaaaagatgtggcttctgctgaggctatttcagaagtgcacttctgtttgggacatgggcattaagggattagattacttctgccatctttactggtgctatctgaaatgatactgaaaaatgccgatgccaaaggtcacaatatctaatatgatgagttgttgctaaatttatatgtggtttatatcttttaaccacagtaagcatgttctacttcagagtttatagcttaaatttgtacctaggtaacactgttttatccctttttttggtttgatttctctctaataattgatcttaaagaatagaataaacagaagagactctggccccaagcagtcaagttataggtggattttattcagtaaaatcaaggcaaaataaagacctattgattcctgggacattttgtcattttatctttcctgagttagacatcctgaccaccctaatagccaaatgaaatggatagcagcagcttgaagtcatttataattttaacctgacaagttctgttgwaaaagattactacaggcatatgcaatcaatgagttgcataagaaatccaactatgtgcatttcttttctggtgattcctgtccctttaagatactgccattagcatgtatttggggggtagcaggtgcgatgtagccatagggactggcaaaaaataataataataataaaaaataaaagcaagaatgagaagaggaaacaacctattccagacattgacataaaatgaccacaggcctccattaactcagctgtcctctctcagaaaatatctgccaataagagccattctagcgggggggaattttcctgacttcaatagtcaaaaaaaaatctgccctttgagatacattaattggctacacttttgtttgtagaagctggggccttaaatgtgactaggtatgctccatttttctgcagagtgatgtttaagtattggcttgttacaggtatatttacctactgtatttttgtattttttctagtttcctaagaagattccaactgataaactgccgtttattaagaataagttagttttgaaaccccaagttcctgatgtcctagagagccacctattgactttggttctggcacattttgctgtgttcttgcatgctctgtcttcctggcccctggcttgtgccatttggtactcccaggacaaagcttcttccctgaaataaaagcaggggctatattctaaatacaaatggattgaatataaaagttggtacattgttaaaacatktttggtgatragatagtactatgagtgtttaggtgccaggtcagctcctgaaaacctttgagtcaattctgtagttaaattaccttatatatgtaaagaaaacaattgtatattctttaaaaattaattaaacataagacagattgaaattgaataagatgtggtttcacttacctttaatgcagttgcctgaatcagagccattgtaggtgggagaatagaggcctccatggagactggtgtttctgggagcaggttaggggttagaggtggtagcaatgatgcttttgtctcactctacttcatagtatggcttttcttcatacaagcatattaacaatgctattacttaggtttatcaatgatgaatagtgcccactgttgagccaagtgaactctagaggtttattatttttattttctaagggaaacaggtcagatttagaagagatagaggaatgtgagggttgttatagcctaaggagagggcaattattattattattcttttggagctgagcagcctaaatcttcaattccaaccaaggaagttgatgaggaaaggagatgaaggttggctgacttcttttgcttgtgtccacctgcagaggtttgtggccacagataacatccacattccaggccttcctcagttaagcatctgagggcttttagcgtggtcttagagtggcttcttcttcattttcttgtccccttttctttattttccacccataagcaggtgacagtttccacaaagggagcttgagttttcttctccccagaccagctgtatgccaaggaacaagagtcttagtactgcgatataagcattttaccactcaaagaaaccaaccccactgggaatggagcaagcagagacactctgtggtggtgtggagattttttagatcaagttgattgtgattcactatttagtataggttggtttaataatacacttttaattggatgaaacttggaggtcatcttatccagtctaaggtctactgaaaggaagtagcacttcatagaggagtctcctttttctaattccaggctggtgggagaatggagtagatgaagagggaaatttaaattaggaaaaggggtcatgggatacttttagaacaagtaaacctttttgagcaacagcagtagagagcattaaagtcagggctccatgaggagtcctcaggaagatgggaaggttgggatgggagtggccagggagaatgaaacaagaatagagtgggaaggagtacagggatttcacacggggctaccctagtcttttttcttttcattatagcccaacggcactgtttaacacttttttttttaagttaacatttatttcataccttctaggtcctaactggaaaaactgatgtgatgatgtaggcttttctttaacctcagtgatgtggttgatatgacaaaaatctattcgggtcagaagagtggtctttctcacataacacattctaggtttgttccttccatgacctggtctgaaggtgtggtggctttgtgagccgaggtaaaacttgagaaccactgagagctttctcaaagcccggatgtgaaaatttttttcccccctgcaccataaataggcaaggagtgagcttcagaatatgaaaatcaagatctctctctctttttttttttttttttcctgagatggagtttcrctcttgttgcccaggctggagtgccaggggcatgatctcagctcattgcaacctctgcctcytgggttcaagcgattctcctgcctcagcctcccaagtagctgggattacaagcaccctgattctaagaagatcattcctcctaaggtctctttttaatgggaggaattatcttcttagaatcagggaagtaagaaattctcattgattggtgtgccattcataagcaacggaacaaaaaggccaagagcgttatctttagagcagtctctgcagactgcctgcatctaacacctagctgtacttttcttttttgaggtatgtttccttacctttatttatttacatatttattcctttatttttgtttgacatgtcataattgtacatatttatggaatgcagaatgatatttytgtgcatgtatacaacatgtaacgatcaaatcagggtaattagcatatccattacytcaaacattgatcatttctttgtgttgtgaacattaaaaatcctctcttgtagctttttgaaaatatacactaaattattgttaaccatattcagcatatagtgttacaaagccytagaacttattccatctagctgtaactttgtgtgtattaaccaacctctccctgtcttccccctcccctcccctttccagcttttaataccaacagttctactctctatttctatgagctcaatttattttagctcctagatatgagtcagaacatgaagtatttgtctttctgtgcctgacttatttcacttaacataatgtcctccaggctcatctgtgttgttgcaaatgacaggatttcattctttttcttttttttttttttaaatagagatggggtcttgccatgttgctcaggctggtcttgaactcctgagctcaagttcacccacctcggccccaaagtgctggggatcacagacgtgagtcattgtgcccggcctatttcattctttttaataactgaatagtattccatcatgtatacatataccacattttctttattcagtcatctgttgatggacatttaggttgattccatatcttggctattgtgaacagctagttctgtatctttatagctgagtgactataggtgattttcttaaattctctcagcctcattttctcccttctatgaaatagggataacagtggtacttcctgcacaggtttattaaaaagcagtgaagcctgggagagttcctggaacataggaagctttcaaaaagtgttacctcttatgagattcccaagggatatgaatataaagtgcggttgtagtcagcaagcaagttgcycttgtcactagagatcttgcattcacggatactttgttaaaacttttgggattagtagcaaatgatatatccttcattttaggttatagaagaatggctcaaagacaggtgtaccaacactcttctgttttcctttctccttgcttccggatctgaggatgagcaagaatatcaacaccaattgttgacttaacctctctaactgttataataagttccttgaatttcccactgtttctttctttttttctatgtaggcttatatgaattatggcatacttgatttatataactgatatgttgctaaaaagttacaagaatatagttcctttgataaattaatatcagtgccatttattggaattctgtggtgaaacattctttaaaaacaggcaatattagggaaaaaagctctaactttttttgggggggataaatctgaattttcatatatcattgtagcttgaaatggaatgcaattaaactaatttcttctttcccaaagtcagtgatgttcaagcatgttgatattataataggtgttgatgacaggatcttcatgatttgcaaaatagcctctcactttgtaagagacatcaattctctatgcttgtgagtggcttaggaaatactatagttcactctgttatatgtgttaattaagggaatatgaaaaaaaaccctgataacagtgatgtgttaggtgagttgaaatacaggtaagcctatactacctttgttagtgtcagcaaaacccaggaggaaaaatatttatgctaatgagaggcaaagtgatgcatggataattaaaatcagcaggaattttgagaacgttgttttaacttgtaattgcaatctctccctctccataccttatttgtaagagctctaacgaagtagtgctttttgattagtagtaccaatgactcaaaagttttaaaggcagtagcaaaagataagattggacaagaagcaaaaaacaaaaaaaaaacaaaaaacaaaaataacaaaaaagaatgatcaactctagtcaaaataagatctaatttaggatttatttgaatagaccccaaataaagcaacatttagcttcctgaatgtgtctgttatgtgaatgtggctgggttttggtgaacctgttgtagcgtgtgtaggttataaaaaatttcagaattccaatttcttcataaaataaagataatgtaactttacttacaggcttttttctctgccaagcactaagtcratacatacaaatcagtgatcacagtacctggcacatagcaggtcttcagtatctgctttacttctttcccttcscctgaggtaggatatgaacatttgaaatagacctagccttgtcaggcataataagaaagatataacatcagagtttaaaaaaaaatagctgaacttttggttggcacacttttgcttatattgatgactaaacagataaactggtagagggtagagaaacttgaagttcaaatgagtatttgttgaagagaaatcaaaatcawaagcatagtatctaagatatgatgtcagttaggaaacaatttaatcttgtggcatctgcaggaaaaaaagaaaataaagaaacaatttaaattacaaacattccaccttagcattgcttttcagcagtttctttgtttgaatataacaatttgtttatcttttgaacacccttaacattttcgatcatttaacctcaattagaaacattcttcaggttcttgaactaaggaggatctgtgggtttgaaatcagtgtaactcttcctgaacgttgatgtagctgtagctgaaactatcacatgacacatttatttgcttgcttgcttttttttttttttttttttttttaccagattgcttttaactttgtaagtcaattcaggctactagactttcttgttctcccagagtaaacaatattctatctgcagaggcattttgcacaggtttgtaagcaatctttccactcccctccccgactttttttttgagacagtgtctcactgtgtcacccaggctggagtgcagtggcgggatctcggctcactgcaacctctgcctcccgggttcaagcaattcttcttgcctcagccccccaactagctgggattacagtcgcctgccaccacggccggctaatttttgtattttttagtagagatggggtttcgccatgttggccaggctggtcttgaacgcctgacctagggtgatccgcccgcctcggcctcccaaagagccgggattacaggcgtgagcccagtcccaatctttctctttaaaaaaaaccttaggaaatgctataaaaacgaatgttcctaaatagtctttgttttttttcctgtacctgttgatggcagaataatgttgctttttaaaaattctttccttgatggccagttgaggtggctcatgcctgtaatcccagcactttgggaggctgaggcaggtggatcacctgaagtcagaagttcgagaccagcttggccaacatggcaaagccccatctctactaaaaatacaaaaattagccgggcatggtggtggatgcctataatcccagctactcaggaggctgagacaggagaattgcttgaacctgggagrtggaggttgtagtgagccgagatcgcaccactgcactccagcctgggcaacacagtgagactgcatctcaaaacaaacaaataaacaaacaaaaacaaaacccaattctttccttgagcataactgaaactctgtaccccttgttcaacatctgctcacccaccctctgcttaccactattttactctctgcttctatgagttcgactattttaactctcatgtataagtgagatcatacagtatttgtctttcagtgtctggcttatttcacttagcataatgtcctccagggctatccatgttgtcagcaatgtcaggacttccttcttcttctttaaggctgaataatataccattttatgtttatactacatttctttattcatccatctgtttaggttgtttccatatcttggctgttgtgaatacattctgcataggatatctaacactgtagttcccacctaaatgttaaaatcaaataaaatggccatttctgatggtggaagaaggaactcatggttgagtcataagctacctgttttgcttaaagagccatcagcgttatgtcaaatgtgaaggtagaaatgtctctgcaccatggctttctagggcttgcatttgatgatctgtccttctgaggtgttgtctgtatggatttatttcctaatttttatttttgtaaatgatcatgcctcatccattcatagtccattctctattgtgtatggactgtatgcaatgtaggcgagttgtaaatcttgggttgtaaaactaagcacatgtcaaacttgtgtattaattgaagtaagctaattggtataataaccaatcctcaaagctcagtggcttatcataatgcacgtttatttgttgctcacattacagttcagtgtggataggtggggaacctatttcctgcaattacccaggaacctatgtctctttattctagtgggtctgccatgctataggggtctcaccctactggatcatttctactccactgtatgggagtgttctctggaagaaaagaaaaagttttgttaagcatttagccattacatatgtgtcttgaatttagtttctaatctggtggacaaatgagctatatttcttttgatgagaattttattgttagggttatgccaaagactrtatcattcatttgcctctcttatttagaaccctttgcatggattcctggaagaactgtttttctcttagaaatataactaaatttgtgggaatgtgtctgatatctaaagcttgatgaggattctgaataatctgtattttagataaggccagttgaaactattcttaactactctatatggttaactgttttttcagagacatgtttcatcaaagcactaaaattatgcagacagagctggaaatgttctctgaagagcatcctatcatcttccttataattttggtttttatttaacacttagcccccaaagtggggccatggcaatatctttgagttataactcacatcaggccttcgaggagtttgtgatgctattttgttgctggcatacaaaatcagtgaggttaactgtacttctataggtcactcagtgagtcaacgactgagctatgattaacgttgacagctggtgagctgctaggctgttgctaactgagcaacattgacattcattttgatttgactttgcatttcattttcaactatctattcattttaaggcctctttaaaaactttttagggatgttgtagacggaggaaactttctataaatgctttggggagagtcctttagcttccctctccccattccccatccttcagcttaatagttaaattatgtttatgctaggaaagcatcttctaggtagttttagaaatagatgatttaaatagaagttaggcgattccaattttgctttatttgttttgtaatttgtgatttcaacaaagaatttctgtaaactaattgtacaatagtgagtaccaactagaaaaatcatatttatatttgatgaaataattcacagagaaatgatgagtatgcattataaatttggccaaaatgtatttttgaacataggttaaagtgtagctgaaggccatctagattataaagcttggaaccggctggttggctcagttgggcatcattttattcacctgagagggatggggaaagagtgagccctctttaacttctggatctacttccagatgctttagggagtttattaagaaaaagtgctggctgggtgcattggctcatgcctgtaatcccagcactttaggatgccaaggcgggcagatcacctgcggtcaggagcttgaggccagcttgaccaatgtggcaaaaccccacctctactaaaaatacaaaaattagccaggtgtggtggcggggggcgcctgtaatcccagctactggggaggctaaggcaggagaatcgcacaaacccaggaggtggaagttgtgctttggagctaaggtcatgccactgcactccagcctgggcaacatggtgagactctgtctcaaatttaaaaaaaaaaagtgctatttcatagaattctgtgtgacaacttaactgcccaatgtggttggctttaggtgaggcagatgccctaggacttctgatctcactaactgccatcaacagttctgcactgctgatgccagaaaggcaggcagatctagaggcccaagtgacctatacatataggcaaagatgacctagcagagctgaggacatgagatttggagtcaaacctgggatcaaattttgattcttcgaattacttgctcaagggataactaaagatttcctcactggtcaaaagattcctcctttctatggaaagtgtgagtgacacctaaggagctaatgttaggggtgtgagctggcagcttctaggcaactaatggttctatttcttcttccttctctatctaccccaacctcagacttactctccaggttctctgactttcagtgagccatcagagttgaaaagcaagcatatattctgttttaaaaatatttgaaaacctatctcccaaatctcagctcatatagtcaattacgttgttaacttatttgaagtacatatattcagacagagccaaggggttttcctcaatttttagctataaaaagtttgataatttaagtgtttggatattttctaattgctattaaaagaacttctgtgtgatttctcaaaggaatcacagtcacttaaaatctggacagtaccttcaaggggaactagaccttcattctcagctaccccagaaggatgggctcctttttttttcttttgtgtggaccccagtggagatgacagtgtaaccattggcaactctatctacagagtgatcatgaatccctcaccgaatatgtttacactgagaaatgttgcttactctcatgtaagtgcaggaaaaaaaatgtcagtttttagaatcacaaagtgattcaggaagtgaataaaggcctttaaaacatcttaagattcactgtgaggagatgcttgttggattttccttttaggaatatataaatatggttagtcttttttagtgacaaaaagcaggaagcagtttcccttaaatcttacgattccatcgatcgactcatatattatgggagagagtgacggttgcagtctgaggtgatttgcatgagaccctactttatactccaattattactgtacatgattacaggacaacctggttgttaattgcctgtggtctttaaatatgcacttctttcagaaatagacactaattattagatcttgtttttggtctcacccgaagttgtaaatgtctaggatttttttttttttaatttgcaagtctaatgatatacagacatagtaaaactgatctcattctgaatcctgttcagggtgaacgttctctgggatgtaaactatcaaagattgtgaacttggctttcagttctttgtaggtgttcatgtgagtctcttgacaaaacctgtatgtttgctatcagaatgctgaaggaattttatctttctaaaatatagatgaaaattggtaaacaagttgaaaaaaatctacttctcccataattaaatataatagaaataacatcaaagtattattacatattagatattctcccaattccaccaagataaaaattttgtgtttgggagctgtggttggaattatgctaggaaaaaggcagtttgttttgtgtgttgggctctcctcttttctggcttcaatggctgaattagggaattgatcctgaatttgatagagctgcagttgttcctgtctttaagccaaggttggtgaactcatgtgtctacaggggatagagtgatgaggtacaagtgtgaagccagtgagcaggaatcctggactaacaagagtgcacaagccttgcctaaggatggcagctgctactcagttttagcagatttatctcagatagaaattctgatttagatgtgaaatatagcaatttaaaaatattggatgtatgatttggtttttaagaaagtagtgtgctaagcagagaaaacattctagtgcgacttctagttttaacacatgctcttcccacttcctttcctggtttttgtcacccagctaatgcctattactttttctctacttgatttagctgcatgttccaagaagccttcttgggtctgtataagaggtgcctcctgtggctcttgtagcctcttttctatgcctatatccacttttaaacaatgttataattgcttctttatctttttgttttgttccctgggctatagaatccttgaaggcctccacaaaatactgattggatgaataagtttgatgaataaatgatggtgggcccagggtttcctcaggacatagagttttttccttccttcttccttccttccttccttccttccttccttccyycctccctycctccctccctccctccctcgctcccttccctccctcccttccctcctctcccctccgctccccttccttcctcccctccccttccctctttcctgtttcctcccctcccctcccttcctcttccctcccttccttccttccttcccctcccctcccctccttccttcactaccctccttccttctctcccctcccctcctttcttccctcccactaccccctctccctgacgcagggtttcggtctcccagttaatatagggcctatggccattccaaggcttctcctagaacctccagatcaatccttcaataaaatctgtatcccaaattcctgtgtaatcaaactgccttagaaaggagggtgaacaaagggagggcaggtctaggaagatttggaacccaaagccctcttgtcttaaagtgtgttgttacctgttttattcttgctgcttttctcctttttatttcccctcaatcaacatattctaggaaaggtagagtgcagatgtgtttttgtgactcaaaaccatatgaagccaaaatgagtctttttcctgtcataattataagtagggccttaggctgtgtttactgcctctaaaataaacgtggtacttagcttytcagttgcaacacttcccagcttttatggaaaaaaaaaaaaaacaaaaataaaatgttattttaaaaagtagtgtcagaaagtaaataaattacccttaatagtgctgtatgttttaaaaaaatattttggagggactgttcagtaaaaccttcaaaacaaaactataccaaacaaactactttctagatttggcagctggtcatatctcactctattataactagtcagtctactttttaaatttttttctcaaattatgtgtggtgtcagagtggtatagtagtgtaacacctagtctctgttgccaggctaagttcagttttcagctctaccatgaacccgctgtgtacttagggaccaattgcttaacttctgtatgtctcagatagttctgtaaaatgaagatcttagtagtacctaactcataaagttattgtgaggattaaatgagtagaaaaaaagcaaaacccttaaaataatgtctggcacataaatgctctttacataattcacttattttttgttaagtcaagtgtattgaggtataatttgtagtataaagtgcagtaaaatttaccctttataatttacaattctatgagttttgataagtttataaaatttaccctttataatttacaattctatgagttttgatacagttatgtaatgagcactgtgatcaagctgtagaacattcctatcagcctcaccattctttcatgccctttgtagtcagtccttgtacccccattcccagaccctggcaaccactgatctgttttcagattctgtgctttgcttgtacagaacatgatataaacagaagcactggaatcatgtagtatgtagacttctgaatctggcttcttttgcttagtacagggattagtagacttttctgtaaagaggcagagagtaaatgtttaaggcttgcagtccatatagtctctgatgcaactattcagctctgctattatagtcatggacaacacataaatgattggatgtggctatcttccagtgaaactttgtttacaacaacagggagcagccagatttgggctgaagaccataatttgctgacccctgatttagcatattgcatttgaagttcattcgtgttgctgtgtgtagcagtagcttgttctcttttatttccgtttattattccattgcttacacagtttgtttagtcattcaccaggtaaaggatgttttagtttttttttccagttgaggacgattatgaataaagccattgtaaatttttgcctacaggcttctgtatgaacacagattttcatttcttttgggtaactatccaggagagggattgcttggttgtgtagtgtgtgtttacctttataagacactcctggccaggcacggtggctcacacctgtaatcccagcactttgggagcccgaggctggtggatcacgagggcaggagttcaagaccagcctggccaagatagtgaaacctgtcactactaaaactataaaaattagccaggcgtggtggcaggcrccwgtaatcccagctactcaggaggctgaggcaggagaatcgcttgaacccgggtgacaraggttggagtgagccgagattgtgcccctgcactccagcctgagtgacagagtgagactccatytaaaaaaaaaaaaaaagacactcccaaactgttttccaaaatagctgtataattttgcatttctrtaagcagtgtaagagagtttcaattgtgttgcatyctcaccascacttggtattccctcccyacctttttttttttttttttttttttttgagacagaatatcctctgtcacctaggctggagtgcagtggtgtgatctcggctcactgcagcctccttctcctggattcaagagattctcctatctcagcctcctgagtagctggaactataggcgtrtgccaccatgcccrgctaatttttgtatttttagtagagatgggttttgacacattggccaggctgatcttgaactcctgacctcaggtgatcctcctgctttggtctcccaaagtgctgggagtgagccactgcacctggcctttttttttttttttcttttttttaaattttaaccattgtaaaagaccatgaagattcttggaaacctgaataaagctatattcagttggaagctcttgaagggttttatacatggaaatgacattatttgggtttttaaatgatcactccggttgtaatataraaaatgatatggaaggaggctgggtaaatgtgtgaaggcctttgggagaatatcatgttagtataggggagagggaagataccttgatttgagaggtagcagtggagatgaagtgactagatatggaaatgttttagaagatggaactgataaactcagtgattgagcagatataggacttaagagacggggagctctcaaggttgtttccacatttctggcaccagcaactacatttataatgacacccttactgagatgaggaacattgacagagaaaaaggtttgagaagataaagtaattgggtcaattttgagatatatgtaagacatccaaatggaggtctcaagtaggcagtgtgagatctgggttcctgaatggtggaacaaaattagaaattattgtggtataaaggatatttgatgatatggggtacataagattttctctctctctcttactgtctgttgagtttagtgatttgaggagagtgaattggatagacctaagaggaaatttggtgtttaattttgggcagtagagtgactcacaaaggaagctaagagagagtggttcaaagaggctggagagagagagagttgtcccccagatgcccmggtgagtgaacaatcatttgtgcatttattggatttggtggcatagttggcatttagtcagttttgtggttgttggtagtggttggatgtatgtgaaaattcaaattagggtgagtgtgaggagtaaggagtgaggcagtagaaaaaaaacaagatttacaggtctatcgggaatttttaggatagttgttagagatayatgtaagaggtgtttattattgttgagactgagataggttagagcttggtgatgagaaggacaagggagggagtgaatataggagaaactgttgttaatggaatgagatcctcacacactagtgatgcctttcagatccagcaaacttgatgaagggaaaactcagtcaagattaatgttcacagttagagtagaatagaggacttttagtattaccaagttctaatgaactatatcataatatggtctttaaacttatttctcaagtatttctcgaaaacttaccaagcagaaaatgtcagcaatctttctgatgtgtgaaaatgctctggcggtttagtcacttgtcagtctcatgtccaagtcctacccatctgtcctggcgcaattgaaaccctcaaatgaaagactctccctccctcatctgaatggccatagcctggtgtttttttccctctagggtggcatttattctttctatgtacttgttatatatatgtatgtgtgtrtgtgtgtgtgtgtgtgtgtgtgtgtrtataatttttttcctcattagatggaaggcaaagaccataattgaaatatgttaatgttctctgtagtacctrctggttacatttatttagttaacaaactaaatgtatataaaggtaaaaaatagggacatggttattagcagataattaaaagaagctatatgaaaaataagatttttgtggtttggtgtcagaatttgtagcctgataataagtttttgtttttatgaaatttagtaaaacatgttttgaaagttcctaatcatatgtgactaaaagatcaaattatttaacagagtgataacagcaacaactctggtggttactttgtcatttaccagtgactttcagattattattccattcagactgaggataatccaaagatacaaggagaaatcacagggatttttgtcaccattttacaagtgaagaaaccagagataatgagtcaacagttacattgctggtaaccaggtgctaaatcccaggctgggatcttctgatcctaatgtgggtttctttcagtttacccaatggcttctagatttactttcatagaaatccaattggcctgataataattaaatgcaactgcagggggtaagtgggtttcctttatttgaatgaatttaaaaaatcacttattttgggtgattaggataatctcttggtaacgcctgagattacctcctcttgcacatgctttggcctgttggcctagagcttcaaatggggctcctgcagcagaatgggaaaaacaccaccatcatggattgcaatgatgctgtgatttgaagaaaagaaaatggaagtcacatatctgtggaatactaatagagcaatgctggccagtactgtttgctatagtgaacaaacctagtattagcattttggaaaaaaaccaaacaccattttcctgggtttctgactctgccttctggcaactacttatttttaaagtccaggatcattttttatttaggatgaaaagctacattctttaagaaactagaaatatggaaggtcattattttttaggaggactatgtcagggcctttaattatattattgttgaagtttcataaaaactgtaataatgggctgggtgcagtggctcatgcctgtaatctcagcagtttggaaggccgaggcagatggattgcttgattgattctaggagttcgagaccacgctgggcaacatggtgaaaccycatctcttcaaaaaatacgaaaatcagccaggcttggtggcgcacacctgtagtcccagctactctgtaggctgaggtggcagattcacctgaacgtggggaggatgaggttgcagtaagctgtgatagtgccaccgcaccccaggctgggcaacagaatgaagccccatatcaaaaaaatccaacaaactgtaatggtatatttatattactttcaatgtatagaatctatggttttatattaaaatatttagtatggaagtctttgactaaatttttctgaaaaatataattctcattaaacatagctcattatttagtaccttctgttaaataaattctttttaattgtactgactttaacttatgtacccccaaactctagaatatagttttgtcaggagaactgaggaatgaagaatgtatacttctgagaaagtgtggaaagacatgaagtcctttttcctcctccttcaccactttaatatgtcatctgaatgaattgctagtactgggtaaaaaaatctccttatgttcccttataaattgccttagataaggtatttgggaattgctatacagtgttgtgaataattgaacttggctgtatatgaagcagttgagacattgaatctgaaaccaggtgtcctatggctaaatagttgtgattcatgaaaagaaatacaccgagaaatgtaaggattgttttcccccaaggcagttggtcctrtaactctatgtggactgtggactctctttagctcttatattccttatttctattagaaatttccttttagtatattgtaaaatttgttaaattgacattccaaatggacaactgaaagtgatctgcttttacatcagatgaacctggcctatgttaaagcagcagactgcatttcagaaccagttaacagggagcctccttccagagaagctcagctactgactttgcaaaacacatctgaatttgatatccttgttattggaggaggagcaacaggaagtggctgtgcgctagatgctgtcaccagaggtaagtcttttttttttttattttaattttaagttctggggtacatgtgcaggatgtgcaggtttgttacataggtaagtgtgtgccatggtggtttgctgcacctatcaacccatcacctaggtacaagctcagcatgcattagctatttatcctgatgctctccctccccctgccccaccccaaaggccccagtgtgtgttgttcccctccatgtgtccatgtgttcccattgttcagctcagaggtaagtcttgatgtggataacacttcatcctttctcccagtaaatacacaatatgcagtctatagtagtgaggacacatttctctcttgtttccagattttccatccttaatgaagcaccttcacagtttttgaaatataggcactgcacaactttaaaatgaaatataactcatttcacttcaatgaatttgtttaaaaagaaaactatattttatgagtttatattttatgagtttattaatttgttctggttttttttaaagcacatatttatatttatataaaataaaaacatttttatatcacttgaaatcacatatcagtcaatggtagaaaaatttattaagctgaagtaatttattaaaataattatctttgttcatgtatctcttaaaatcatctcttccagtgaaatatggactgcagtttgcgaaactttagttcatgcgaataaataatggaaaatatcactaatctatagttctgtctcagtcattctgtctattagtggaaaggcatgatgaaaatggaaacgagacatgtaatgaaagaaattttagtatagaacaccaatgctcttggatatgttgtgtttaataaaatactatgtttgttttggctgtgggtattagcgtggaatttggagtcagggaaatctgggtacttatcctggcttaacttctttaacagatgtgtatgtgttggkggacggggggcaaagcacttaatttgtctaaggttccttgtctttcaaatgaggaaaaaataccttctctgaatgattgttgtgagagttacatgttaatcatgaagagacttagaacggtgcttgtcacacaaagtagcagctcagtaaattatagatagtattatagctactattactaacatgaatgtaaaagactttcagaaccaattgtcttggagaaggactccactgtggtatcctcagatgtctcgaattgggtaggatactgctgcaaggaattttgactgtggaatattttggttgctatataaagttcaatatttattatattttaacactgaatgggaatgatttattagatggaataattcttctcagatcaattaaattactactgcagccactcttgatttagttactttatgtacctggcagaatctactcttatggaaatgaaatgaatttaatgaggtctacacacacacacacaaaagtaccctagatgactgatttcacaggatccacactcaggttttggtccatgcagacctcacagcctaagttgtttttgtcaatgctaaataatggcaagttcaaaatacaggcacaggaagtctactctgttacaaagttgaccccaattttcataaaattttctgtctccaaccatgaaatataatttgagccagattaaccttgatacactaaggcctaaaggaagaacagtttgagaatagtttttgagaatagataatttgaattcagcttttttccccttgaaggcctgggaaagaaggtggaaagaggggacacattcccaacataatgggaggtcttgtttggaactacccctccaagaaattagaatttactaggtgataattttgtatatcaaagaggatcatttccccagtaggattcaggaaagtgtatttcttggtatctgcaggcattttcatgctatgcactaaaatatgtagccattctttttattttagttttacaaatatatgctgagtgcctgctgtctgcatggcgatatgcaaggtgctacaatgagcatacaaagatgatagagttggtaccgttagtgtgcccacagttctatagtgcttgtttgcacagaccacattacatgatagagaatatgtgagccttttaaaaggctcagggccattacggacactgaaacatgagggtagtcatatctacatagaatggtcaggagtgggaaactttacttatgctgtttggcataggtaacattttaataggcaaacattrcttgctcaaagtgttccagtctgagaaaatgtgcaggaggaacagcgtggaatcagtgtatgtgggagacagcatgtgttgtaatttggagcattgaggctatatatgaragaacacatgagagaagagtggaaaggcagggctgggtctggtatgctaggggaaagcctttgggctttattgaatagatcacttggagatactgccttaggtttggtgatggggaatggatacacgatactgaaggaacagtcataagcataggctttcaagagatgtggagaaaaagaaaatagaaaggaggtaacttgatggtgtggtaggatataaagaagggagacagtatgtttcacggatttttttccttttttctttttataaagataagagtaatctgaatatttctgtagactcaggggagaaaagtcagtgctaggggagaagaaccttaatatgcaagtattaggttgtcattacttttaaatgtcatgtaccaacctaatagtagaaggcaaacataaggaacaaggtcttgtgaaaatacaaggaaagagatatcagagatgtatcttggttttagcaggaaggtaagagacttgtttctcagggatagaaacaaagggtaaattctaagacataaagagtttgtgtgagtatgaagagctactcttaaacaaatacgaggtgagatgttctacttatgggtgggagtaagggatgtcattgcagagaatgtgacaggaaaataggggtttctttgctgttagaaaattttaatttattatccacatgagacatttatgtgtgtatatatgtgtgtgtttgtgtgtccagtattactgagagtagaggtacagaaaatagaaagtcacatagaatctggagttgagaactgagtggatatcaatgatgaaaagaaaaaatgagacaagattctatgaaaacagaggaaattgttgaaatgtaggcctggagctgataaggggtcatgaagttacaaagccaggcttccctggaagagttaaaggtcagattgcaagacttcaagtgcagtaataataaggcaatcactaagtgacttttattctttttcaccttctgaaaagtcttactatatttgcctttgtgcactttgtatatttatagtttttaaaaaaatagacaagattgtatttcttttttgcagtgtgtwtctttcaaatagtagtgtgtttatatcaatctttacatttatatagtattcatgatttttaatgggaaaattccattttatttattttcatttaataactttatggaaaaactcattgcaatgatgttcttattaattattctttaggttgtttttgggtggttttttttttttctatttaaaacaatgctatttgtcaatcaagttctgaaccagctctgagaatagtaagactagtaagatgtggccttgatttcaaggaacaacttagcagtttattactatttattgaacaaatamactttttcttctggcagtgaagggcattctgtagtgatcaaggtattagctagtatattagcagatgattgtgggtgatgatagttgtggtggtgatgataaggatgacaattttgaatagttaagagtttccagagcctgaaagttgatcaggtttttaatttttacagttaacagtagctaagaaaacgatgtatttttaatatatcttggcatattaattgtggtcttaaaataattgcctgtcttattttatatatgtggaattatgatttataaaaaggatgggcaaactttagcttgtatttctcttattatgctggtagccctctgggagtagcatttataattaaaatttataaagagatggctgaaggtaatctatatttatccttttactacaattcctgatcatatcagtggccctctgaagtgtgaaataatcatgggcatttggttaatgaattgtgcattgttgctgttcattcatggaatttgctcttttatcatatttgatgcttcacttaacaacaaattttgctttctctgcatttgatatgtttttaccaaattattcctgattgtatccattaatctttagtcacatttgacaaaaataaattactgtgatcttttaaagttaccagtaataattagatttttcaggacatcaaagttttggggggaaccactagatgttaaaggacttgtacaaaaatgtttgcatgagctttttgataaaatactgtgcccaaatgcaattttagtaatggataaacaaagactatagaggacagacaaaaagtcatggagtcttcataatgaacatttatttgcattcttatcatctgcattttcttgggaatcaattttcatttgtttcatttgggaatattattttataaacacaatatgcagacttctcctcacgttctcctgcaggtctctaggatcaatagaaattgcttcactctttaacacctctgtgtcccgttctaggacagaagcatgtcccaaaagcccagttgtgggcactttgctcccaaaggaagctggaaaaggagaatctgttaaatatattcactcccacaggttcttcaaggtgttctctttagctttttatgttcttttatgtaactttacctgtatgtatctgggattatctagtacatttttggtttaaaatctgatgtatttgcattcttggtgggcctgtagaaaataaaataagatctgatgtataaaatttaacctttatgtcttcagttcaaattccagagaagactgcctctttctggaggaaaatattaattgtagttctcttgtttacaaatggagacttttataaatggtatttggctagcaattcttgaattcccactataattcctaaggcagtatagcgcagtgattaaggacacatattatggaattagaatgaacttgggtcatgtcttggcttcattgcttactacctctgtgaccttcgacaagtggcttaaccttacagagagccttaagtttctcaggcataaatggaggataataataacattcttctctataaataaacatttgggaaaggaaggagrtgtgtgcattgtaggataaatgcagaaaagggagagccttggagatagtgcattctgagaattatggtctccacccatccaccatgaaggtaggagaaaattctacttcagaaggtagaattgcaggaagtaaaagtttgctctttgctggacacagctaattagactagattgcaaatttctcttaaaattaatctggagatttaacataattttaattaatgtagtgctttcctttggccagggtcagcggaatcgacttaagaaactgtaaaactttaagaagagaactacgcctgtgagatttactagactgattttgaaaaagactactgataagggaagtagagacctatcagatactaaagtgtattctaaaactactgtaattaaaataatctggtaaaggaacagagaatcagtcatggagtctataaattagtctatcagtctttaaatacatgaagtttagaatatggtaaaggcagcatttcaaaactgtcatcattagttacttaataaatgatgttggggtatccactccccccgatttatatatatgcatgtgtgtgtgtgtgtgtgtgtctgtgtatgtatgcatgcatatatattctgttttatcatattccatgtgaatcaaggatgtaactttaaaacatcataaaactattagaagcaggtatatgtaaatttttttwaaaaatkgggtaggaaaggtgtttttaagtatgacagcaaaaagccataaaggaaaagcctgcttttgattttataaaaattaaaatgtatccatggcaaaagatgtaaaagcaaaaaggtgaaatttgggaaatatttacaaaatagcaaacagacagggtttatctcaggtttttatttcaagttttgttttgttttgtttttggagacagagtctcactctattacccaggctggagtgcagtggctccatcatagctcactgcagactcaacctcctgggttcaagagaccctaccacctcagcctcctgagtagctggatctaaaagtgtgtgccaccaggcctgatgagtttttaaattttttgtagagatgaggtcttgctgcattgccaggctggtctagaactcctgagatcaagtggttctcccaccttggcctcccaaagtgttgggattacaggcaggagcctctgtgcctggccattctgcacttttctaaatccttttgttatgttatatctgtgataaatagtatatagctagattatatttatttgttttatttctttttacacttaatagactatgtcttttaatcagtaaatggaatccatttacatttttttttattccatgtgcatttgctttgtattttttttaatctttcatgctttttattttgcttcttttcccccttttctgcccttattagatcagttttgtttcatgctctttttccataccctcaactctgtaagtatagtaatgaccatgagagacttttcttggaaccaaaagactmctgcccttgttgattttggggaccttgcagactagctgctgagacaagtggtgccttggctgtggtgctggtgccaaggctgtgtctgtctttctgcttcctgggcccagagagtggtcaagagaagcttgtcaacctccttgcacaagaggcagagactttcttcagtcccagcaatcaaatgctcctctggcttttttacctttccttgtaatggatatttatattcctcttacccttttggaactgagatcttgattgcctttgcccatttttagaccttgaacctagcaagagagaagcttttggtctaaacattctgctctgagtttctgttacatttcaagtccattgagttttaatcttatttttgagtcaattatgtcctttaaaatatatgcatatataattttctgtgtttttaagaagaagaagagttcaaagctgagcttacaatgtcatacgggtcagaattttatttataacaatatttataatggcaaaaaattggagtctggcttaataaattggatattcagttattgaaaagagatagatgtataagtatttacagggaaaatggctaagatgtgttacaaattttaaaaaagcaagttgtgaagaatgagtgctaatttttatttgtttttaaagcgagatggtatcagatagtgttctttagtaagcataaaaaagtttctgataaaatatataagacagttttaatagttaacattgtttacctgtggattttgtaactaggaaaccaggaggccattagtatagttttttacatcattatctttttttgcctttctatattatttggatattcttcctctctttgaacattgggtatgtttgataataccaaagtaaaaataaaacgcaacagcagcaactcccttattcctcaaaattgtgttattgcaattgttacagcctagtacagttttgtgactccataatcatgtgtgtacttaacaaacattaaagtatgttaatgatgtgttctaacaacatcatatctctattaatctgttttctaatatatctgttttctaatataaacatagaaataaataaccaactcaatatcatatatttatataaaatgctaatattcacttttggaaaataccaggccaaagcattgtatcgtgatcgtgaggattaacaagtcaggattactttgcagctttacaagaggataatattttagaggaattgatccttcccataaaatgttcagccttcgggttagtcccttttcttattaatggcaatggctgtctgaaatccaaagttaagtgcccaaagcttttctaaagaaagataaactcacctttaaaaaaaaaaactatattatttttcctacatgcagcatgtggctttaatacctgttcttatggtgctaacatacaaagcatcttaaattttttgattttttgtgctattatcttggtgtctctgatacttatttcagagtgattattctcacctttctatttagaaatatcttaatagtgacatttcttaaaatttrttctaatgatataattaaagatacaaggagtttaaatgaaaatataatcttgcagcactatctgtaatagtgaaacaatgggataatccaaatattcaaaaataagaaattgaataaattattaaaattaatagaatattatccacatgttaaaaatgaaattatagaaaaatatttattgacatgggtaagtgtttacaataaacagtgttaaatgaaaaaaattaaatcaaatataccatatgatcctatttttacaaaaatgtacatatgtgattatatacatgcatagaaaatgtgaacgtttaaatacccaaatgtcaactgtggttatctctgagtggtgtgattacaggagagttttattttattctctttgcttatctgcatttattatattgagcatgttttcatgcataataagataatcagtaaaaggtattaaaatatacttctgttctatttcatgttgtgaaagttaaatgtcgtaccatttttcctcttagattgtaattatccttctatattcatccaactgttttgatccatgaattggtttagttggaagtaattagaaattctcactcaggtcagaaaagacaaagctgtaaagagctgtgttagttcataactcttgccccacctagaagatacaatttcagtttgctaacagatgagatgataaatggaatatagatttcaagttgactttattcttctactctaactaatcttgttattctgcctaagatttcaggtaatgttactccaaatattagtattttattactgtcgcaaaattccccagactacctactaaaagtaatcaataataaaaacaaagccttaaataatgatactaccactcccactaaatgttctgtttcatcttaatagagatacagcttattgctttccataaaaagtagctgctaacaagaaaaaagaaaaagaaaaacaaacttactataaaatcttgaactaatttagtgaattaccttcactacatagagaggccagcccttccctgcctgtaatgtaaggaggtcactctttctactttgagggaagatctctccccagcctcctcaaatccatagtaaggagtagtttcttgaatcctgggtgcattattttttatgcccttcaggcttaattattttacctaagaacacaaaatgctagcattgaatatcacttaatactattcactatctgagaagataaaacacctccctcttttcacttccttgctttatacttaacataccagaaaactgaactcttaatttgatttcagtaatttttgaggtgaggaaacaatttggatttttgagaattgaaacagaaagggacagattagataacagaaccacagaagaacctcaaaaggcttttaaaaatgttattgtcttcattgcagttggttggttggttaattagttaagaaatagttgagttgcagctatgacttctaataatgtcttgattttattttcctcctttctacttctcattcaacaaaaatgagagatttaaaacatttagcatataatagcagttgaaaattaaagaaaatttttagagttttttgtggtttggaaaactttcagtaatacttttatgttacatggcattttaatatatcaatttagctataactttggaaactaaaattttaagtttttgctctggaaggagcagtatcgtttctttccagaaattctggtgggtaacttgataatttgacactagaaataatgggacaagaaaaacagcctggtttgacagagaggcccattttaacttttgttggtattcactagggtttctcacataagtacatgtgataacttttaaaatgtccaatactggaaaaagcagttttgagagctttaaagtgttagctctcacttaaatatcctgaaatatcctcctgagatggcttgctaattcctagagtagttccctgcctcacactctgtcaatttgggaaattaaaaaaaaaaaaaatccatcctgacaacacagcccataaaattttctctttatatcacccttcaataccatctctgccttctgaggccggattcttcattgccccaactcctgttatatgacactggtcctccaaaaggtctcctgcctccagtcctacctctacccctcattcctgcagtcagattaatcttttctgaaccttaatctgatttctcagctgaaaacattttgatagttctcctgacagtcagcataatagtatttctcaaaacaatatctgaggacttctagaaaaaatttaaatgttattccttttttataataataaattaacaagcacaccctggttccccagaatggatagcttgtaactgtgtaaaatactaaaaatactaatattagtgcttgcctgtgcatgctacatcttttttttttttcttgagacggagtctcactgtatcacctaggctggagtgcaatggcacgatctcggctcactgcaacctcygcctcctgggttcaagcgattctcctgcctcagcctcctgagtagctgggattacaggcatgcaccaccgtgcctgacaaattttttttttaagtagagatggggttttgccaggttgaccaggctggtctygaactcctgacctcaagtgatcctcccacccctcccaaagtgctgggattacagtcatgagccactgtgcccagccactttttctttttcttttctttttttttttttgagatagggtctcattctgtcattcaggctgaagtgcagcagtgcaatcttggctcactgcaacttctgtcttttgggctcaagccgattctcccacctcagcctcccaagtagctgagaaaacaggcacatgccactatgcccggctaatttttgtattttttggttgatacaggrttttgtcatgatgtctaggctggtcttgaactcctgggctcaagtgatcatcctcccgccttggcttccaaagtgctaggattatgtgagccactcacacctggccacatcttgtttttttctgatgaaacatttgtttcttaaactgatccaggacacatagctstgttctcagaggcatcttccttttgaggagatccagatattacttacttgtgagaaacagtggttaacaggacaagatccaaatacctgaatgtgtaagaagagccctctgagatctgccttgcccattctttgtacctgcactccaacccctgagtgacaagcagcccctggataagctaggccacatgaagcgtttgccttctctttcttaagctgggctttgtcgatgatctttccctttcttcactccacctgccctgaacacgtacttctctgtagacttttctttcctgatgactccatccccaggtacaaggaaaactcccatctctcccatcttggctatagttaatcttcacacagggaattgtgtcactacaaaactatccccaaaacttggtggcgtaaaacaacaattatcatcagccagtttcagtaagtcaggaatctgggtgagccttagctgggtactgtggctctgcatccctcatagtggacagtgctttctaataactcgcatggttgttggactgaggtctctgttcctcaccacctgttgaccaggagcctccctttgttccttaactcacaacatgacagcttgctttaccagagcaagcaagcaggagggcaatagagaatactggaaagagagagagcacttcccagtctttaatgacctaatcacagtagtggcacatcacctgctcattagaagaaaggtgctagtctagcccacactccagggcagggggtgacatactatgcagttgggattactggagactgtctaagtagtctgtctaccatagcctgtaggataccttagggtaggtatccctaaggataggcccaggtgaggaagctgtgggctgtgggggaggctgcttgtcctctctcaaccttgtttccctgcctctcatggtgtgggcatcttgatgccatgacagtgattccagggtttaaagagaggtatattttaaataatctggctcttaaatatcatttgaaagtcaactccctcgtctgatcttcagctgaagaaaaaatggtctattttagtgctagaagaagaactctgtgttggacttactaagaaaaggtgatatagctcactgagatagtgcattcttaagagatttgcagatttaatttttctgggtttatatcctgaatttaccttctaacgtggagtatgatgagagtcttctggattttcaaacttggcctctattaaactgctgcactttgtatacttgcttttctttgagcggggagatacctgacagcctagttcatgcctaattcacttctaatatcaggattttggctctcaatattcttaaaaatatgtactaatatttttctgtgttcttagaatattcactactaaattygctaggcattgctagggttttaatagctgagaattttacaggtctttctctggcatatatacttaaaaggagtgacctggggctgtgatacctgtaacttttgtgttatttttctaggtagttaaggcattaacagtttttgcccttgaatcaaagttctctacttttctctccacagcttctaaatattttgtccttttgagtcaagggaattgccctgattttatgatgacatttgggtacgatatttaaactgttaaaagttataaaaacgaccctttggtattaaatgtaataagtggctttgaattgaatacatgcacaggttctcctaaatgaactttgtgagtccaaactgctctagttaygtattctcattgtaactggattctatgacattctttcatcctccaagagtgttccaggccatgaaaactcctcatggcttggtgtcgatgtattctttgggtcttttggcgtattggctttcatctctcaactcctgtgtggcacttgtagtactgatggtcatctccagtcctgaagaggcagggtgtctctgcagcaaaacaaaactagttatccctaggagatctataacagccctcaagtaaagggggcatgggcaacttctagaactgacctatctttgctcagcctttccttatcaagaatatgttcttctttttttttttttttttttatttcctgagatggagtctcaccctgtcacccaggctggagtgcagtggcatgatcttggctcactgtaacctctgcctcctgggttcaagcgattctcckgcctcagcctcccgagtagctgggattacaggcgcatgccaccatgccaccatgcccagctaattttttgtatttttagtagagacagagtttcaccatgttggccaggttggtcttgaactcctgacctcaagtgatccacccgcctccgcctytcaaagtgctgggattacaggcataagccactacgcctggcaagaatatattctttactcatggttactctgcacagtgttcatttttactggcttggatttctttgtaattctaaaatattgtcatgttcaaaggttttaaattagactataaacacctcaatatcagaacttattctctttctttctttcttcctttctttttctttctttcctttctttgctatctctccccattgtatatctaccataataccactccagatgcatttctcaacagaagtcaacacacagaaggaagtctagtctagatttattcatgatgcatgcattagagtagatcagagatgaggggctgcgacaggtctggactgttgtgagagatgaacgagagttctagaaggctttgcaacaacattcagttaactcttcatgggtagagttgggtgctagtctctcctttgaccttctaagtgcaccagagtatgttactgccatgaaattgcactgtaatattttctagttgtgattcattcacagcttaatatgcttctagttstggcttgacttttcccccaggaagagcctaaaatctcttcattataatatagacagtgtactgcactttgaatacaaatttatccatgttcagagtaatttttcttgtgattgtctctaccctggagaagtgcctttaatgaattacatacaaattgtgtaatttaagaagttaatttggttttctggttacacaggactaaaaacagcccttgtagaaagagatgatttctcatcagggaccagcagcagaagcactaaattgatccatggtggtgtgagatatctgcagaaggccatcatgaagttggatattgagcaggtaattgtgtatgctggttgttaaacaaaaattgcaactgtgcttttttctacccaattaaatcaggtttttttttctttaatggcttaaaagcatttcttcctgttggaaatacctatttagtgtattctgctggaatatctttcaggagaggtgtgtcagttctttcctgtagtattatgtttatgggtaatcaggggctttttcttcacaagcatgttgaagtagcagatttacaaaatcacttttgaatgtgttgccttttaacaattgtgtttgggtttttgccaatggctaccaaattgctactttgcaagcactttcaggggagctatgttgtaatgcagggggagtgcgaaattgatcctcttaactacaactgcagtcataggctcatattgtcactgacatattctgaaggaaaagatgatctgagtcatgcttttcttatgtcacactttattgtgtccagcctgccaccatttgaaaactgccaaggcagtgtggaagatgacatttcccagaggggtaaaaaaaatcagctgaacttcctatctctttttgtacatgaaaaacacagtggcactggcttgacattgtcaagttttgaatctgtctctttttttttcttgacaagtcagttttgaatctgtccccttatatttctcttcagcatcatgatggaggcaaagaaaacagcataggatttagaatcagctaacttgtgatgtgttcaggcttatttactcaaaatctatgagtctgttatcttatttgtaaaattagtgttataatagcaatgctggctttttagagaggcrtaatgaggactacagcagttaagacaaaagcctttttataatctgtaaaatactgtgcaactgttaagaagcatcattgcttggtttcatgaaggcaagatggaaacttttagcatgaatttgaacaatctgttatctcctacacagaaaaaatattatggggaactgagaaagggagacaatccagaggatgcaagataaatggctacaataatcttgtaactcaagtcaggaaaatatcttacacctgggaactctgacagcatgtttttctcctatgcaaatacagttaaggtttctaaaaaatctttgaggttgacagcatgatgtattattagaaatttgattaggagggagctatcctcactcagagatagaaggtttctgtgtatcaatcagttggcagggtgtctatttgccatttgaaaatattatgatctgttactgccaaactaattttctctgttttgcctttcagtataggatggtaaaagaagcccttcatgagcgtgccaacctgctagaaattgctccccatttatcagctccattgcctataatgcttccagtttacaagtaagccttttgatatcacctgtatgcatttgcttctctgcggtcaatagaacaacagttttaatggaaataatccctcaatgcatatttcataatgtggttttaattggtcctaatctttaatccttttgaagtattttcctttgttgtatttaaaagtatggcttttcttaaattactctctactggcctatctctagattttaaaggcaaaggaggtcgtattctgtatttgtaattagtagtttcttactccagtttctgagagtatatagatgagcaactgcatttgcattaaggaacataagaggatcatgtgcagactgtaaatggttgagctaaagtatcctgttataaaatgtaaacataccacataccacttgaaacccaagscattttgagtcatgttacgtgtctgagttaaccaaggctgaaatttggttaggaagtgtcagattataaattataaaacttaattttcctaatgtttttagagctatccatgaagttgccttacattggaattcaggtagtatgaacaagtagattatgtaactcttttagccacattagtgttgtagggggctggaaacagattttttataattttgttcatccttcatcatagatcgcttaggacttcctgaaccagtgattcttaatcctgggtgtacattgtcatcatccaggcccccaccctagtctagttaaatcagtttctggatgtatgaggcttaggcatcagtatttttaatgttccccagagaattctaatattcagccagtttgagaacagctgcctcagagaagattcatttaaaatctcattgatttattttacttatagacttcagctaggttggtgtcaaaaacagttgcataagtctgtttcttttgcagtccacttctaggtatgctttgtttttcttaaatgaaagtgtcttgtagtgtaaggtaatattctataatgctatactctgtttctgaagaactttcccccctatttatgctgtaggtggtggcagttaccttactactgggtaggaatcaagctgtatgatttggttgcaggaagcaattgcctaaaaagcagttatgtcctcagcaaatcaagagcccttgaacatttcccaatgctccagaaggacaaactggtaggagcaattgtctactatgacggtatgtgatgttttttttttttttcctcacaagatacttttctctcactcatgacccgtatagtgtattcttaaggagatagttttgcatctttaaatactaatcttacacaacacacaaacacacgtgcacgcacatattcaccattttctctaacggtggctgaaaaactaaccataccattttacctttaatactgtttattttacatatttgttttcttctttgatttctactttgtgtctcatggttggtttggtccatttctcattattatgaatttggtccccaccctcatgccatgtaatttgttatgtgtttgctagtgaatatttgccttatgaatatattataatgttgaaagcagctgaggatatgttaggttttctagatgaaacctccattttcaaggggttataaacctagggggaaaaatgccctgtgggctgaaattgacatgtttgtattttgcacaggacacaattcttgaatgtataatttatatgacgaaggtagatgaacattgcatctgttaaactgctctgagtttttattgcttattttattgttgttagatgttttctaatagtgacattacatagtggccatttgccatgtgttcaatgttcattctttttttttttttttgcatgtatgcaatatagttttgtacacttttatttgaaggaacacttaatgtatctccagatggtccacaaaacaacataaaacaaaacaggcaaagccatttgtaaaattttactagtagttttaaagagtgtgtgagattggaatatagtccaagggtgtccatttataaggaaatagctgaacacagataattatacatgttcaaaaagtcctaaaaattttgtgatgcagaggacagcttagattttatacctcagtgagccccccacccccgttgtattatcttttctatctagtattagatatctaaactcttagcaagaagaatttgttgttgttttatttttttcaggatactttgatatttatactgaatactatgggatgtcccaaaggctatccctgtgtttttttcttctttccagtgttacatttctgaaccaattcagctgtcaggctttcatatataaatgcaaaaagtatatgtacagagagggaaaaggggaccaaactcaagaaaatgtcctaggatcaacaatattagaaaaatgttaagggtcttaggyaaacattaaaagctagaaaattcacagtttacagtgcttccgagcatctgaacaccacaggggggccacttaactatttttttggtgcccttgattgagtctacatgttaaaggacaaccttaactgtgaatttgctttctctgcattggacccttaatgttaatccattgtagtttattgggtgattatagtaaagaggtttttggtccaggaggagtatgaaggcattctgtaaatagcgtcctgcccatcctgacatggaaatgtttgtggcctttccctcttattactaatccctcctgcacaaaccctctcacatacttactcattttctatactttgtgatctattaggcactaaccaattttatttgtaagcttgtcaatatctgaatcttttaaaaataagtattagtgggctgggtatgttggttcacacctgtaatcctagcactttaagaggccaaggcagccagatcacttgaccccagttcaagaccaacatggcgaatcctcatctctactaaaaatacaagaaattagccaggtgcggtggcatgcacttgtagtcccagctacttggggggctgaggtggctgcagtgagctgagatcccgccattacactccagmctgggcaacagcatgagaccctatttcaaaaaaaaaaaaagaagaagaagaaaagaaatattagcaaatgtcatatctgaatttgtgacatcctgttttacattggtttggtattgttgtgaattatagattcttatttggaattgttgtgaattatagattcttattgattctacatggagaagccaagggaaacctttgttacacaaggcagaagaaagattattctcttagaatcatgaggaaaaagaattctttaatctagaattgatctttatagcctgttataggttgcaaaattatgagcttagcaaaaattcctgaaaaatttaaaaagtatttaaaatattttcaaattgctctttggaaattacttgtaaaatcttaagtcttgaggcaaaggagtaaaaataagtatattctactcatttgatataaataatttgtcttttgaccttgttctgaaatggtacaggcccaactatatcatacttgaggtgaggcaaaacaagcatgtgcaacagtgtagttttgtggttttacaactatatttacatgtggggcaactcttgttttacataatatggtgtgatgatcaaattgaatatcgacatggaaacaaggtgacgaggagcatgtaggtaaaagaattaaatgagtaaatccatgctcaacaaaaggaatgaacgccttttttccctttgactggaaaaatgttattacagtatcatcctgctactaaagtatttcagagaggaaaatatttcaatgtgaacttttatcattgcaaacccaagtctaaacatggtagtttataagataagcttttcttaacaaggaaaatacatactcttcataaatcaccatgatgagaatataacaatagtcactgaagtgatttcaagttgcattcaggcttcttgaaataatgttgaatttactttaaaaataacatattgaggtgaaattcaataaaattcaattaaaattagccattttaaagtgaacagaaataatttttataactcccaccaagggagaattttgaatctgatgagaaagtggcgtaagtaatcaaatgaacttttaattttaattaattaagttttttgagacagagtcttgccctgtcacccaggctggaatgcagtagcatgatcatagcttcccacagcctctaatctccggggctcaagcaatcctcctgcctcagtctcccaagtagctgggattacacttagcatgtgccactatacctggctagttgttttttacttttgctagagacaaggtctccctgtattgcctaggctagtcttgaactcctgagctcaagggattctccctccctggacttccaaagtgttggaattataggcgtgagccactgtgaccagataatcaaatgaacatttaatgctgcaagaagttttgctaactaaaaattcttattagtaatatcttatacacttacttcagcaaccatgaaaagtgaaatataatgatgtgaaaatatagtgggacaaactaataaatgttgccattaatatggaccaggcactgagaagatctgtaaggtatcttcaacgcagagatgttagggctgtaagaggtttcctctgaagtacaaaatgtacaaagataaaaattttaatttctcataaacacagttcatcctaattaaattctggatggctattgcatatgatgaaggcaaagtttgttctcccacagaagttcatagaggtaataaakaagttccatgcactcttccctccaacattttatatattttttttaatttttattttttgtagagacaggctggtcttgaactcctggcctcaagtgatcctcccgccttggcctcccaaagtgttgggattacaggcatgagccacttcatctggcccttcatactttttgatgtagtaattatagttactgttctgtgcatgacataagtatgatctgtaccatattttattgttaaccactgaaaaacaaattcacataaatggaggaataactgtcatatttttaaatgcagacagagagaatctcaaatttctcagtgaaatccatatgaaatgaaaattgggatagtaaatgacataccagtttttcctccagttgtatttccttcttatattctgttagagtaatcatatagtcaactcactggttttctgactgagacatgtcctagcattttctaacttgcctagaagagacccacagctggccattactgctgataagggagttatcaagtagagagtatggtgaccaggccaactttctcaagtcagaagaaagtgtttagggcatggcatgcctgggtgacttgacaggctgtgagattatgtgaaccagctgttaggggtagccagttttctcaggaacttattttttttttcctctatttgttcccagagtggatctttgtggctattctagttagactccagtcatccaatctagtacacagaaaatgagctataattaaaaatcattaaatattaaaaaccattcaatacctccattaagccattataaaatgaaactgaagaacaaaattacagctttaaattcttcctttctgagagtcaagacattgacagagatgtctgttgtttcatacccgacgatgcttctaagtattccttatgcacatatgaaaatagcaactataagaaattacattgccttttcctaatgtaaataaaagttggttacatccatatttcaaagggggaattaaagcccaggtttcactagaatattcatttttattccaacctaaaattcacagcatacaaatagatgaattcagctcgtgagagagcaaagccaatttaatctctggctcccctgaggtaaatgtagttcacggtcctgcccccaccccaacctcagctataatccctggctcctggaggtaaaaatgcactgaagtgaggaaaattctgcagcaggatataatgatccaaaatgacagggacaataatgacaatgaatttcatgtctcccagtcacgagctggaggtgcttgactaggctgacttatacaattaaattgttacaggtacagcaggagatgcagttagctgtatgctttggggaacgatgcctctggcaaaaggcatattgtggaatccaggctcttttgttaggagcaagctattactcctctaggcatgcacctgcaattgtacactttaataaaagaaagcccgggttaaagacaagtattttaaggtgttgattttatctacttggaaagctaaaaaaatcaattaccagtatcacaaaagtgatttttttggtctttttgttgtttgttttttcattgagttcctggaacataagtaaaatcttaagatggtgcctttaatcctcatttacactatttgtaaacagagttgttgaatgaattgggtgttacctactttaaatcagacagatattaatttcttcaaaataatagaaatagattgaacagataactgaacaatgtggatttacaaacagaatattaatagcaagtcctttaagcaagtttgggctacttgcttcttaatgcaattcttgtgaattggagtggtaatctccataatctccaaagtgaaagatgtgagcctcatgaggtgcacacacccatccactagggtataggaggaacacattagaacttctacttcgatatgtttttaaagtttaattccttataaatttgaaatggttcaaatgtctataatatataaaaacagtaatatgtacattatgtaatttataaataaatatacacatattggagatacatactgatatttacttttggaatagtcagtttaatttttttgggggggggccactagtaatttgtcattattttatttctttgataattggctatttaaatattttcaagatagatgtgtttagtgagaggacagattgctttggaagagtaaacataaccaaatccctttcttcatctcccaatgtttaatttctatgaaatttaattgaggtggctgaaaacataaaaacaaagaactattgaataagaggaggtattggcatgatacattaaaattgtgtatttaaagaaaattttcatcttaacataatgcatttattttaaaatgtaaagtcctatttgccaacaatttccagggctcctaccctttttgtatccttattattgtgcaaccaaggtttaaaattatgtaaatattgatacacataaaagaatacgtgtaacacgtatgtaagttgtaaagttagtcattaagattgtgggatcygcaactgtccttaaaacctagtgagataggagagttgcctggacccttcgtgggacttgcgacaggggtgtggctcgattacctggccgggtgctcaaaccccttgtgggtgggggagcacccaggcaaacaggtgcctgggccagggtgagtgcctttgggctccagccccatggcagcatctaggggtgtgttatgattaatgctcttttggcagttgccatccaagatggctaagtattaagcagctcagtggagagtcagggtgacagccttttacaccttgccttcttggtacccasgttcttgcccagcatctgggaagaatcaggtcatacagacttggaggatggtgaatgcagaggttttattgagtggtggaggtggccctcagtgggatggggagctggaaaggggatggagtgggaagataacctccctgtctccaaccgtccagctgcctcttcttttctctcattctctgctatgccactccactcctctgccggtggaatttggggtttttataggtacaggatgggggtgttgtgggtcagggtggtttttgaaaaaacaacattcgggtgggaaaacagggatatgaagttctcatttagggccatgggcccaggcttgtggatggggccattgccggggaactaccctctgctacccagtatttccctgcctcctgtccaatatcactaggatattaccaagacattgaagccaactgtgactattcaccatttcatttccttgtcttccctagaaataactgctatgctgaattgtattattagggttcctggtctttctaataatcttattatatgtacatgtatttctaaagtaatgtattgttcagttttatttatttatttttaaaattatttttattgttatttatttatttatttatttatttatttattttgagatggagtctcactctgtcgctcaagcagggtccagtggcacgatcttggcttattgcaacctccacctcccgggctcaagccattatcccacctcggtctcctgagcagctgggattacaggckcgtrccaccatgcccagctaatttttttgtatttcagtagagatggggtttcaccatgttgcccagggtggtttcgaacacctgagctctggcagtccgcctgcctcagcctctcaaagtgctgggattgcaggcgtgagccaccatgcccggctgttcagttttatttttaaactttgtaaaagtattatgtgatggttacataaggtgatataaattttgtagagcagttggacatgcctagaaaagttgggggtacmttgtgatctagtaattttattagtaggtatatgccttaggggaactgttgcatgtgtctaccagggtatatgtacaaaaagttcatagaagcactgggtataatttcaaaaagggaagtaatgcaaatatccatcaagaggaaaatgaatatttaatatatggtctgttcacataatggagtaaaacacagcattgaaagtgcatgaactgtaaactgaacaacacagatgaatcttagaaaaataatgttgaaaatggcatgataaattgttttggaattgtaagcattgcaatcatactagaaagctactttccaaagtattgtagggtctttaaatcaatcagcaatatggaaggagatgacttaggtttacaaacttaactgcactttgagctctgcattacacatctataaatttaggcttatgacacctaattcacaggctgttttgrtatttaaatgaactactataataaatgcaaaataatttataagtacaaaacattactcccgtattatttttggggggtcaatttcatggatactctatagtccaccaaatttctactttttgtgaaaatattccaaagtgaagcatcagttccacaagcatccccttgtatgtttaaaatttgaagattcttctagaaaaacttgccaaacattcttaggataaaaggaaaaaatattgcacatatgaacatgcctcaggtaagtataatctttgaagtttaagaattaaaaaccataacattttaatagaacttcctctaaacattccttcctcttagacattgatttaaaacatatttgcttttaatatttctccttgttcatatgcaattttacacttctaaactaaatgaatagttttaatcttgatttcctactgtcagctttcctgttgtatttctcctcttgttttctatgagttacataaatgaaactgacatcattgctcatacagcaggcatatttttttttgcccccaaatgctgcctttttgctattcagtgtatctggataccrgctaatgctaaatgaagtttgacatgtacccctaagaaacaaaacttataaattgtggcttcaaaggaaaccttgaataaataggacacactgtgtccacccaggctaacatccagcatatgttttagcttcctgatgatgagatagagcaaaatagcccccaggaaactttgcaattgtttattgctcacttgcccagcatgtattaaataccaggctttcattctcttataatttgctttttttaaaattaaaatccaccaaagtagatttgatcaggtatagcaagccgagatagtagtcatccatatttgtactctgtatataaaagcttaaagacagtgctaaaaattctccagtagtaggatgtatgtaagttgtttgaacagatagttctagtgggttcatagtaagctatttacctctcccattctgtggttcagttgacccatttaaaaaagattcaggatcaaaggcagaagctattgtatcaaaaatctttgtccactcttctcttgatttactcattcatccaaaaaatatttatggaacctctactatttgccaggcattgtacatatatgccatatattttgccaaatacatggtccctaccaccaccaatgttttacatttgtgtagcagagtgtggttttttaagctttttttttttttttgcagaaattatctttgaactaactttgtatgtatgctgggataggatattatgatctctattttacaggaaggaagaggaatcatagctaaaaatctacattgatagtttagatacatggggatgtgaagataattttattttttagctaaaaagaggactttacaaaatgaagattatagcatcatggcttctttcagctatgattgatttttttttttctttttaaagactttacttttttagagaaattttaggttcacaacaaaattgagagaaaggtacagagacttcctctttcccccctgctcccatacatgtttagactctcccactatcaacatccctcactgcagtgaagcattcgtttcagtcaatgaacctacatggacacatcattatcacccagagtccatagtctacatgaagtttcactcttggtgtacattctgtcggctctgataaatatataatgatatgtatccaccactgccatatcatactgaatagtttcgctggcctaaaaatcctctgtgctctgcctagtcatccttccccctcccctaacccctggcaaccaatgatcttttcactgtctccagagttgtgcctttcccagaatgacatgtagttggaatcctacagtatgtcagctaccattgatttttaagttcgttatacacttttaaaaagtagccaaatagttcaacaaaggctatccaattttattatggaaaactcaaatatatgcaaaattaatgagaataataaaattaactttcaattttagcacttataaactcatgaccaaacacttataaactcatggccagtctatactctcatttcccctttcccccactccccactataacaaatgttttatccatggatatttagtctgtatctttaaagttaagaactctctttcaaacacagccacacctaaattgttcaacaataatttcttttctagatagatagatagatagayagatagatagatagatagatagatagatattttatggagatggggtcttgctctgttgcccaggctgrtcttgaactcctgggytyaagtgatcctcccaccttggcctcccgaagtgctgggattccaggcataagccactatacccagccaacaataatttcttaatatcaaatatctggttatgttcacatgtcccttataatctcataactttattaggctcctgattttaaaaaccaactcataaaaaatagacaaaatcttacatataagttgattcattctttttattgttgttattatattttagattcaggggcacatgtacaggtttgttacatggatatattattgcttaatggtgacgttgggrcttctagtgaacccatcacccaaatagtgaacattatactcaataggtagctttttaactctcaccctcttcccacccacccccaccttttggagcccccagtgtggattcattcttttttaactgataggtttccagtccctttttttgtttcctgatggttttatgtaacagtttccctttgatgtaaattggtagacttgtctcattaatctgttgctgcataagaagcaacacctaagctcagtggcttaaaacaatgattggttatttctcatagttctgaggatggatgggctcagctgggtggttgtcacttggggtccttctatatagttatagtgagatggcagctggggctgaagtcttctaaaggcttctttactttcctgtttggtgcctggacttggaaggctggggtggccacaacttggtctggcacctctttcaccatggcttctctgtatggctagcttggactttttcacagggtacagacttcttatgtggtggctggcttaccccatgagcccaccaggagaccaaagcagaaacagagggcttcttttgacctagtcttagaagtcacacagtgtcactttcaccacattctgttaattaaagtaaatcacaaaagcagccaaacttaaaagagaggggattacaaaagtaagaaaagcagaaggcgtagtttactgaggagaggtgggacatatttggtgactagcaacaaaaaggctagatcaaattgttttgtcaaaaatactttatgggtgatgtaaatttccatcacaagtctgtttacctctttttaatttttttaaattagtaattataattattgcctagataattacagcatttcattagaggttaaggggttataaaatgttacttttataattctatttttccttctttatgggttagttggattacttataatttccctgtatcaactatctgcctaccttaaggtatattgtatataggaaagtctggataaatgcttgattcttttcatttatttgtactcaaaaataatgagttagcttttttagtatcctccaaatgtaatgagatctttttctgaggggaagcttgtcaacataaactcatgaatttgaagtatttgatagatacatgtcaatccatcagaattattgatgttcatrttgcccatctctggccctggggcacttcctgcagttggcccctgagcccttttgataccctgtcagtggtctatgatgatttctgtgctgtttgctatgacaagatactccggtttcatcttgaaactttccttccctagttttggaagcagccatttcttcagtaacacttgactccctcatgtggaaaatggtaactagggaccataatctatttgctatgaaggttcattgctactggttggtcattatttctaggcctttcaatagaaaaaattaggaaaaaaattatgtgaagaagaaaaacatgttgagtttttagatacagttccacttcaaatttagtattacatggtttttatttaacgttatcaatcagacttccaaaacagtttaattttatttttcagtttcgttgttgaatggggacatacggacaaattactgtcttttaaagtgacttaacatatttatttcctataagtgtggttatgtcaccacttaatacaacagataatttcattttgctttagatgattaggaatttatttttttaaactgtgcttctgttttataaattatgtaaataaagtgttttaaagtaaaaaatgtaaacaaagacaattcaaacaaggctagcttctttccttgttctgccctattccctccttctttaaaattaacttaaaaaatttttttaggattttggtatgttcttttaacgtatgtatgcatatgtgtttattatatgtacacttgtttttgctctgcctaccattttgtaggtggtagtagtgccatgcttttttcacctaatagagtagatactgctttccataagtataagaggccacaaaattttaaaaggtgaatttaaaagcagggaccaacttttatggaattacatttcatagccatgttaactgcttagatcaaaatatacctgctcatacagccttagccatcaataaaccacactttcaaattatttttctttttataagtgaaaataaaatcttatttcctttctttggataccacaaaacaatgacacatccactagtctgatctgtgtagagagcttaaaattaatcagagagtctcaaatgctgttattatcattatgtaaaatatgctgtgatttgttcaaatttgctaaaatctggttcataacatttgcttgcattgaatgctaatatgcttagtcagactaagtgcttctgtcaattatagtcttttaaatagatgagtctgtcttatactaatatgtgaaattatacttcttggtaaaatttgtgttgatatgctttatattaatggtgcattttttaaaatttagagataaagctaattaattgtagtttaagtttaagatataaaaatttgagggactttctgcttttgtttcaaagacattcggagaacacatgcccaagaaatgtaagccatgcttaaaaatactgcattttgaagcttgcagtaactatctaatgaattcgtctcagagtgattctccttcagaaaaacaaaattttataggtcacatttggaaacaaggagaggaggaaataactgacattgcaatatggggaaataaatgggaaataaaaggccataatgattggtcttcaggaagctgtaaggattgttcttcaggaactaatttttcttgctactttattgtgtggacaatataatgcctcacgtatctgttggcatagtccctagtttctctctgctgtacccattcttcacatattttctagcattctttcaagaggatcaggagtctttgcccagatacctgtttgggaaaaggaagaaagagagtaaaaaattaataattaaatcaattttggagttattctgcagatgacacacagcagctttcttagtgtaatggaaagccagcctggtattaagcatctaacctcacaaagaatggcagtaataaaaatatctcttcaattaaaaagccccacactttagtttcaactaccaagccttggaaatgtaataaaaaaaaaactgtgaaaaaaagtcttcggtacatagtttttataaatataactaacaccttggtgtagattatattctctggagccaaatagattactattttagaatgtgaagtttcaaactagtttcattattactattaatacttactcatatcacacttacattagtaaaaccctctgtagatcattatatccactcaagcatgaaccacacaacacctattttttttaactcatctttgcacattaaaaaacatacaggcacacgcaactaacctcccacacaagttaaataactattgctccttttctgttcaaaaccaaatatatactcttgcattcactggraagtgttactagtatatgatttgctatctattcagaagaatagatatttgagaataaaataaaaaagtatataataatgaaagcaactaccaaattaaaagcaatatcaaataatttgtacttgatatttttatgtcaaagatgattaacatgtaactgatttacctgggatagaccaggtaaatcagtacaccagaaacttcatatttcccaggaattttaaattttcttagtttttaacccgagaaatcctacaaagaatggatttggtgatttgtgttttattttccttaagaaggttgaagtctgaaaaaggtaactgagaagcagctcacaggcagttctctcttttaataattccccgtgtgcaaagcattgtacttcaatagttacctcagaaccattttagtgaaaaagaaggtaaaaatacattatcattaaaaaactaatctgaatatagtcaggatttacaaattggataaactgactactctcattctaataaaagaataaaataaacccaatttattattttcaatagttgcctcttccaacagcatttaaattaatagataatagtccacgctaattgtaagaaacatgtctattgtataaaaccggattgaaacatgtctattatataaagccagattgatatgtgtatttttgcctttttcctctgtcttctacttgtatatttctttttctcatcacagattttggtaaaattggtattttcattatccttaagtatgagcaaagagagataaacatatttctccactcaattatgtcaatttttttctttttttcttttatttatttatttatttatttttattattattayactttaagttttagggtacatgtgcacaatgtgcaggttagttacatatgtatacatgtgccatgctagtgcgctgcacccactaacttgtcatctagcattaggtatatctcccaatgctatccctcccccctccccccaccccacaacaggccccagagtgtgatgttccccttcctgtgtccatgtgttctcattgttcaattcccacctatgagtgagaatatgtggtgttcggttttttgttcttgcgatagtttactgagaatgatgatttccaatttcatccatgtccctacaaaggacgtgatctcatcattttttatggctgcatagtactccatggtgtatatgtgccacattttcttaatccagtctatcattgttggacatttgggttggttccaagtctttgctatcgtgaataatgccgcagtaaacatagtgtgcatgtgtctttatagcagcatgatttatagtcctttgggtatatacccagtaatgggatggctgggacaaatggtatttctagttctagatccctgaggaatcgccacactgacttccacaatggttgaactagtttacagtcccaccaacagtgtaaaagtgttcctatttctccacatgctctccagcacctgttgtttcctgactttttaatgattgccattctaactggtgtgagatggtatctcattgtggttttgatttgcatttctctgatggccagtgatggtgagcattttttcatatgttttttggctgcataaatgtcttcttttgagaagtgtctgttcatttccttcgcccactttttgatggggttgtttgtttttttcttgtaaatttgtttgagttcattgtagattctggatattagccctttgtcagatgagtaggttgcgaaaattttctcccattttgtaggttgcctgttcactctgatggtagtttcttttgctgtgcagaagctctttagtttaattagatcccatttgtcaattttgtcttttgttgccattgcttttggtgttttagacatgaagtccttgcccatgcctatgtcctgaatggtaatgcctaggttttcttctagggtttttatggttttaattctaacgtttaagtctttaatccatcttgaattgatttttgtataagctgtaaggaagggatccagtttcagctttctacatatggctagccagttttcccagcaccatttattaaatagggaatcctttcccccattgcttgtttttctcaggtttgtcaaagatcagatagttgtagatatgtggcgttatttctgagggctctgttctgttccattgatctatatctctgttttcgtaccagtaccatgctgttttggttactgtagccttgtagtatagtttgaagtcaggtagcgtgatgcctccagctttgttcttttggcttaggattgccttggcgatgtgggctcttttttggttccatatgaactttaaagtactattttccaattctgtgaagaaagtgattggtagcttgatggggatggcattgaatctgtaaattaccttgggcagtatggccattttcactatattgattcttcctacccatgagcatggaatgttcttccatttgtttgtatcctcttttatttccttgagcagtggtttgtagttctccttgaagaggtccttcacatcccttgtaagttggattcctaggtattttattctctttgaagcaattgtgaatgggagttcactcatgatttggctctctgtttgtctgttgttggtgtataagaatgcttgtgatttttgtacattgattttgtatcctgagactttgcttatcagcttaaggagattttgggctgagacaatggggttttctggatatacgatcatgtcatctgcaaacagggacaatttgacttcctcttttcctaactgaataccctttatttctttctcctgtctaattgccctggccagaacttccaacactatgttgaataggagtggtgagagagggcatccctgtcttgtgccagttttcaaagggaatgcttccagtttttgcccattcagtatgatattggctgtgggtttgtcatggatagctcttattattttgaaatacgttccatcaatacctaatttattgagagtttttagcatgaagcgttgttgaattttgtcaaaggccttttctgcatctattgagataatcatgtggtttttgtctttagttctgtttatatgctggattacatttattgatttgtgtatattgaaccagccttgcatcccagggatgaagcccacttgatcatggtggataagcttttcgatgtgctgctggattcggttttttaaagtagcaaacaatgctgtttgtttattttttatgtttttagagacagtgcctcactttgtttcctgggctggacttgaactcctgggctcaagtgattctcccacctcagtctcccaagtagctgggagtgtgggcatgcaccacggtgctttgtttaagactctattttcaaaaaaccaagcataaacattattaacacaaacataatgaaatacatatacaatttagagtaatatttaaagtgatgtaaatatctagatgcgattaaacacttcactcactgaagtytaattattttaatttgctacatttgctgtttaatgttactttggtcttctcttctccccatcccatcccaaatatgcatagtwttaattcacccctgccccctttaaatatatatgtatttaaaatccacagattggtgttagtgttgggaagggggatttctgctgaaactccacatgtgctccttactgctggttgatgcttttgatgttctcatcccctgaggtcaggagaacacagacaggagagtaagtggcaactgtagcaaccccaggctttgtgacacttctctccagaagatgcaagggtattttctgcacatcagcactggccctgacagtagagagtttcttttcatttactttaaaatggttctgacaaaaaccggggtctctcatttgcaaaaccagctgtctgtagcaaagccggaccttatcttaagagccaggctgaggccacagatgtcgtgtggcacctgcatgtggaggccacgagtggcccattaaccagatctgggctgaggccactgagtctgcaccatggagctcactcctggaggccagctgcaatattcccacctggccaggaaggacactgcccttctcagtcccagaatggtaatctgagggccctccacaacacaatggggccttcagcctaggcatggaccactgtggtgctttccctctctccataggacaaatggagggccacaggttccagcaatgcctggagcccacttggtcctttaatatcccatcttgtcacttctcaggcccctgcctactccaccaaaagggctggggaggcagtccaaagataggggttatagatttatgttaataaatatataatatatattaatatgtaattttatttttatttttacttttttaagtgacaaagtctcgttcagttgttaggctggagtacagtggagtgatcacaactcactgcagtcttgacctctggagtttaagcaaatctcctcagcctccgactagctaagactaycgttgtgcaccaacacatctggctagtttttatttttaaaaaactctttgcrgagacaaggccttgctttgttgcccaggctggtgatgaacacctggcttcaagttgtcctctcaccttggcctcccaaagtgctgggattacagatgtgagccactgcatccagcccccagattttaatttagttttattttctacctttttgtgattatgtgtctcagtttaacaagcctttagttacatctaggtataatcaagggccttctgtgtgcccagtggttatctatgattggactttttctcttctccccatgtgctcccccaccattaaattttaaggaggtactttttccttgttacctgcactttttgaacaataggtttcagacaacttacccttgtaaattccctttgaattatggcattttaaccatttttcacaaatattgaacttgaaattttagagccatcaggaggggctgatcctagcagctcttttattgaaattattctattggtggcaataggagttactggagggcactgccacccagaaactggatgaaaccaagtcagaaattctgagtataactgacaaatgctttataggaatttagaaggacaytgggtagtagagggcttgggaaaaagtaaattccctaatttcctcctctgtgacccacatttgatatagaaatcatgatttgtctagtattggacagaatcacaaataaggattagttgccataaaagtttttctaatttatattgtgaaagagctgtagtgctgcatcagaaaggagtctctgtttgctagaagagctatgtcagcaggtgaggcytaaagcytaaaggcctgaggggtggtcagggatgggagagaatgaagttactccagactttcaaattgttcctcacccttcacaagacgggaagtttcctaaggctgaaggaagcagcagtcactgagtgcagaatgtttctsttggtgcagtgggttgtgaccactctcattgttgttttcttcctgtccagagtgaaacaggtatccttcagaaatttcatagcatgtagccctgaagagcacttagctagattgtggtggtttctatatgtgtaattggttaatctgttgaagagaaataatgaaaagctgagcagtctttttctcctccatcaactcatgagctatgagctatgagttctcgagaaatgttggagcatttgacagcagtatttgaattctcccttgtgtttctgttgctgaagctgcagcttccaaaattgcagggcttcttgaccagcctgcgtctcaccattcagccttttagtccattgaataatctgattctgtcagcaaggcctcaggtttagatcttattagctctagatagttttttaaaaatctgctctccagaaatttgcaggaagtcccaagataagagaaaacttcctgtcaacagtgctgaatttcatggtgtgtgattattgggaagaagttgactgaatgttgatatgtgatacttctgaattgaggtgtgcccaatgtaggtctaggcatacattatactgttgctgcatgtatgtaaaattttaaaattggaatgggagagttctctgacccccctcgcaggatgtgcaatgggtgtggctcatctgttcggccaccatgctcaaaccccttatgggagggggagcacacagaagggcagctgcaggagccagggtgagcgcttttgggctccagcccacggtagcgtctaggggtgggtgtctgtgactcctgaagccccagtgggcatgtcacaatgctcctttagctctgccatctgcagaaagctaaagcgttaaccagctcagtgccctcttggtacccaggttcttgtctggtatccaggaagtatcaggtcacacagacaaattgaaggatggtaaatgcggggtgtcttatttccaggtggaggtggctctcagcagatggatggggagctagaaaggggatggagtgggaatatgaacttcgcctggagtttggccgtcctgtggccgatctcctctctgaccatccacagccaaactcttcttgaygtttaaatgccctttctcttctctcctctctgctgtgccactcttctgcttctttgctcttctgcttatctgttatctgctcatctgctcgaggagcctggggtttggggtttataatggtacacgatgcagggatgcagcaggccaaaaggaaatgtttgggtgcaaaaacaggaatgcctgttcccatttagggccatgggtttccaggcttgagggtggggcctttgccagggaactgccttcttctacccagtatttccttgcctcctgtccatatcaaaatgagtatcaatactctgtaagattttcttttgtttacttctgtactctattcttcaatattagatttaatgtattagtcttgggattggaatgactataaaggaagcagcattttgtatagtaagttgaaagaatctgtaggtttatagctttctaagtaagatagtattctcagttgttttttcacatgactagcatttacatttatttatgtatccagtaattatatgaataccatctataagtcagctaatgtgataggtaatggagatgaacagaataacatgaattgctttttcttaaaaaaaaaaaaactctaacagaggatacagacaaggaaaccattgatttatggttgcctgtgagaagttctgtgacaagcatatacctaatatgggtatgtgtgtgagagaatctaggaaagcttccttaagtaagtaatgctttgctaaattttaagaaagggtagtatggccaggtaaagtcagtgggggaggaagatgacagggaacactgtggccaaagcatgcagacccatggaattacaggaagcakttgtgtagagcttgagtgtagggtggtgtagggcctgaatcatggaggacaaggtatgccaggatgaggagtttagtttgaattctctaggcaatgggcatccagtgaatgcaaacagcatttgatacaggtactcagggtgcagaaaactgaatgaytaataggagggcattagatgagattttatgctgatgggaaggaatcccaggtgagagagagagagagaaagagagagaaagaaagagaaaaagacctgggaaagagagagagagmgaagagagagaaagaaagaaagagagagagagcgagaaagagaaaaagacctgggggggggcggggagagagagagacctaggaaagagaggggggtggggrgagagagagagagagagagagagagaaagaaagacctgggaaagagaaggcatattacatgggccattatccatctgcttgcttkaatttcttggacaactccagcatctactacccagattttcttgttgttgtttttttttgttttgttttgttagttgtctttgtggcttacctctttatttgtgtagccgccctttcttgtcttttgttacatctttgatttggaagtgaattaataaatgaatgtcaagtgttcccaaattctgttttaagaataatctagatcttttaaagcttcggtaatgtgggctttaaaaaatctgtgattgcccaactggtttatgtcagcattttggaaagaatatcagtctttaaagcggtgttagagatataaaccctctggggagtgaagaatgcctggtgcatgctaattttgtacttatccaggtggaagagagagaggaatagccaaagctatagatagaacaaaggcatgtcaattgcaacctggtctcagtttaggcttagctctcctcaccaatcccctatcaggatattagtggcttatttatttatttttaacctgtatcatattaagctctttgacaaatcgcattttgatttatagtctgtgcttctggcatgtgctttaatggcattagccaactctagasacatactgaattcattatgtaccttatgtatgtaagtagtaatacttccttttaatgaacatacggtcacgtcaaagtgctgcgaggttgttttacaaaagcatctttgtgtagtgctcctcagaagttttgagatgagtattaagttgaagattaatatgctgtattttaagttgtattttagtggagtaatgtattataattttgccctctccttaaggtgagtagactattatagtctgagtctttgattcttaggctttggttcttaattagaattcaacattgttgacatgtaaattgtgaccagatgaattcaaaactcaaaaagtaaaattgcctttgaatttgtatcctcagctacgatattgattgaaaatcgatgagtaactcttwttcttgttttctataggcagtaagaaattcacagaatctatttacagctatacgtgacagcacttaaccttgactatgcctgctaaaaggtttcttgactttaaaatgtggatactcttcaagatttgagggcagggcttctcctaaggtagaggcagagaagtaaaccagcaacaagtagggctcaagatctagcctgtctgatcaggcttccagaccaaggagtggcagcagtccaaaccacctgtctctgmtgactaggcaatcttaatagccatcccactcctcatcagtacgtgggatctgagcacaggtctaagcagattaatagttttcttagtgaagtgatccatggagtcaaatgcatgacagtatcttcaggattctgtgggaagaggagggggtctatggaggacactaggtcatccccttgaaaagagagatagagaccattacttgagggaagagctaagcagaatgtcagagctttggctaagcaaacagatatgagcagagttctagttcaactaggagcacagagtgagaaccagatattggggcaggaactcttctgtttgacgtctacagtgggagagactgcacacctgtgagcacagggattcctttgtgtaggggttccttaaagacagataacagtttatgggcagataacagtttccagagggatggggctccctgtataatgccaggggctgccaggattgactyaggattgactcagggactgcgtggggctgaccctgcaggttgaatgctgtcagtgattacaacagggcaagggcaccttgactgtctcagaaactaatagaatctttctttgacaataaccactggcgagcatttccaggaagtctttgaaaattgctgggagtctgggcaagaaactccactcactgaaagcatggtatttgattcattataaaacagaaggaaaaacattagtaatagacgtggtatgtcccagccttgtatagttgaaagtaaaactaagtcatacgttttcaatttggtgtgacattgtctaatttctaaatttattattattttgaaattataggaaatgattagaagtatgagggtgtgcttcttctgttgtttatttttcacatttgagtcttactacatgtcaccattgtccagcatttcagagacaaagggagtatttttgacattcattaaaactgttttggtgaaagagctgtattacggtactatttaatttttataatagtttatcagaaatgagattagagcctatttattgaattatcttattttgaaactctcacatatttattgagtacagattagaatcaaactgtttagaatattagaaaagtctttttcaagtacaaagggcagagattatatctgtaggtagttcccccaaacccccgagggkaagttttgttttaaatgtttacatgttttatattgacacatttgttggcttaaaaaatatggcaatagcatctagcatagtrctwgatgtatgtggttgcaatttgacattattttattgataactatattgtgtataaactttcttttcatgtctttttatgtgagagacatcagatattctactagctgttaggaggtagtgaaattaagttgattctcacagtatttgcatctcagtcttctgcctcagcatgtgaccttgcctgtgaaggttcagaatagctgttttattatttcgcttagggtgatcgggctctggtaaattgattggcactagcccaactcacagcctattgaatcatgaatttattactttaggcaacaaatagtttaacaccttcctacatgccatacattgttgtccttgcaggaggtaaactcttggagaagatggtgggggatagaaccaagttcctgcccttaatttattcattcctatgagaagtgaaacattcatgtaaaacagatgactcagattgctgttaaaaaaaaaaaaaaatccagtagggcaaacctatttgaataaccaaattaagatcaggattggctgggtgtggtggttcacgcctgtaatcccagcactttgggaggccaaggygggtggatcacgaggtcaggagattgagaccatcctggctaacacggtgaaaccccgtctctactaaaaatacaaaaaaattagctgggcatggtggcgggctcctgtagtcccagctactcgggaggctgaggcaggagaatggtgtgaatccaggagggggagcttgcagtgagccgagatcacgccactgcactgcagcctgtgcaacagagcaagactgcatctcaraaaaaaaaaaaaaaaaagatcaggattttgcctagtaactatagagttcaagcagaagcaatgaaatggtctaaactatagcttaaaaaacaatatctgttaaagatatctttgtcaagtaagtctgaatattttgcttttatagttaaaaagataattaaattctgactttttcatttcatcttttagagtctcaagccccatataaagtttccaaataaacattaattctgggttgctgagagatgttattctgataactgaggaatgtttatgattgaggtattaaataaaaggttatcttaacaaaaggagaaggaaggtaaatgtagtagaaggcaatctgttaacaatattagcttcattcttataatgctttgcagtttacaaatgctttcacatatgctggaatctgattatttcagcggttctaggggattggtagagaggctgttgttagacctacttaatagatgaaacagactctgatgaggaaagggacgtccccagaacctgagttagtggctggttgggtcctgaactcacacattcggagtctccagcatcagtgctctctgatgggggccaagagttagcctgcttttcatgtaaatgccctagtacacattcctttcagacaatcaggacattgggttcaggtcagactgatttgataacaatttgataaggtgtggaatcttcctgtgattaaagagagaaatctgataaggtacaagacttaccatgaaacagataaaggctctctcaaaaggctgcctccagttagaattccccagctggtccttggcacatggttccatgtgtttattatgtagctcacactcgaaatcacccctggggcaggttgagccattccagcattttgtaaaaagttgtgtgcatgtgctcacacacaaatgaggaaaagaggactgaaaaaaatggttctgtgaaagtgaaaggattcacttgcttttcccagtcctattatgaaagatggtttagttatatcaaagggcttcttttgacttgttrtataattcgattcttgagttttcagttggcttatttgaaattttgtaaattgcaatttataaaattggagggccctgagagatcaagttccactttgtggctcgaggaatgaggatactgagattaggggttagggcttgctcaggtttttgttgcagacaggaaaaacaaaaaatctggttaacttaaacagaaaagaaattctctgataggacattgagcagcaggcagaaatactgggaagacagagacctagcttgaaaaataagggactaaatatgatttgtagcaaccacagccacaggcaaaatcctgacccacaaccagtgcaccgaagacttgattgctcatcacgtcacgtcttgctgtgccaccactgctgacatctctattgctgctgcccctagaaatgggatggtactgctatcattgcatctacctctggattagaggttctttgggtcactacctctagatcgaagactgttgagagcgtcggactggcaaagccaggttaaagttctgtatcccaggggaccgttcttcctctcctatgggatggtagaatgcctttctgcaaagcttacaagataggaggaggggtttagacgctagtaagcaaaaccaaaccataccaaaacatgagacagttatctgctatggaaacatacccatttactggctatttaagaggttagaacttgagttttctgaattttctcaggatgccaaatttatagctaatatagatttcctttatgaaaagtgacagaggctctgtggtttgtaagagaaaatgaagtcctctgtagtaagatttaataattctaatattttgaaacaatccattttcctatcaacactgttttcctctggattaaaarccattccccatcttcctatccttcatgacatacagaaaaaagaatcttattwttcagtggtaaaaagtggagagagagaaaaggagtaaaagaagaacaaacagtattcatgcagtgcagagattagaggttagttgttacacatttcagggtaagtttgccagattgatgagcaataaaaccatttagaactggaaaatcttcagggcttttgtttttaaaagttattttaggcaataaccacatcttgtcgttatagtctttgctttccagcaattcctttttaccttttaataataaaagctaatatttattgagaactattttgtcatagcatcattatctatctcacttcttcctcacaataactctgtgttaatctcattactattctccttccacagctgagagatcaaaccttagatgaagcaactagcatgagatttcatagttcatagatgtgggacttgaacttaagcatatacacctgtgaaagaagctttgtaaatctttctttaacttaagagagaaaataaggtatgtgtagaatgctgtttggtaatattttaagaaaactgcagaggaagragaaaggaagtgtgctagaaaatcaaaagacttttgggagcatgtgactcctccacattaggtaaatttgctcttgtatctctgttccaggacagctaggccattctgatctctttcaatttctgttccccacagtagtacttagcttagtgcctggtgcatagtgggtgttcaataaatatttacaaaaataattaatctcaggcatcctcaggacagtttcctgggcttaagatgccatgcaatttagagtgctgctctcagtaaagaaataactttaccctcaaagccaggcatttcaagaaggtttatcaatgaatttagtgcatttcacaaacaaggaagcttaccaggggtttttaggccatataactgcatagcctgtgaaagatctctatagcatgtcttgcttcctgactttccaacttcacttcaattaattttgtcacattgctcccttttcctttttcttccttaaacgtataaaatgctgtttgtttttttttttttttttttttttggctgtggtcgagagagaatggattgtcctgggaaaggcacaaggaatctttattgtaaactaatgtgtggaacatttttgtacagaaatagctaatgaatacccaaagcatgctgttgcttgctgtttaaatgtggtttcatttttgttcagctctagcttctaagtgtcttaaaaggagaaaacttacttttcattagattcatttaaaactttttcaagagaggaaagtcctgagggtatagaaactttatgtacttaaatatatcatgttaaggaacttcacaatgtttcgtttatatggggccaaagaccacagatccaccccgattgctaattattgagattgcaaatagcttatttcagaacttagggtgagacaaaggaaacatgaaggaacaaaaggcccaggataatgaaaaggatattgtgaagagaaaggcctgtagaattatgatgcaggtcacatcctgtgcctgcatttaattgtacctttgtatttaataataaaaatgattacatgctcactgctaacaggtgtccctgcttcagaactgtagtatggataggtgacagcaaattactccaattcataaacttggaatattatgcttttattttgagtttcaccagtctatactagaatacattttctgccaaaatgtacatcaacccaggaagatttttaaacttagcccctgataaatatacataaaacataggtgaatattttaaagtataaatgaaagaaaaaatcaactttgccaggcacttaacacattgaggttgtattaataccatagtcacatttctagttctttatattttatataagctttgaatgtaatgtaaattagcagtgatgtaagtggtctttctgttagaacttaattgcctcctttatgaattttctctaattcttgcttaacttgaacactttctgtaactgcctgtccaaaatatagcccctgccctagggatttgttctcctctgtttttccctttattgccattattgcaataacaatgttcttattaatctgtttgattttatctgtcttcctcattagaatgaagttccataggacagagaccaaggtaatcttattctccctaaatcagtggttgcctagtaccttgaccatgcctggctcataatgtgtacccccaaaaatatttgttaaagacattygttaatctgccacttaccgtcttaatcatataccaaaaaccctgcttgctaccttaactttatcactagcctcctccctttgcttatgttttcaccaaagattttgtggttgaagacattctatttccattgtctgttgggtagctaggtagagagataatagtcccccttgatcccatgaccatagttgaatggaaattgaggggttggggactgttcttagactctttaagccttgagcacatttcctttatttgatcagcctctgaactgtgattcattcatatttgaatatctgctaggtagcaaaggctttggcaggtactggggaagcaaatttgaaaaagatgcactctgttcttttaggaacatatcattagaattgatgtcccataagtctgtaactgtgtctctttggctgtgcattatagactcagttcctagcacaatctctggtacattacaagtgatcaataaatgagtgaatattccatgcaagtatttagaaaatagcttgtgctgtaataaatgtatgtacaaagttctctggaaacacagaagagggaaggccattgtgtctaaaaggagtcagggaaagtttcacaaaggaaggattaaaagttgagtttaccagtttgggtaagatgtaccacatagtaaggacaacatgagcaagaaatcagaggtgtggaagagcaatattttatttgagtttgggcactgcggtcagtctggaaatttaggacgaatgtgaaggagtggtgggcattgaggctgttggaatcattatttattcccttattcaggtaccctatgcactaagtagctcctgtggcacaaacaaatcaccttttatttatagtatttctatagaaaaaagaattgagttccaaacatacagttttgaagatagatcctgtttataaatggggattaactttagtagaaaattggctacattgcctatatgttatctattgctgtaattcttcatacagataaccacaaacgtgaatggcataaaaataattagggtttattgtacatgcattggaatgctcatcaggtggctcttctgatatagtctgggtgggctgggtgattttctgttctccattgaacttgcattcctctgtggaggtgttggctgtctgtcagctgaagtaggatggctttagctcagggggctactcaacatttgctgtcatcttcctcctggtaccattaggctaacctgggcatgtccttttaatgacattggtggaggacaagggcacmagcagaaacatacaagtgttcttttgagcctctgtttctgtcacatttaccaayattccrttggccaaaacaatttcacatgggtgagttgagagttagagtggggcactgtgaggactcaaggcaaagggcatggctacmgggaggggtgaaggattgggacaatttttgcaatatattatatagcccatactgctaatcaaatcaaagtttatagatctaacggaagcgtacgatttctgatttccttgatgaaacacttatcttttcagctttactgatgcccagtctctttttgataggctgggggaaagtcagagaaaccagaaatgggaaaaggttgaagtgagatcttgaaagggataggtaattattaacaattagctattgcatgcattgtataatttcagatgtacccggctcatctccttttataggacrctgaagcccaaagcagcacagtgtatcacccacattcccccagccatgttaatgacacaaccaaaagttgcaactcagtcattctaagcccagagccattctccacaatatcttttaagatacattctccctaaactgcctcatatgcctccctgaccccgtcactcctcacacaaacaatcacttttgtaaatggtttatgtttgaaaattgccttgttatcacaattcaccatgaagagtgggttcttattttgagttttcctttttaagtttacacatcataccttaaagcaaaataatccccttatgtgcatgcatgtgagtacgtgtgcatgtgcacacacatgagcatacacacgcatgcctacacacactcattcacacacacacaccacacacacatccctgttttgccctgcctttacctgaatatttccaatcagaaagggacattttgaatatagtggttatattaaatcagcttgagtttggtaggtgaggctttgaattatctttgctagacctctaagggggagctgccagagaggtcactgtgacactctcagtctgagacaatgaagcmtggggaataaatttagttagaaatgagattaaagctttagggaggtattgtttcttaccagcatcatttttcccctttcttgaagtagtcaaagtgattgctcaagactcaggtcaggacacagggacatggaaggaaatattctcaacatttcaacagtggcagtttttarttgatgaaattatggacagatgctattctaattgagaagtactttttctaacaaatagagtttctatactggcaggtagatatcagatcaataagtctgtgataagcataccatttaaaagtatgctatattgaaaggaagcttatatgtagactgacataaataagagttttagacctgaagaaacaagaaaatcccaggtagttttatacctgtgtttttttcatatttactcattcttcatactctatacatcagtgattatttttctttttttgagctattttgcatgttaacatagttgccaaactttgactctgaggagagcagtattgctgtctccaaaatatttatatttgaggcctatcttttagacagttacattctaaaatatgtgtggtcctgcatttttcacttaaaatatctcttattctgctctgtgcaaggtcattgaggattaagacaaagttttctctaccaccatcaaccttcattctttttggtgggtagattttatattttgtttctctaaacaagagaaaacagttwtagttccacctcttgtgtgcttcctctcctatgagttgtaggctcagtatgtgcacatatgcaagatttcaagtgcaaaagagaacagagtcggaaacagattttcacagttcccgtctgggtccttgtgtaagtgccaatgtaaagctattcggtgattagtgaaaaacagtataatgttgcctggctctaaggaaacagctttgaaaatctaaacttaataagcagatcaattaggtgggggtttgggattattgtatcacattccaatggcatgcagtgttgtcaaaaacttttttctccagaataaaaattacaggaggcatagagttacctttcaaaatgtcaggaaagagggttggggaaattagttaggaataatgaaaatatatcacgtatatctcaggaagcatatactgtgagcatctgggtatctcagggtaaggggtaaggggtaggggaggaggaggtttaccctgcatccatggaggtaaatggattaagctgaatgtctgggaagacgaggattgctgggtggaggtgtgaggcccaggrctcggggataccatcagattacttgctcctcaagttttgggagctaataatacctgtgcttgcatttccctgcaaagcaagggataccttctgggataagtcccgagggaatcactcataactatttctgcttccctcccacttatttaacataaatatagggcctagtttggggttaaattcagattttacacatttatgtctctgtcacatttcttgccaccaacttactgaagtctgaaatttctttaacaagaggaagtattccatcccatagttagaaatgtaagaatttcaatacctgtttgtttaacacagcgaatgagattaggctaaacttaacagtaattggaaacgtattctgtacctgctaataactagaaaaaaaacaaagacaaacaagtaagcctttctgttttctcttgagacgtgggaattgtacagtaattacagtgggatgtaagtttcaygaaggtagagatcaccctgtgtctttctcagttatattccrtgcatttgtcacagtgcctgattcataacaaaggattttcatttttgtaagtagatggacacatggatgattctagtatcataaagactatttaaaaaggtgtatacaagataaaatgttgacccagaggaagcagtgaataattttgccctggaaggatgcagataaagggagactttctgcatccctccaggagatgcagaactagacatttgaactcgatcatgagagatgaagagaggtttctcagaacttccaggatggtatccagccagaagaataagtgtgtgtaaaggcaaggtgggaaatgacatgaatgttcagggagctacaaataatttcacaattctaggtagtatgaaccatggcagacgaggatcatatcatgaatggcctttttgtgtaagtgacatctcagatttgagtcaagacagctgctgctgggaactggggagtggacatagaaaaacaaggaccataggaacttgtttccacctcacattttaaactgaagttaagcttgcttacctgcagtcatattcagatttagatgctaattagggaacatttgttagtatggaagctacagagcttgaagaactataacctatactgctccaatgagattttatattttaaacacatattaaaagaaaattttatctttttaaagtcaccttagagtcagatgaatgtataactgttttctaaaggaactatcatttcataaatggaatttctgcctggttcctttaaatagtggcttcatttaggatttaaaatatttcatttacacatggctttccagaggcttcaaggcacacctggatgggtgagcgtttctctaagcctatggtaagagcaagcatgacttggatttcttgtactaccagatatgtgcctttgtggggcagggtgtttccttgttagatatataaatcaaccagaaagattgggtcggatgggtactgtgttattttcttaatttaaggagaagatctataatggaaattttatttagtttctttggactgttttcatgcatttagttttataaaatgtattccaattttaagcaaggaaccctacattaataaaaattgatttcttcagcttaacttcaaatatgattttaagcaaccttaggatcatgctgagttgaaactatggaaccgctacccttyccacttatagctcaactactgctattgkcattgtttttttcttctactttcattctattaattgttagataaaataactccttattttgcatgttgaggtttaacataagttctccacttgatagagcatttaattttggggggacrgttcttagccgattatattagttcagtggttttagaataagacgtttgtggggaggggcagcagaatcttcagtcattgattctctctttataactttgcccttttagctggaacagattacttctgtagtgctgctagccctgcacagactgaatcacaaggaagaaactttgcataaaccatttatactaaatgtttggtatgctggcaacataaatcaacaacaatatccattacaaattcatccctttatcagtattatcttgatagaactgatcccaatgtgtgggaatttgaaccctgcttcaatacatctagccctggataattaattattcagggcacagagaacctggcccctgcaatgtagagtaattcttcctggtcagcgttaactccactggcaataataaatagaaaaagtctctagtgatgccagtattttaaagtgmttaatcatctttccccccttctcctcccccttagttttctttaactaggatttttcagcaataaatctttaacaatacaggtaggaattgttctgtaattaaattttgccctgcttaatttcttaccttttatgtgtgattaaaaaaaagttacattttaagaagccctgatcaaaattcaaaccaagaaaaatccttttacagaatactgagaaatgctctatggaagataaagctcttgattttgaatattagatagagcacatacacataaaaatactcataaaaattgttcatcaacaccagttggggtgtcaaatattctaaagttttgaattgcttcactttcatgcttacgatttgtctgtattaggaaaagcctgacatatacatatgttccaacactgagagaataattacttatttcttaactttcagataattgatgtcagctctgtaggaaagggatattttcactatttttatggtacacgaaatgcacttgctgaagcggcaggtagatgcctggctgagaatgaccgtgtattttaaattgtgccctgtcaagctgcccagccatcatgcatatcctgggtgacagggacagatgtgacatatctgttgtgacacacttttgtaccaccagtctgtggctcgaggtgactcctctccctcccctgatgctttccccgctgcaggacaacataacgatgcacggatgaaccttgccattgctctgactgctgccaggtatggggctgccacagccaattacatggaggtagtgagcttgctcaagaagacagacccccagacagggaaagtgcrtgtgagcggcgcacggtgcaaggatgtcctcacaggtatgccaggtntctgggagggaggtatttcttagtatcttgcctagcytatataatgactgaattataatttttctgtcacttctctttcatttatgccacgcttcagagtcatattaattatattcgttattgtcagcaatgactggtttaacgtgaaaatttcccttgtaggacttggcaatttttcccctttgtattatagttgtaataatgataatgataataataaaatgcccaccaaattcccacagctatgaatggattcctttttctttacaaaaacatgttattaataaaattaaataaatgtgccaagtttcaaagtatcatttgggtgacacaggcattgttacacgttgttaaagtgaatctttaactttatttagattttcattattgccctggctctagcgccatataagtaggcagtttccaaattatatcgtttcttgaacaaaagctctatgatatacattttctcacagcagtgctgctcacacatttgagttttcaggagaaagcggcttatttactcattctactttttcatgtttggtgctttgacgctgggcacttataagatcgacagaatccataatgagaaagtggaatgcttttctttcttcaattccgacttgtttttggtaaattcactcagatgagagccttttgtttggctsttcaataacttgagctgctcaggtcacttagtgtggtatgcagtatacttcaccatgggttaagttaatagatgaattagtaatacacagcatccgttaacagagaaacaaatgaggtgtgtgattgatgccactttctttcacagggcaggaatttgacgtgagagccaaatgtgttatcaatgccacgggacctttcacggactctgtgcgcaaaatggatgataaagacgcagcagctatctgccagccaagtgctggtgtccatattgtgatgcctggttattacaggtaattgtcttccaatgtggcagttgtcacccaaaaaagagggtcagcagagattgtctggtttatttcttcttctagcatagcaatagatggtctaacttgctgttcaaaatcaggagaaataagtaaaggaactcttccaaaacacaaaatacaaaccagacttgggaagttttagccacttatggcaatactcgtttctaagggttaatgctttgggatctatttttctttgttcagtgtagtcaccttcagagactaagcattggtatttttgaattaaacttttacttaagtcattagcaaaattaattttgcaaaattttttataaaggacgtattttagttaaaacaataagacatgaattttgcagaatacccaaatttgcttatgaagaatctgaagatgtgggctacccaagtattcttaggtttataacttttgaaatagattaaaaaaaatattgtagcaagcaaaaaccagatatatctaatctatcaaattaacaaagataattgaggatgaagaaatgggcaggagtagagataaaataagaatagctattaaatgaaaatcatttaagctgggtgatgggtacatggagcgtcattaaactctttttatatatgtttgaaatttttaataaattacaaaagaaacatttgtgtggttctggctaaaaaataattacccataacgtacattttaaggtatttatagaagaaattcgtatggccatgctaagggtgtagagcatgtgtactgtttttatttccatatgtggtaaacctagtaggcaaagtagtaattctatatgaaataatgacttatgtgcaacagtattcattatggcattgtttgtagttgagaaatattagaagctacttcagttcctcaccttagggtaatagataaataaattatggcataaccacacaagggcatattatatagtcattaagaattataattataaatacttttaatgccctaggaaaacactaatgatataatgtcaatttagagtataggacttgatattttatgtgctgtaggttctaacaatgtatatagaaaaagactggaaggaaatatgttaaatgtgaatggtgattatttctaggtaatatgattatgggtgagagttatttctttccatgttttaataattttccataaagggaatatacagcttttaatatttgataaagtggatgtgtagaacctatgatattttgtttaatacttccattctcctagaatgctatcctgctatgctatagatcatgctgcctttttagttgttggttgtccggtaactaaatcttcctgaagagtctaagatgcacctaattggtaccagatacacttctgagaaaatcattaaagagaatttcttatccaccaacttccaaggtttcctttgcgttttcaaaatgcgtatgtgagagaaataatagtctttaggatttttactttggactggagacatcaaggtgcctcttaaggcaccactgcataagataatagaaatgtatgcagtggtacctaattgagtttttaaaactgttraccagaagcttagttcaaatgaaaaggagagaaataaatatatgaaaatgtcccatatgtttctcgtatatagagaagttttcaacattagttccagatgcaattgtatacgcttttgtgttcgattaaaaatatctaaggccagctagtttatgagtttttgtttgtttgtttttaagtatctctaagaatggagtgtagatgtaatcatcatacatcttatatttgtttagcttttactagattcaacatattctcatgtgttgtgtgccttatgttttcttcactatcatcccatgatgtcagaagacagagattattccccacagaccttatgttaattctgtcattaaataattaaataatttgggacaagccattttattttgtgaaccttagttttccgttcattaaaatgggcaaacattctgctccttcagagtttagagacaaagagattgttcgcagaattaaagtgataccttgctataggacttctggggtttgttcatcacttttccttgggctgtgtggcctgggcaagctacttctttcagcttctggttccttatatctttttttttttttttttttttttgagatgaggttttgctgtgtcacctaggctggagtgcagtggtgccatcttggcccactgcaacctccacctcctgagttcaagtgattctcctgcctcagcctcccgagtagctcgcccgccaccacacccagctaattttcatakttttagtagagacagggtttcaccatkttggccaggctggtatcaaactcctggcctcaagtgatctgcccgcctcgcctcccaaagtgctgggattacagacgtgagccactgtgcccggccccttatgtactgataatacctaactggtataaggtttgacaatgatccttggattattttttctctgttttatagagtgctgtatccccagctattggtacggtgtctggcacgtattagtgcccagtaaatattttttgaatgaatcctcctaaattttttatgttaacttgcttatattgagattgttcctttatttatattaaaactttaatgtaacatttatgagattttttaatatagagaattcaaactatgaaaataaaacatgattcttcaacttactgcccagctaacccctgtagacaaaaataaataaataatgtaagtacataactagaaatttcaatcatcatagaaaaaaatagaaatatgaaaatgaaaattgaaagcctgactcttattccccctaccttttgttccctcccccagttcttctctggtaattaataacctcttcttccaattccttccttaaaatcaygtttttacaagcacaaatgtgtattctgttaaaaattttgtgtgaaagtggtcatgttgcatatattgttctatattatgctttatacacttagtaacagagtagatttggtgtcttttaagaataaaggtatatattacccagaagtaatattttaaaaattctgaatcctaaaaattcagcattagctttaggtctcctgaagcatgaaggtgttagttacagctaggtctgtctcaggctaagatgcagtaagtgacctcattctatgttgggagaaattaatatccccatttttggcactgtgagctataaccactacacatcctgttggaagctttgaaggaatggtctgcagcctagttcccattcaggctctcttgcagatgagccccttctctttggattgtgacctagattaagggttcattccctcattcaggactgaccttgaggcaactgtacttctggcatcccataggggtggttttcctcttcctatcaagtcattctcttgggtgatattaggagatcccaaactgaaatgactctgtggtatcatcagtcaatcatacttagcagctgtcactcaacagttttgactaggtcttcagggatgaaccaaagcttctggggctgccccacaactggctaatgataatttaaaaccaggcatgtttcagttagaacctgatccatttggaaatgcagtgagttcagcaagcattgatttattgtgtgtaggctggtaaaggaagagtaaggaaccatatgtgcagtgtatcttcttgggctgttttcagaagtatctttayagcatttgttaattttgttgtaactttaactaatgttccagttgtggaattatcttacaccatgatagcagctttttaggggaagaggggaagaaggaaaaattgttttaatttcggaaaacacaacacagaaattatttttaaagctgctctttatattaagaacaaatctggaatttccatgagagttatgggtagatgctcttccaaaagcaatgataatacaccaaacgactgaaatacatgaaaataatcatctctgtttagcctactggtgctttttactactgacaagaggtcaatttttttcctataatgtgtgtacatactgttagctctaacactgattgctaagtagttaacaataaattgatttcagtttaactaagggcacttcaggaaagtgatggtctgcatgagaaaaatattcattacatttaatcctagacacacacataaattagcagcaagcttttcctcctgatgtcaaatgaatcatatatattgaaaaaagacctatgccttgttgcattgcgtatactatcgctatagttgatatccattctcaaactttagtgtgaacttgcaaaattgatccttcatgagaaaacagacttttcccgaagggaaaatatgaattaggtaatttagaactgatgaaagatatttccaagtggattcttaaatttttataccattcgttaatagctttgtcttccctctgtgcttgttaattttatgtttgtcacatatgtcttcacttaagcagttgattctctacaggttccagttacatgtgtgttggtaaccatcatgttcaccttttaaactactttattgcattgcaagtttttaaaagattcagtagttgtgcatttctaatggtatttcctttttaggttgatgaatattataattttatgattaaatttatcatgtttattattttagacacatcatatgatgtctrgtccttgatatagtcatataaaacatgtcagcatataattcgtttatcaattgttagaatatagaatttttttgtttcaatatacttctgtttatcaaatagaatgaactctgagtgttctaatctcatttctaatctcaaagtgactgatgtaatctaaggacatatcaatccaggatcaaaaaatatacttagaaaacatgtgactagtttcttctgagatttttagatagttttatgataaatacaaagaaaaaataatcatatttagagaacaaaaatacttgttatttgtagttttcaatacattagagtaaaagtaaaattattttctctaagtaaccctgagtgaaggtgggactctgagctgaggtttaaatgattgcagacttccagggtgctttttggattagctaagtagaagaacttctacctactctctccgatgtgtctcagataggctgtgaacagtgacttctttctgctaaggctgagtagacatggcaagcgtttcatgcggctgagggttttttgaagagaaagactcactccttgtggtttaaataaagaagatacattagttaagctgcctatatgtttctttttttatataaaatattatcattattttttacacagttgttaccctctcatttttacacattgggataaatcattttttaaaacatgttaagggaatgatgataaagataaaaatctgactgtgtgtctttttaaatttttgtgtaagaggagtttcttgaaatttgttcaaaccaaatagaattacgtttccatattaaaaaataacattaatagaagctaaaaacatatttatagaaaatactagtaacactggcttgatacaagaatccagtcaaatagaagcagctatctgaagatttgtagtgttctacttgaataggacactttaagattcctctcactcttttaacaacatctccaaatttctttgaatggctaaggaatgaaataaaacatcagcttttagtgatttaaaaacaaaatgatgggttttgttaatgtttgtttacagttgtctcttctttcaaatatgttttattatttgattttagaatagtaaatatcagtaaatatttttgactatmgttttgggagattttatgtagtctttcagtagaggcagcattgtaccttgatttaacatagtacactactagtgtcttttatgtaaaagattttcattgctaaagtgttcctctcctgtttgaccttatcctaggacattactatttagggagtagtaaaacatggagctcttttcttctagatgtacattttgagatttttgtaacctcgaaataaagtaggaaatctcatatttggtgaagtggcacaagttcatctaggcataaagtagtaaagaactttgtgattacattttagtttctagaaaggtagacccttcactttcttatgtactcctgagaatttctactgagcgatgaaatgtcaaatgtctcaggaaaatactttggctattcttgaaaaaaggctgaagacatatccttaatttaccattataaaggaaagtatagacatttatcctgctgacattatctgatgtgaatggtccaaggagtatgaaactcaaacagtaggaagttgaagcccactttcttaattagccttgcattgttgaagtggggagggaaggggtagctctgctgtggaatattgttatcatcacatttgtttcattctgttttgttatctaagttatttttttcttttaggagyytctagattagggtaggggaagtgcaagtaatagttcatatctttcttgtttgcatatttgagaattaatgaataaatagtttttcgaatgcagattaatgttaaacttctgggattttcagaaataaataatccttctttgtatctcagcccagagagcatgggacttcttgacccagcgaccagtgatgggcgagttattttcttcttaccctggcaaaagatgacgatcgctggcactactgatactccaactgatgttacacaccatccaattccttcagaagaagatatcaacttcattttgaatgaagtgcgtaattacctgagttgtgatgttgaaggtaactaagcattcctttaagtttgtctctctstgtccatatctcccaagccattccagctctcactggataaatgctatgtctccagtctgactcatcttcacacttgtcctcttgtgcctcttagaacatttatgagggccaaattttaacataatggggagaaattgccttttctcctctactttctatacccacatgaaacttatgcagtcctcttctgataattcctaatggcaagatcagagtagcccctctagctctgaacactcatgtgcttccagaaaacgatgaaatgtgtacatcacagtttaatttctgcagcttaggaatgtctaatttacagatgcaggatatcaataggaaataattaagcaaataaacgagaggctggaactgtatttgtaagatgcttaatagtctgttactacatggaaagtataatgttgaccagtgggcttagcaaagaaggataagttacttattttaatggaaaaagccaaagtttacttccttcctattcttactggggcatttcaacttgactgtcagagcattttccttggtgatttatatagttttttgtttttttcattcaggccagtctcagaagttccccaacattgtgcttctatatttcctctctcagttgagtctcaccatgcatctagtcactcaaattagaaatggtgtgcttatttttggtatcctttctctttccatatccagtctaatgcctatctatgcttattctgaataccaggcaggtccatcagccacttcattgccctggttcacatctgtgccatttctcacttgaacagttgcattggccccacaatggcctctttaggtcagktctctatccctctccagtctaatccttctaccagaattttctttctaaaacacaattctgatcatcacttttctgcacaaatatacactttagatatcttctcattgactttaggaaaaatgctaamttctcttgcatgaaacataaagctttttgttttgttttgttttgtttgagatggagtctcactctgtcacccaagctggagtgcaatggtgtgatctcagctcactgcaatctctgcctcccaggttcaagtgatyctcctgcctcagcctcccragtagctgggattacaggygcccaccaccacgcccagctaactttttttttttttttttttttttttttttttaagtagagacagtgtttcactatgttggccaggttggtctcaaactcctgacctcatgatccrccggcctcggcctcccaaagtgctgggattacaggagtgagccaccgtgcctggccgaaacataaggctttttacaacttgtctttgcatgtttatattcaactactccccatccctgcattctgtggtctaatcatgtcttattagggtgaatattgttttattaggtttcatgtcttattatgttgaatcttcgtgtctaatttaggttgaagccttgctctgggacacccttttccccaactcttcatcttggcaaaatttytatactggagaaaccacctattctttgtattcctgtgggatgttggtcatatcgtttgtatatcacaacattatattataggtaatagtccaagatgtattctcacttgaagctccttgagggtaaagattctttatttgtgtttagctacaaatcttgattatcttatttgtatgctactcatgattgttttgaattaaaataagttagttatggattcatggtttttgatatggtagccatttgaaaatctatattaaagtatacaagtttacgattaaaaataatcttcatatatttatatcagaaatcttataatgttgatgtcagtgaaggacatggaaaagcactatgttagtctgaatgcaactcactagcatctgtgtatcctttttcccyaaaggatttttttttggttatgtgatcacatttgtaaacaaaatgcttcaaaactgcttcaaaaatggttcaggtgactcctagtttaattgactaatccatattgtatagtattaawtgcttttaatctaaagtaatggatgtaatttcattcttaagagtctctttggatatctacaataatagtataaaagatactaaatacatatcattgaaatccatgtgtggttaaggtttatactcacacacatacacactcatacatggtatttgaaaaatagtttgacttgtttaacatccatgtttaaatactgaaactgcattacaattttagcttggtacttttttttcattttgtgttctaggaggagcttcaacattggattatgattatattttaacatattcattattgttaatgaatcttccttcatttgtaatttatctgtatataatatttgttgaaagtgggtttatatctgggcctgaagatcaggaagtttagattgttggagcaagatataaaattaattcaagagcagagaactcaatgttgacagtttccaaaatcttaaagttcaaatgcagcgaggatgagaaatgtaactccttatcctgctaagaagctggatgtgctggaagcaggtgtgggttccagaaggctgccgtgcccatattgtgggtggggatctctacccgtgaagtgagcgtggggctttaacggagactggatcacttatgttctacctataaatacatggaagacttggcatacctggttggtccataaaagtcttttcaattaacataccattttgtagtcagcgaattggtgaaactaacaaatagttattgttaattctgatgtttgataagagtgtttgaaattaatatctaaacattgcaaaccaggtcttcctcctggtgatctggggacatcttgagattaagagtcctccagggtaaaaagcagaaatgacagccctttcctagactttattgatttccctgtgtgcggcacctgtcacaacttttctacttataaacttactcttcaaaaaatagttaacagtgattctttatagcttcttttcattcttatttctaattgactgaaatattcatatttgaggaattatgcttgatcttagtaaagagtatcagttagctgaagtttgtctatatcttaaaatgaggccagtcaaatccatattttttctcaaggaattttggtgaaagccactattctcttctaggctgatgaaatgtgaaagagaagctcagctttagccaccattcagttattcaattacatgctactgttaaacatattttaatatttatagttatatgcctcatttttaaaaacttcctattattgagcacttcttatgtgagacactgctaagcaagcatattacctgttagatctttgattcctccttaacaaccttatgagatttatttaataagtcccactttctagttgaagaaactgaggcccagtgacattaagctttttttttttttttttttttttttgagatggattctcactttgtagctcaggctggtatgcagtggtgtgatctcggctcactgcaacttccgcctcctgggttgaagcaattctcctgcctcagcctcctgagtagctgggattacaggcacacgccaccacacccggctaatttttgtatttttagtacagactgtgtttcaccatgttggtcaggctggtctcgaactcctgacctcgtgatccacccgcctyggcctcccaaagtgctgggattacaggtgtgagccaccgcgcccagcttaagctttttgcctatagctagttagtattggagccataatttgagtataagtaagtctggttctaatacttgtgcttctaaatattgtgcagtactctgattgttcgttctgggtttcctgatgggatactatgtgcactagggagtggtaagcttatcaattcatttcatggaagctgctagatacctttagcatgacaatgacctttgctctgcactgaccttatttgaatttgaatgttaaactagaggaggtttcctgtctcataactaatcccttgggccagtcttctttacagatttaaaaaataaaatttcatttagatcctagagcaatagttttgaagtgttttacattcaccagggttgaaataatcattctaaaaggatttattaaatgggtaagtaaaattccaacaacagtttctgagcctccccaaatggctatatccttaagaaaaaaaagtgtcaaatcttaacactccatgctattcacagcagctgccacacttctgcaaaatgcgtcggaacaattctgaaaagcattttgcctgttgggaataagaccatgtcttcttttacaatttagaaagctttccattcacaggctgaattttctagattacttgtttgttcttttctgaaatgggtaattgatagttctgcgtttcatattgagttaggaagaaaaatgatcttttgaaaaatgtatcattaagtctgctgtgtagaggttaatcagaaggatgcagtgacaaaactaagctrtgacttaacaggattgagagagacagaagatttgctgagtgctttatccatgtagtttttcctggagtacttctttaggcagcttctctacttgtacacaggttttcacataggcaattagtagtgtttatagattgcctgttattcaattaacaactgagctggccatatcaactcactgcagacctgccttttcattgccagagattgtaccagggttatcaacttacacaggcttggatgtcttccagctgtttaattatagtgtcacacgctttgctttttctagtttcattagtttataaatgtaatatggtatcttatttctgtgattaacacttcatttcagcaggttaaacatgctggtagagaagtattgatttctgacactatttcccctgtgttcatttagatattttcacatgccttttattgattgttttttgaaagtggcaaacatgaaaaaaaaacccccaaaacatatgcctaaataactaatgtgaagctaaaccgcacatttacctcttaattgtcacttcctgtgggctttattttctactaatttttaaaacaaacacttatcttgccaagtatgagtaaaaatatgaattatagtttgaaataatcacatcatacttaattttttcaaytagccgtgaaaattgtctgttcaacttttctatttatattttaccctttacatattacattactaaaatctgaatgagttattttttgggaatgtaatacaaatgattcttaaacatgatggtaagagtattttactttaatattgccaagtacttttatagttgtcacttaaaaaattaactgggtgccctctaggtgagccagtctagtaagtggtctttaatgatggatttttctcaactttatttaatagtagtttttttctttcatcttgttttatttaaagcattcatgtaatttggaagggaatatccagttgttcaatatatagtcactagaaacctacatgaagcctagcatattatctcagaggcccaagcgttcttgctttggttttggtaataccagctcttatagtttgatataaaaagtttagagaatgctttaatattccacttaatatttactgataactgtatatgaccctttactagatacagtatttggggtattgaaaaatattataattgacactgctggagactttcagcatggtgagaaagagatgaagcaataatgaaattttgttaagctatcctggcagtatgagaactagaaaaaatttgagctgtaaagcatagaggccatgagttatgttattttcttcacatgttataccatggacagttaaagtgggtgatggtcatttattaatcttgactgtaacctgtatggtaaaactggtttctgggtgagaacttgagggtggaagtacttaattgaatgaaaatatgtttcatttgtttgaatttatgaaattagcaagagaggaggaaagcttgaaatggtacatattgacatgagtgacaataaagtgtttaggagctattacagcagattttattttattctcatgagcaaaggaagtgcagtccaatttcagtgaaaggatgctccgttggagatgtaggcaaggtggccagtagaaataactagcttaatctaccagacaagtctgagatctactgcttggaggctttttactgtagagctgctctgtgctatatgatagccatcagccacttgtagttatttaaatttaaattagttacaattaactgaaatttgaaattcagttgctcagtcaggtgaaccacatttcaagcgcttaataaccacatgctactaatggctagcgaattggatcgtggagctatgtacagaatgtctccatctctgcagtaaagtccatgggacagtgctgatcttgagaatctagaggtgtttaaatatacacttagagaaagacatactmaatttaatagaatcgttgaatttgggtttttttgtttgttaagtaaaatagagaaattcattatcttgtaaaacaagaactccagacacaacaagcctcaagaggtgattaatgatttgtcagggtctaagatatattactcttatttatcttcactctgccatcctccaaggtggtttcatcctaaggttgtttcccctgtggttacctcatggctgcaacagcagcatgcagaatttatagatatcccaatgatactttattcagactagcatctactaccttgaatctttcttgaaaaaactttcgttagggtttaacaatgtacaaaatttccactgtgggtaaatacgtgatatggagaggaacctgttagcttcgtcagttgctgtcttttattcaagaagttggaattaatgtctcacatgtttagctgtgctgtgccccttagacatggattatacccaaggtcctgaggagtcattactgaatgagtggtgaggaggtataagctcttaatacttcagtggcaaatagagttttgaatcatccataaaaaccattacatctcaaggttgggaggggaactgttgtagataacctgatccaaccaccttctggtctaatactgtacaaatcctgtaggccataaagactaattcatattttaaataaggaaatttgatcatccttaaatgtattatttttaataaatttattcccaacattcaactgatataattctcaggctaaaaagctgaatcctaagatgtcaagcaaagtaaattaaagttcttaacacattatgaaccctttgtgactcggaatcttttcttaactcttttttatttttgactatcaactccaggagtattaaaaatggtatcaatatagataatgttttacatagtgttcctggatgaatgaaaaacttgaatgtttcagtttcagacaatacaatttcatagatgtgcttttctgcctgttataacagaaaaggtaaggcatttgccacagattatttgcatatgcctcaaatttactcgcaaagcctaattttccatcaaataactttaaaattagtcagagagcttcaagagttggaaccaaattcctgatcagtgtggctacctaaggaatttcacagacactagagggactgtggggtgaccacaatgacgttgtaagcgggtttgctaacttttatttttatctcagagggtgatgtgaactctaatggaaaatagtggtaatttcctagttaggtttttggtaacgattaaaacactttttacaacttgttttgaggttttatatgactggtaaaattgtgtaaagcaggaattaatccccattccacagaagccatccagattaaatctatttaagagaatgcacacatcagagggggcagagctagagatggaatcccagcattgagatcctgtattgtctccagttagtaagactgagaaggcttaggctttcctcgccagttaattatgttggtatttcagttacagtgtttggattatgggtttgattaaacatcytgtagaggtgatgggtatctactctttcagattatagttatgtcaagagtgtagcctttaagaatctatagtaaaatatgccagattaacttgagttgaatttatttttagcagaaacctattattcattttagatcaagatggagaaattatctgtcatccaacatagcttgttttgcttatacttggtaaggcatggttttgttttattttgttttgcttcagtaagaactgttccaatcatttcaaggagtctttgtgactttttacacaaagagtctgctagatatatacctaactacttttcaagtggtgttgtatataaatatacaggatgtttactgtacaaaggcacatgaccaagggttgagtggaaactgaaatccagccctgccctctgctcacaaaactgtgatccctgaatgggatttatggatttgaactaaaacatggacatggtatgggctaataaaggtcctgatacttccatattctatgtaaaatatttccttaaccctttcgtaatttgagacttgaattatatcagtttatccttttatcttgatttttagattatggttaaatatgcagaacataaaatttaccattttaaccatttttaagtgtacagttctgtggcattacgtacattcacattgtcatgcaaccatcaccaccttccatctccagaacatttttgtcttcctcaactgaaattctgtaaccattcaatagtaactcttattccccctctcccaaccccttggcaactaccattctactttctgctcctatgagtttgagtacgccaagtacctcatagaagtgcaattgtacaatatttgtcctcttgtgactggattatttatttagcacaatgtcttcaaggttcatccatgttgcatgtgtcagaattttcttcctttttaaggctagataatagttcgttgtaagtgtatgttacattttgtttattcatctgttgatggacacttggtttgcttctaccttttggctattgttartaatgctatgaacaaggttgtaaaacttttctctgctccatttctttggagtatatacccagaagtgtaattgctagatcttatggtaattctaaatgtttaatttttgaggaatcgccatacatttttgatagtagctgcaccattttaccttctaaccagcagtgtacagggggttcagtttctccacatcttcaccagtatttgttattttctgtttcgttttgtttttgtttgataatatccattttaatgggtgtgaagtggtatctcattgtggttttcatttgcatttcccgaatcattagtgatgtttactatcttttaatgtgcttattgagcatttgtatatcttttttggagaaatatttattgaagtctttcattttttaattcaagttgtttgctttttgttgttgcattttaggaatttctcatatgttctgcatatatgatatattcttatcagtatatgatttaccggtattttctctattctatgaggtaccttttcattctgttaatagtgtctttttaatgttgatgaagtgtgttttatctatttttttcttttgttgcctgtgcttttgatgtcacatccaagaaactattgacaaatctagtgtcataaagctcttcttatatgttttcttctgagttttatagttttagctcttatgtttaggcctttgatgcattatgagtaaatttttgtatacgatataagataagggtccaccttcattctttcacatgtggagatccagttttcccattatcttgaagttttcaagactatatacagtcaattttttatcagtatgggtaattgctgggagtatgatgaagaaggagggcacacatgaccccaagtcacagttgaagcaaaattatactcatgtttctgttatccagcgatggattagctgatttaccacaataaatgcagcaggaccaggtaggcattattttcccagtagtctatatcatcaggcaactttcagtctggtgcccatagtcagctcccatagctaagccattcctgaagctggtctacatgaagaagggcagattccgaaaattctgccctagggtcttgcccttgtacctgatagatgagaaccatagctcaccttctctcttaagtcatttttagattagtaatgagtgctgttcaacagctgtctaattctaatgaaaacttaatcagcctggatatagttgggcattgtattttgacagagatagtaaagatattttcatggcatcttgagtattgaaagaacttccatataatataattcaagtataatgtacctactgggagaagccagtatacctgtttctgtgtcagtgctaaaaataatggaatgagaaaagaaaaaaggcagagtatggaagttgtcagaagttgagagacagtacaatttaagaggtaagaatatggaccttaaactcagaaggaagaaggttctgatgctgttttaccatatataagatatttgccttggccaggtttgttgcccagcttggtttgttaaatgtttgcattcatctgttttctgatctgtatggtgagaataataataaccaatgctatagggctttgtgagattaaatgagatgtctatgtcaagtgtttgcacagtggtaggcctgctgtaaacactcaggaagagggtggtattgatgaggggagaaaatataatatcctgttacaggtttgtttaatttaataaggatctttgtcttccctgagaagagataggaagatgtattctagaaggaaatttaacaattcatgcatcgttagcattggttttgattgtttctgcttttttttctttcttgtttttctaactgctccaggttgcttcagctggaaggttgctaacatttgcctcttttgcttcctctgtggtatcaatgtcagtgatttccaaagttctttactttttcatggaaattatctttgtaacagaataattctttatgagtttttcttgtacctatccacaaacttagttctcatctttaggctttctctcctttttaaagtgcacacatgtgtattcctgtcaccgaactctttttattaactgtttaatatttttatcaaaatatttttgagcaatgttcataacccttggcattgattcctaccagtgagaagaggggatgtcctggcagcatggagtggaatccgtcctcttgttacagaccccaaatctgcagatactcagtctatctcccgaaatcatgttgttgatatcagtgagagtggccttattactatagcaggtatgagatactaccttgttattttcttttcttttttttttttttttgttatagggacagggtctcaccatgttgcccaggagggtcttgaactcctggactaaggtgattctcccacctcagcctcccaaagtgttgggattacaggcatgagccactacacctggccttctgtcttgtaatttggatgtgctttagatataagtttgacttaaattgtcctgccagaatctcttttaactttattgaacaagcattttttttattctgaattaagttttacacaatcccatgtttgttacaaacaacaggaaaattttgttattggtragttgataaatggttaattataagaaaaataaggggtggcaacctgatgaattgtctatcaatttctttataggtggaaagtggacaacttatcggtctatggcagaagataccataaatgctgctgtcmaaactcataatttaaaagcaggaccaagtagaacagttggrcttttccttcaagggggtaaagattggagccccacactctacattaggcttgtgcaggattatggacttgaaagcgaggtgagtgtgcattgccacatcatcttactctttacctaatctctcactgctgccagtgacagaactggcagcaatcaggtctcyctgattgagatttccttttgctgaatacatttctgccagtctgttatggaaggaaaaaaagatgatcttgctttgctttacttgcccaacaagcaatgtacactttatgaaatgtattttattaaaaagtggagtttatttggtttgtttctagtgtatagggcatcccaaattctgtctcaggcatgaagaaggctgttcttcagaagtggtatcaggagcaaaatgaagctgaagcttcatcagtcattgatgcagtgatacatgtgtaagagagttagtgctggcctaagcattcgaagcccaagtggtttccttccacaaaatcaaaatataatactctccgagagctattagttacaggctgtaagaaaactgacaagataagcatgtgtgctttttgctttgtgcctagaagctattgatattcaaagtgcctgcctaacgcagctttatttctctaggtggcacagcatcttgccgccacctatggtgataaggcctttgaggtggccaaaatggcaagtgtgactggcaaaaggtggcctattgttggagtacgtcttgtgtcagaatttccatatattgaagcagaggtatgtgaatggtcacataggaatttcatgtctgccatgggataccatttatctgttcatttgtcatctttaaaaattatatgtagctaagttttaatgcacatrtgtcagctaaaaccaggactactatgtctttccaayatagatccttttatttataaaattttaatcttaattctgaagtgatattgatagtggtaataataacaacataaaatataggtttcttttttctccatcaaactgtccctaaacgtgttaattcacrgttgtcccttttgtgcatttgcagctctttaagtttgtaccactcatgtcctacctacatatcttgtgacagtttctcaaaggtttaggtcttgtttcccatcaagctctccagttttgtgaaatcagagaccaggctttgtatttatttgtaattcactgtgccttaaaatatcgatgtccagtgaacatttacttgttgattgaattcaggattcctatattctggttactctaagacaaaaaactatacagactaaagaggtgagatcataactttttgacactcgtccttttcctagtcagctatgtaaattaaaatccwcattatgtataagcatagagaggtaagtgatgactgtggatggttaatgagaagtgatgcaatttgcatgtttatgccaggttctattcaggaaaaaggcattaactcttgtccaatttttgccattttccaaacctcctttggcaggcagatggaaaacttgtgtgatgccactatttgtctcatgcctgctggaggaccagagagtataaagaaaaatattacctttgtgaagcacacatttattttttttaagtgaagctttatttcycattttctaaagaagagtctcaactaataatttttctttaattcaaactcaggtgaaatatgggattaaggagtatgcctgcactgctgtggatatgatttcacgtcgtactcgcctggcctttctaaatgtccaggcagcagaggaagccctacccaggattgttgaactgatgggcagggaactgaattgggatgattataagaagcaggtattatatagaagtctttaaaaccacaattcntattgtaaacgcngaatggcttaatttgttagtagaagctagcgtagtttttgatgataaccttagatttcttaccagtttttctttgtgtgtgtttaatattgttaggccttaggaaaatggaaagatattccatttaaatttagttgtttatggaaaatctcttgtagaaaatgctcataaatttgtggtcataattcctgaaaaagaaagataataatgattgtagtatggaaccttttctggttttcattgaaaacactcttggaacataatcagtgaaatgcaaactcctgctagtgtgcctttggtaagaaatgtggtttttctgcctgagcactaaatgcttatcatttgtgtcatttgagattttatatttatattccaaattttaaaagctggtgatgctcagatgcatacacacacacacgcacaacacatacatacatacatatacacgcacacaaacacacatacagggttaggctaagtagatcwttatgttttttaattaacccaaactcttgtgatatgcagagggtaatgaagcatttttmtatattcataaaatactttctgtattcattgggttctgttcctttctcccaggatctcttgaacccatttcatttaggcacttttgccaccactttgctgcattagctctggtcaatctcaccagtaacctccatgttactcaataaatttgttaacttgcagtccttgttttacttggccaattagcagcatttgacacaattgattcccccttccttcttgaacaatattttgctttctggaacaccacctctcttggatctccttttaccttcccaaaactactactcctatagacttttccatgtcataaatagctatccttcagttactcaagcctaaacattagtatcatactttatgcattctcttataccctatctaaatccatcagcaaatcataccatatttatgtttaaataactgaattcaaccctttcatttaaaaaattattttatttttaatttttttttaacaaacacttgtgttgaagtgaattcaaccgtttcttaacacatccaacttccatcaccctgattcaggtcaccggtatctgtcacatggattaccgcaatagcttccctccccttaactggtgtcccttctttaacaacttcagagttcagtttattaatacaaatccagatcattggatatgtctgtgtgaaattcaaagggaaggcttgggctagagatataaatttgagttgatatttaagccatcagactggatgagattatatagggagttaatgtagtcagatgatgaaaacagtccaaaggccaagcactggagcacaccaaagtttagaagcataggatataaggaagaatccaggaaaaagagaaaataatagctagtgaggctagaggaggtgtaagaagatgcaagagggagttttgacctagaaggtaagacagtatatcttagttcatttgggctgctataacagaaataccatagactgggtggcttaaacaacaaacatttatttctcatggttctggaggctgggaagtccaagatcaaggcatcagtagatttgggatctggtgggggcctgtgtcctagtttatagacaaacattgtattgctgtgttctcacatagcatgagtgaatgaacattattgggcatctatgatacatgctgacagtgcaaggaaagaattagtcacatggcctgtttttaaagtattctcattctggtatagatttccaaagatgattacatatcagtcacctgggaaatgtgggaggaaagggtttgattttaggagttccttaatcctgatcatgcctctgacagggataaaatttacccccatgttatagctgagaaaacaggttcacagagtaggactcttttcagagtttatatcaacagtcaattgtaaagcagggattgaaaccaggtattctgatcctagagcataagctttctccatcctgtcttgctgtgtctgcattagctgtactggtttatagctgttgaagaagtcttgagctttagtttgattagctaaagctccgtacagaggcagcacaggaatgaaacttactcctgtgcttctgtcagtcctttttaccatatagaaggattggggataatgtgtccttccaaaaattatggtcggaatgatttgaatatgcaggaacatattttatgctaggaattcaggctgtaggaggtaggaaggaggaagaaaattctgtaaactggttgtgtttggccctactaaggaagctagatttaacttcrgttcatattttatgaacagatttatgtgctcagaaatgctctcccatcccccttaacaaagtaacataaataaagacctaaagctattactcagtatctgagatgtaggagtattaatgagagctgtggacagtctagagagaacaaaggagtggggagaaagaattaaaaggttagaaagttggacttctgagaaaaggttaaaagcattgggattatttaacctgcaaaagtgaaagaggaacaaggtgataaataactctccgtagatgaattgtgcttgtttttaccagtcaatacttaatgagtgacttgtatactgaacattgcaccaaatattttaggagaatactaaatagctcatagttttaagatcttaaaatctaattgggttgttataacacatgtatagctctggcatttatgcatagtttccaaaatttggagaaatatttcgagaaactgtcactcaagaccaaaatccaaccaacttggaagaactgattagggaagaaggcaatgtcttagggagttggggattgttagaggagttggcaggaacatttagagaaaaaaaaaaacattgccaaattgtgttctgcagggtacaaattaatatacttgaaaggatgactacatggtcaaaagagaaattctgagttaaacaagtaaaaccacttcctttagtgcaattgcaattagaacctttaaaatggttatgtatgttttcagtttccaaaaaggaacttattggagacagacccaattctcactttttgggagaactgggtaggaagggagctagtacttagaacatattttgggaaatgctgccccataggatttgataaggtggattttatcatgttcagacaaaagatccatttttcattcagagactataaagagaagacatgtaagtagactgagagtctcacaaaaatacatttttttttttcaaaattgattccaatgaggaggaaaaatgggaggcatgtgaagactttgagtggctgattaaagcaagctgataaataccaaatgtaaaacagatagaagccaagtgctcaacaatgaaaggagcgatatcaggaataatgtggatgtgtatgagtagtgtcaggtattgtttgggtgttggggaaaaaatacttagggcaccaaatgtaatgtttaaaagttgaagaaaaaaacaaaagcaaataagacctaatctagatcattgcttaaggtggcaggcatcatattcttgaatgctggagagtaaggagaactattcaatttataatttactaccaatgtctttttccttctctctccctgtttttatgtgtgaaaagagcaaaatataaatgttggtaagaatgaatagatattgaaataggaggctactctgaatgagttttatgccagtccagaaaaattataccttagagtactcagagaatttgcagttaagattctcttgcttgggatcagcttactgttgaactttaaaatactgtagcaaataggaatgggaccagaagacagaatgggcaaatgtaataccaaatttcaaaaacgagaggagagaaaaatatagtttgcaacctagraactaatggtcttggcattgatcttgcgtggttttctagattgtgacattttaagtttattttatcagcatttatcaagaaatagtgatcacggaagctagtaaggaatcacttaggcaaaatcatttcagatatatcattttcttttcttttcttttctttttttttttttttttgagacaaggtcttgctatgttgcccaggctggagtgcagtgatgtgatcatggctcactacagcctcaaattcccaggcttaggtgattctcccacctcagcctcccaagtagctgggactacaggcatgcaccaccatgcccagctagtttttaamattttttttgtggagacagggttttgccatgctgtccgggctggtctcaaactcccgggctcatgcgatccacctgcctcagcctcccaaagtgctgggatcacaggcatgagccaccacacccggtcctcatttcctttttagatagagcaagcagatggctagattagggaattttgattctataaagcattttagaaagtcccgtatgatatctgtaaaattggtagatttataaccagttaaatgacagtgttggcctcagaagaggtctctggtagtaagtcataagcaccttgtcctagatcttgacctagtctaccttgattcaaatggttaaattacaatgttgatggcatgcatctttgatgtaccaataacaagataccagagggagagtgaatgtttgatgatggattgaaacaatgggtgaaatttcattagatataatttaatagagataaatggcaaaccttacattaggtagaaaaacaattccatccattcaagatagatttgacaaggcttaacaatagcacatgtgaaaaagaaatatggttttagttaactgtgaatgcatagccrttaacagtggaccatggctgcccccaaatccaattgcaatcttaagccgcattaatagaaatcatatatctagattgatgatgctgatagttactcccttctaggtacttgccagatctctgttgcagtgttgtattttgttctgataattgtattgtatgacaaaccggttgtggtctggaagaaattatacaacatggtatagggatttgaaataatgttttatatagtagttctagactaaaagaaaactctaaggaggaaagcacatgatactatctttaaatacttattaagctgtgataaaaaaaaaaaaacattaggtttgttctaccctaggaaaggatttgttaatccccccaaaactggaagaatttcaaggaggtagatttaatctcactgtaaaaccttctaataattggaagtaactttcagcagtattaagttacctccccagtgctagagttgtttagacaaaggctttgttcttccatttttggaatgttataaaggaaatgtggggtaagggaagtacattgagtaccgtttatgaaaaaatatcttccagctttgaaattccataattccttgtttgatggagtatagataaattacacatgcaatgaagggccataagtcgagaaagaaattgttgttgcagggaagcatcagaggtggcatttccaaggagatggattttgaacaagttgtgtagaaaatggctaggtaaaagtggtggaacagcaaaataattttatttatgaccactggtggattttcttgtgaaaaatctgccagtgaaaaatgtccttggagatggagacttcacagacaagttttgtatatgagatacacatgcacacatacacacacacaaacacacacattttaaatttacttttttaagctcaaagaattattcacgttgataatttttaattttgttatttaagaacatgaaggaagaatgtttctagtatctatttcctaagaaaaggaaagcaggaaaggaatcatgtcagaaaaatcaactgatggctgggcacagtgcttcatgcctataatcccagcactttggaaagctgaggtgggagaatcaatcacttgagcccagtagttcaagaccagcctaggcatcacagggagaccccatctctacaaataataataataaaaaattagccaggcatagtggcatgtgcctgtaatcccagccacttgggaggctgaagtgggaggattgagcctgcatggtagaagctgcagtgagccatgattgtgctactacactccagtctgggtgactgagcaagacactgtctcagaaaaaaaaaagtttgtcttctcaagaaaaatcaataagggatcttatcatcaacataaccaaacacatataaacacagttcatgcaagtgtatgtgtcattgcttcattttcttcatttcacttcacactggcactgttcttcagaccagaatttgggaaccattgagttcacaagatcctttgatgggaatttggggaatttaagacttgttctaggttatactcaataacagtcaatttcaaaatctcagtggctcatcgcagcaagcatttctttttccctcacattacatgaaggctgcgtgttagctgctgtggctctcttctccacattctagattggcttcagatctcatctgagatgtgcccttcttatggcacaggagtaagagakgctaagcaaaactataaagttaccatgaaagcttttactcaaaagtagcatatatcatacctattcatgttccacagtccaaagtaagtcacatggccaactcacatcaatacagttgagaagtatatgtgtgcgtgtgtgtgtgtgtagcataatatatatatgaggaaagagatttgtgaacaatatatgctacaataaagtcatttcagaagtttttagatgggaaaatgacatgatgaaaactaagaaaaacaatatttgcagcaacagttagtattaattgacactgaggacattgaaaacaggaagagtaacttgaggatagcttatttcttctcatgactctgtaacttcacctaagtatcagaatcccagtggcaaaatctcagcacagctaatctcatgagatataccttcacacttcatgtcacattatagtgacaagtccaagttgttcaaatccaagatagcttcacctttaattactttttttttttttgtcaccaaactacaagaatttgatcctgtagattttgtcggtcagtttctgtgtaagaatactcagcagtacaaagaaacaaaatattgaaacatgcagcaacataaatgaatctcagaattattatcctttgtgaaagcagtcaaacacaaaagactacatactatatgaaaccttttgtaagaaattccagaaaaggcaaactctggtgacaagaagccagtcagtgtttgcctgtggctagagatcatgggaagggatcagctgcaaatggacatgaggaaagttttagggtgatggagatgctgtagatcttaatcatggtagtaggtacattttattcaatataaattatacttcaatgaaactggaagaaataaaaaaattgtgctggttagataagtaaggatcaacttcattttctgaagatcaacagtaaaaaaaggaggaaaaaaatcaatatttccatgtgtctttgaactttgtgtgtatctctgttttaggaacaacttgaaacagccaggaaktttctatattatgaaatgggctataaatctcgatcagaacagttaacagatcgctctgaaattagcctactgccttcagacattgacaggtacttataataagtgtctatctatctctctttttttttggcctatgtaagtatatttttccattatttaatcttgtgttccaggtataagaagagatttcataagtytgatgcagaccagaaaggctttattaccattgttgatgttcagcgtgtattagaggtaattttctttggttgatgtcagcctctgatactagaagaatataaaaatattagatgtttttctcatctagggttttctacaagtaatatttttgttataatttttaaaagatttagtaacattagtgaaagcatatttataattttttttcttttttctttctttttttttttttttgagacagagtctcactctgttgcccaggatggtgtgcagtgttgcacgatctcggctcactgtaacctcckcctcctgggttcaagcggttctcctgcctcagcctccagagtagctgggactacaagtgcgcaccaccatgcccggctaatttttaaaatattttttgcagagatggggtttctccatgttggccaggctggtctcgaactcctgacctcaactaatctgcctgccttggcctcccaaagtgctgggattacaggcatgagcctccttgcccagccaaagcatatgcataatttttaatcaaactgtattattctatgcttttcttttacttagagtatcaatgtccaaatggatgaaaatacactccatgaaattctaaatgaagttgatttgaataaaaatggacaggttgaactcaatgaatttttgcaggtgagttgtggtgaaaggaaacaaggatatttgcttttatcttttgtttgtcatgatcataaatgcatgttcaagaatggatatttaagtccacacaattgtcagattattctgaagaagaagaaagctcgaagccagcagaggttgatatgtctgccctcaagtgtaaggctctactgtggtgcatattcttttcctttttttgtataagaaacattccattatgttgggcaatttagattaaatccaagttatttatcataaagggttgaatatgaagcatgctttttaaagacgtatgccatggcatatcaatgctggacctttttcttttgcttacttttctttttcttttcctgtacttcataagaggcaacacaagatttctaatcttttatgtagaaaatttttaaaaagtatggttctattcactaatgaatcatattcatttgagaatttagtgattagattctgtcattataaagaactagaaaaacataaggaaggaaacttgtattttggggtcaagaccacataatttaagtatttccatttccaattgttaatttattcaaggctctgttgtttaatctttgtaatcatgcaggaaataaattttgttactttaacttcaaactggatgctacatatcgtttcttaaaagaaatttcaacaaacccatacattatttctaactgtccatatgactctgatcatatgaagaatgtattgggtttccaagcagctaggtttttttctgtagtgcttcttgggcaggtatttcaaatgaatgccaggtcttgcttgcaccatggcaatgatgaatgctgaacatgaaataaattaatgctggggattttggtcaatgtcagccctttcttcactgtgtcaagttaaacaaacaagatcaaggcaaaggaaatggtaattgtctctctggagatgagctgcagataagagcattgttgaatctaaatgcagaaaattttcacaggttgtgtccagcattacaaaaaagaatgtttggttctttagcttactgtttaactaaatacacattttaaattraatttaaaatttatgcttgggaattaaaacaccatttaatgcattttttgtgtagtttttctggagaatattttattgttgccctcacaatgttagaaaacttttcttcaaagaaatggcctgtgcttcatttcatgtgttgtaaataaacagcagaatttagggttgaaagacatggcactttagaaacaataagaatctgattttatgaataygctatgtggtttaggttttaagtaattttcttgaatgcagttgagttaaaagcaggagataattgaaactatctgcaggttttcttgtagagttttttttttaaataattgagtattttttgtccaattccaaatgaaagggactattcatgcttttactaagaacaaatacacagtgtgattttcaactttaaaatgctgaccatattcctcatgaaatatattcacacccaaatgttatttttttcttgtaatatggtttctagatacatgtagtgtttaaagaaaacttttgagtttttagaagttggcacatcatatactgtctatggcttaaaaaacctctagctttgtcagttgtgttagctctgataaactttgcaggtcttcctggaatcagagacaaagcaataaacaataaattgttccgtctttagatgtcagcattgcttatgttacatcattcctcagatgtaaagtatatttgaagggtttttttagtttttttaaaatattttgctcttctgcagactaagagcccatgtttatcccattaaatatattttttgaatatagatacggtttttcattaatcttcacagaaggatcactatagatatctcatggttatatgactttatttctaagtctgggttttaatgacacttttgcatgtaggagtccatctctaataagcaatagcttgtgaaacagcttttaataaggtcatgaaattctgatccagccccttggcagatgtctctgactcttattcagagctctttttaagcaacgtgtctctataggctaaaagctataaccctaaaaatattttgagaatttacatacatacatagatacatcatatatatatataatgtgtgtgtgtgtatatatataatgtgtatatatatatgatgtgtgtgcatgtgtgtatatatttatatgatgaatagctaaatcttttctttttaaaacaaataaaaaagattagggaagtgagatcaagaagagcaaatagttgaaaccacatcaaacttgaaaaggaaaaaaatccctatgctcataattgcaaagtgccttccagattaaaggcctttgcccgctgcctgcatgtaatttcaagactawttctgattttatccattggataaaaatgaattagctaaaatctgggctgtagagtgcttttaattcttaaggtagatctctgggtccattttcaaggaattaaatgtaaattacgttaaaaagtctttaaggaatttggatttaggggactcgaagttgtcaagtacagtaacattaaaaaaaagggtagacaaatataggtcatggtttgtctttgttcaatccctgagattcctttttaagattttaaatggaattaaagatccaatatttgaagttgctaaaaaaaaaaaaaaaagtgccttgagcacattaaaggacaaaaaatgatgcattaagatttgcttttagaggcagggtgatttactagatggatgtagtttttgtggcagtgttgaaatacctgcctcttcccctcttttggaaacgtttaaaaattagactcttcttatctgagctgtagtacttgttaaggtttttgatggagcacttaattacctctgtctgctgcaattctaacgattatgatgccatgaagaagagagtaagttggcctgcgttctgaatctgttgcatattttctctttaagctgatgagtgctattcaaaaaggaagggtatctggaagccggcttgctatactaatgaaaactgcagaagagaacctcgacagaagagttccaattccagtggaccgtagttgtggaggattgtgagtctgggcagtaaatccacagccaacaaacatagaaacgacaaatcaccatgtaacaaccagagatgactgaaaccactctgaaataatgaatgtggatagctgccttttttaacactagaaaacattccaaaactttaaggtgttggtgtatttgccasctttatttgctgtactttatttgtatttgccattcagtctagcttttaagtatatttttttctttttctcattttcaatgcacattagttttgcatctgttttgtgacctgttagatgtgacacattctctttttgtttattcccttattctaaatgagttctaaaaacataatattttggcaaaaattgaaaaaagctggagacattttgtgacatgcatacagatagcatgtgttattaaaaagagttgcctattgaaatgatcrtgtttctggagaaattaagcttatagacagcatgtgttattaaaaagagttacctattgaaatgatagtgtttctggagatttctcagccccatcttcctccagcttgtctaccttcctcatgcaaacaatattccacatttttatatctagagcatgactggctaactggagagggaaggaaaagtttagatctggttactggagcaagtctcaaagagaaactctgaaagcttccagaatcacaggtataagataaggatagcattgacatttgctgggagttacagtgatagtttcatctcagcagttcatttttttcttcagtcactgctggttttctttgactattatagttgccaggaagatccttgctcttcttactttaaaaccagcatttaagtggcaatttggatgtaataggatgagaccaaatttatctaattattacagtagtaatacatttaagagttaaaaatgtgtttttatatatccacatatgataacaaaagattcaattcccaagcctaaattttgaagcatgtggtattgtcaaatctagcttaccatcttttttgggggtacttgcaaccatagtaaaggaagatggaatagactttagttaactttaattataattatatgttaaataaggcacataaccagtttccaaggtcatcatggttgcttaaagtctttccccttctgtactccatggaaatattctcagtaaaccaaaaacaaaaatggaaaaataatcaccaacccccatcccgacacacacacasagtccaaagcaaaagtcagtgtgtattgaatttaacaagtaatgcagtttgggatgcttttgctacattttggtggcattttaactagttatctgaatatttattaatcgtacttcctcttgtaaagttaactacttacttttttgttgttgtttttttaacatcaggttctgtatctaataggagatgtaacactttatttcatggcaggtttttattgcagagacttgaagtcttagttttttaaactggcacataaaacactttttgctgttatttttatttatgtcaatactgcagagtatctttatgccttattcaagtggattctgagcctgtatgtcacaatgtaaacactggaggttcactcacctacgcactcacccaccacctctgaaagaaacagaaactgcagagaaagacagcatcttagctcattttgtttttaaatgaggttttagacgcttgccacttcctaagggaaatcctaaaacagagcaagtgatgctcccaggtatcactgtgaacttttttctttcaaagtgtgaatttttacactggctttttcatttttttaaagtaattgaagcttgtggctttacaacttagtgttttttgctatccagataacaagtttcattgtttagaacccagtgacacttaataggtagataaattgtcctttaaaatatcccagatgatatacacaatatggtacatttgtgctctctctctctgtttttctctctttctctttctagttagatcaagataacgatgacttgtaccctccctgattctgttacagtagggcccgggcagatctgtgtttgttaaacaggccttgtttgtgcatgctttgctatgaatgaagttcctttaaggacaaagaaaagcacacttttcttcttttgagcatatctgcttttactttaaatctgctaatttctaaaatgtagagtccttcaccaatcccagagactcaatttggaaatgaactgatttcaagccgttactgtsaataaagcaccccagcattttgtataagctcttaattaaacctgtacagcttctttacctgatttaagaaagggagacaagcaataggggggaataagcttcttcaaaattcattccaagcacaaaagaaattttttccctttgcatataaacttgacatcagttgattctgttggggtcggggtgggtatgcagggattgccttttattatcaagtgatttatttcaagagcctttgaggggattcaggtgaaggaacccccatctgtgctggagagttggatactcctttaaatagcccccaccacagtcataacaataatgataatgctggattatttgttaagccaaggttgtctgcctcatatccatcatgctgtttgcaatattcttgctttcaatcaatttatactgagtgtaactttaggatttctgctattaaatgcatgctctctatcctgcttcagtttctggctttgctttgtctgtttcaaaatatgtagcttcctcttttgtacaacaaaaaactcattctcacttttactaaatatactgtaggagtcatcattgatgttatttttctcttatrtatctgtaaagatttttggcatatgaatgtaatattaaagtcaatgatgctataacttgcgatgtttgcatcatgtcaacctttttgaaggagtgaaaaagccctactatgtttttaaatagcaagtgtaagctcagtgctagagtggatatacacaccgcatgttttcatatgtggcacttttatgtatcatgttgggttattgttctagactggactgttaaatactatgttygaggctgggttgtcatttttataactgtcttggtgttttatggccattatttattacttttgatacacagaatgagctgcatgcatttatagagcaataagaggatgtatttaatgtgccttgtttttaactgaataagaactggaagcatgaatcaataaaactgattaaaatggtctatttgctagcattttgatgttacttgcagtcagataactttgattactgttgaagtttaaaaaaagtttgaaaatatttttacaaactgtktttttgatgacacaaaagtgaaatatctacagagatagatgtaattttataagactgccagaattatttgtattaatttgttgctgtagcctttagggcatgacttctgtatttgtgcaatcctattctacaattacattcatcctattacaactcagttgaattcttttttccttttatttccttatttatttatttatttttttaaatctaccagagcctttcagcctaagcgttcccaggcacactgatgaattttatcataactaaaatcaatagaaatgaatgggaaagattacataatccattttgatcatcttacatgtcaagttagtgcagggttgccaagtgttgataaatgctctgacagaaaaaaatgctatatattttcattgtcagtaaatcagtaaagctgttatcagttttaacacaaattttataatgcccatgttattttatggggtttaatttacacacgtagatggagtatattctccatttgtggtttagatgtgctgcctcctggttctgcatgcccaaaggcatgtgtgagcttctgaaggttctttgaaatcgtatagaataccccaaagcaagggctcccagacagacttggaacaataaactgtttgttcagtgcctggaaaaaaatacatggcagcttaaaacattttttgttgatctagcttatcaaatctgttagtgctttaaaattttttaatatctaatttatcaaaatattgctcccaattgtataaaatttatggtcatcaaaaaaatatgatactagcatcaatattttactatctttatcaacactgtactgtccctggtatcagatttcacctgatgacatttgacttatgaaggaaggaaacaacaaaagttttaaattgatctggcaccctcatagtgaaacaaattctgtataggagacagagatgatgagctttttgtgcatgtgttttgtattttaggtctctaattagctgcctaacttgtgaaatacaggcacagaacatgatgtattgagccttgacgataccagaggtagtcctgtgggtcctgagctctttgcaaaaagtaatagatatctttatattttgttaaatacctggtccagaataataagactcatgtgatctaagcaaaatactactttagcagaattatcaggaccatctttgttctccacatttggcatttgaattgcattgctcagcataccctaccgtcggttccctgttaattgtattcacattggagttgcttcaatctagggaggttaaggtttgtatgctgtagtcataggtaatatatcatctttcagtagaggaggtgggaggattgagtttcatagtacctaccttgattattagtgcatggcccagactacaactagttccaccagcttctgagccattcatgcccatggtctgtgcctacagcagacatccctgctctccttttccaagtacagtgactcctgtagagcctaggatcagttttttcatttgctgctgctagctttccttcattgtaccaagcagttgggaggtgtgaaatacatatatatgtatatgctttggccctggtgcctataaaataatagttttggttaaggacaatcttgaattggaggcaaatctttcataaccacagaatttctttatttgttttagtcttatactataaaactagatctaaatttattatttaaatccaatttaggcatatctgattttgctttaaaagctatcttattgtttgtctaagtgatctaaacgtaatgacctcaatcaacatatcactattctttaacctgaccttaatgccctcttaaacagaggcttccctctctgctacctcctgcctccaaagattcaaagtaaatagtcacgtcttcccttttaatttcttgcttagatttttctcacctttgcttcaatatcattttttgtttttcatctccatcattaattgatttacagttcatttttctgcatacagagtttttcctatccaagttgagaagctgtaaatcttagatccattgaaatgacagtgagaaatatttcattttatcccatgaatcatttgccatccttattgcagacaaatggcaaaattatggtgtaccatgttttcataaattactctgccgccccccsacccccattcccagttcatttcattatctgtttggaaagactataagagtcagaacccagacacttgcggtaaacaattctgattttacagcaggctaatcaaaatttcataacattaaaattaattcctctggtactgtgaagaatttaattcatgtacaaaatatatcatctattttataagtcaaaaatagcttgatattaaagtacattctgtgatttgctagtatagcaaaggggaagagtgccaaattctttaaataatgtatataattttcataggatttcatatgtcaaagtagtcatttatggcctgaaaagtatgtgcttcgcactatgtgtttgaacactattaaaaaatcatggcttcttccaaaaaggacaaatcttaggttttcatttcacatgtgacctagaatgaaataacttatatggggaccaccctgaacccccattaggaatacccccaaaagtaaaaacctgaaaatatttctaaagctaaatatttttaaaaagcaataaatgaaatcagtttttataatgttataatgttactaaagagatttggctattttccttaatctctgttttattgtcagatcttttaagaaaccatcatctattttattgttggatcttttaagaaactgtggtcacttatttatacagttgaaaaagtcaagtttatcctgataaatatagttgtcatagtgagctgctaaactgttttcaaaatgggccattttttaaatggagcttatccagcttgatccatgcttgaagcagcactgaaccattaaataaaaacctgggacaaaatrcctttgaaaagggttaattagctttaatattgacttattccatataggacggtaatagactagaacatttatttctgttttggatcattwaaaactggcrttagttcttcaacaatttgtttctaataaataaaaattggaccaattagagtagttttagtataagccacagttcatgatacacttcttatgaacacaaacacgtgatcactatttcccaattcatcgtaattccatcagaaacattgtctgcaaaatacaagatcattaagctccagaaaggagcatttctattttaaccctaaaaacaggtggagtgtggaaggagttaatgtatggcctgaaaactccctaaagctaaattggcatatgctgtccttggtgtcatttttctctaacagtaggatgcgttcccatcttcttcattacttagttttctccattcattggctttacacttgtaaaatattagtacatcgaaaaagtttacctcaggaaaagtgcttgtcaatctgcgggggaaacgtcccttgctgtgcttagtttttgttcttatgctgccctctaatggataccaaattatttcattaaacccagaacaaaagtaaattttcagcttctcagggctcctgcatcatcccattactgttggaaattgttatctgaccattttcccctttgcatacatgttggtgtagcacagctcgtactaattgtgcggagtcaccctggccaaagttgcattcctgttctgggaagtagagggacagcgatgccaatttgtgcactgtcgaactttccttttttctctgccagcaattggaaagaattgatgttctgggggacttaaaaatgaggaataaaaacagtgtaagtgctgtattaagacgatatgctgtatgttttatcagccactggcacctagttcaaaagacaaaaaaattagcagcagtggtttgggaataggcctgtgcatgaggtggatatcaaatccatacatgaagaatatcagcacttttcacatgctgctttctgacacccattgctagagctgaaaactatctctattgtccagtttgattgcttgaatcaaactgatttacagcaaatccatctgagctttgataaatctattacagtttcatttcactgatttcattaacgtgaataaaaccagccatgctttctgcataactgccttttaatggcttggccctgtcacctgcctgaatattaatccccctgacttattgctccacagagggaatgagtaatgggtatttgaatgtgatcagcacagtacaatgcaattaaggaagcagtactgttctgtgcctttaatccygaactaatttgaattgcagtttgatagcacagtgaatcctgcataattatgtagggtgcatattaaactctgtgacaaactggagaagcttttaaccatcacagctatggtagacaagtgaaggctagagtcagagaacccactattggactgagagtacaattaatagaaaaccttcagcagggaaagcttgggagagcaacacatcttggaacaaaaatacgaagtgttgatttgtttcaaatagattttaaattgcaagcatttggactttaagagtttcctttgattcacaaggtagcaagggaaaaactgtttctaaacaaaactttgtattgtcttggtgctttcagcagttagaaaaacagtagctgtaatacttcacagcaccttaacttcctagctatccagttatttgatactctgcagttctgcaaatggtgcattgatgatagaatatttactgtttatatacagatcctttttagtctatatgaatcctaggaataagaaagcaaatattctatatactttggatcttttgtgaatatattggtaattgatttgcatgattgcttaattttttcttctttttaatccaaaatatgtcaactcctgactgttgcagaaaatgaagggtcaaaaataaagacagtctcctctctatcctgtggtctttcttgctactgttagtttgacacacctgagtagaaataagaaaatgagatgtattaacttttgtcctgggttggtcctgcagtgggaaataatcacagaaggtcagaaatgaataatttgctgctattagggcatttaaggtaaacaatcaatatcatacttttaatgcacattattatccaagtaaaaatgatattttgattctatttaactatttttatatagcattctaatgtcactttaccacagtagccacagcgtgatacttaagtgctttgtggatggcatagaagataataaataagcagattgcttttacttaaatagtaggaggcaggacaattacattcagggaaaacatgtactggaaaaatcctgtaactgtttttactataatccattcactacttatttaaactttggaatttatttttgtcacctacttatttattaatgatacaagtgatggtatatgaacgtactgaagctttaagagatttggatacatggagacattgtatgttagaagaaaatacctagcactatatatctcccyaccaccgaaaaagggaggggggatttttttgcaatacagttgggaatgctgctttaatcccrtaaactgttattcaaaatacactaaatgtgaaatgcatcaaccaaaatggagttgggggagggaatgacttccctaagggtgtacaataatattagcaagattacagacctttaattttttcaatctaattgaatccaatagaattactgtaggttctttagagtcaccatatcctgctgggcgactctaatctaaatattgctagttaaccttgtttttcaaaaatacrttggaaaaagctaaatggaacctctttccataatcagtttacattatgttacacactaactgttgattacattttccagagatgcattatttcccttacactacctgaaatgatttttcaacaataacactaaactttggcttaaataaaataattttgtttttaaagaaaagcatttaagtcataagtaaaaatagataagagtttagagaaactggaaaaaaaaatagactagaattaaaggtaaaacaccttctggtggactgttttttataaatcaaagcaagtaattgaatatatggcactctggaaaaaaatgaaatatttgaaaggctgtgcaaaacatagcatatgttttattattgaaactcctgtaaaccaataaaaacaatacacattatattcgacgtcatgcttttaagagattagcattcgatttgcaaaatctcaataggttccttttgcacatgaaaatatttttctaattttgtgtttcttttactaaaacttctgagatgctcactttatttcacccatttatgttagaaatataataatagcattaagaggctgttattgctgttgggcatatcaaaaatgtcatagcaatcttt

SEQ ID NO: 95932 - DNA, 26228 bp, Homo sapiens
  misc_feature (1)...(26228): n = A,T,C or G
gcctgggcgacagagcaggactctgcctaaaaataaaaaataaatatttcaaaccacctacgaaatatttttatgaaaaaaaaatcaaaccagaaacagttaagcctccaaattcaactctcaatttataagaaatacctgaaacagaaaaacatagtaaattatatcacagggatgcaatccccaaactcctaattgcacaaaactctctgggactaatgactcagtttcttcaacaagtaaattgcaaggaaagaaaactggagaagaacctatagaatttaggagacttaagagtcatatcaaccaacagccatgtgtggatggaccttattcgcatcttgatgaaaacaaactaaacaaacataacaaatgccgcatggtctcgcttatatgtgaaatctaaaaaagccaaactcatagaagtgggagtagcatggtaagcaacagagtgggggctaggggactggggagataggggtcaaaagatataaaattccagttagacaggctgaataaggtcaagagatctactgtacaacatggtgcctaggtagttcatgacaagctattgtattcttgaaaatcgctgagagtacattttaggactacctgtgtgtgttctcaccacaaaaaaatgataagtatgtgagctaaggtgtatgttcattagcatgatttagctaatcaagctaaatatggatacagatttcaaaacaacatgttgtataggatagatatacacaatttttatttgtcaattaaaatagataacttttttaaatgagaagaaaacaattgctgaaacaattggggcaatttcaacagatagaatacttggtgatataaagaatgattgttaacataccttttagtatgataatggaattataatgtgtttaagagtcctttttttttttagaaacatgctgaaacacttattaataaaataatatgattcttgggattggtttcaaaataatctggtgtgagggtaggtaagggggtggatgtgggtgacaaaatgttggccatgagttgacagtcatggaagctggtgttgggtccacggtagtgcatgacagcactctctaaaaataagtgaacatcctgcttttgttaataagatgacccataggcttgcaaatattttggtgatcttcttaacattagatttcattttattcacaccaggatatgatctgctttacatcacacatcctggtacatgatcactagctacaacaacaagcaaattaattcatcaatactaagttgccttgactttgaggcaatatcgtatagcggcttagatcaaagaaacccttcctgtcagcaccttatcacttgcatctctatgaaacccagcaatttttatacttcttggtactcaactttctctgctgtaaaatgggagggggtaaatgagattttatgcatgaagcactgggcccagtgtctgaccgtcagcgaaccttagttcctattattaccagaagcagcaataccagtctgcagagtgaagtcttactctggacacgttgctaatttgggcatgaatagaaaaatgcctgggataaaatacaaggaataggtaacagaggtaaccccatgaggagtcactcattcaatcattccatgtgccacgtggagctgtgggcacatggtaaccaggagtcaagacacaggggtgtagcccaggaagatgttcagagggcgatctgaaggctgcaggagagttagccaggttggatttgggaggggaagggaggggagtagggaaagaaaaaggacaaggggtcccaagctgttaagggaaaggcaagtgcaaaggccttagagcaggaaggaacaattccaagatgcaaaggttgcagcgagaagagcagaccagaccagaagcagtggctcacacctgtaattcgaacacattgggagactgaggcaggaggattgcttgagcccaggaggtcaaggctgcagtgagctttgatggcgccactgcactctagcttgggtgacagagggagatcctatctcaaaaaaaaaaaaaagaaagaaaaaaaaaaaggaggacccaagaaggtggagccagtgcagctgcagtgatggggagcggggaggtctctttctctttcgctcacatctcacacacttctgaattatgtcaatatcttatgagaagcatgtagcagtctcacaattttcgaaagctaaaaaatgcaaaggaaaaatggctataaaccctcaagaagtaaagaaaatattatggccttttctctacttcttgtctaacaagaagctaccatatatttttcttttttctttttttttttttgagacaggttctgctctgtggcccaggctggagagcagtggcgtgaatctcagctcactctaacctccgcctccaggactcaagtgatccttccacctcaggccaccacacctggctaatttttgtattttttgtagagacatggtttcaccatgttgcccaggctggtctcaaactcctaagttcaagtgatctgctcacctcggcctcccaaagtgccgggattacaggcctgagccaccgcgccctgccatgaatctacaaaatgttaaaattcacttacatttgctagataagccaccttgtttaaatgtaagaagtatgctatcctctcctgtctggtttgttgaaagggcctccccatccttgcctcccttctttcccttttttggatgtgttagaggtggaacagatctttgcacctaatttaaacaatactcctttccagcctgcacaaagattttggccctctactgtgtttctgggactgagtatgagtttggaggaaacaccggctagtagggtttgcggggaagcttcctggcccatagggagaactcagtattgagactgtcctgcaagttggcatttgtcagtttcatttgcaatgtgttgctaggagcagaatatgtttttctggttcttgctcacagcctggggctgggactgttgactttgatgtgaaggtggtgcacacagctgctgggggagggcctatgagtcctgccgtggagcaggatacctgcagggcacaggcagagcctagctgctggagggtgagctgcccctcctgcttttgtcagcgcagtgggaaccccagccaagtcctttcaagtcgcaccttgcactttgcggtttctcctcttaggaatgccaggtttattacgggtttgctcacttcacttcactgttctgatcctctccttgtgcccccacccagctcaggacctttcattctgtgtcaggtctagcaaggctgctggcttctggttgagtctaatgctaagtgataccaaaggctctgtcctcaggggacagggaaaagtggacagaaatgtttctagtcccaggggagaggcaccttccagcagacaagccttgacagtgtcattgacctcctggcctgcaagatcctttcatttgtttgttcctctttggggatgacgcatgagaacccacctgccgcacaccctcatttgaaagatgagaaaactaagaccaccaccaaagcccccagagaacgatgacacactccaagccagacccccacagatgcctcatatccaagtggttaagagcatgaatttggagtcaaggtttaactctcagctctgtcacttactggaggtccaatcttacacaaaagggttaatttctccaaacctcagtttcttcatatgtgaattgggtgtactatttttcacctcttaaagtcactgatttattttcagtgcatttcttaccctgccaacttaattatgtaagagttcatctggccaggtgcagtggctcacgcccataatcccagcactttgggagggtgaggaggatggatcacctgaggtcaggagttcgagaccagcctggccaacatggtgaaaccccatctctactaaaaaatacaaaaacctagccgggtgcgatggcacttgcctgtaatcccagctactcaggaggctgaggcaggagaattacttgaacccaggaggcggagattgcagtgagccgagattgtgccactgcactccagcctgggaaacaagagcgaaactccatctcaaaaaaaaaaaaaaagttcacctgattgcctttagttctcccctccttttaggctccgagctccctaagaggaaggggtttacctgccttgttcacagctgtgtcctcggtaataaaccttgcccggtgcaaggtaggcagtgaggaagtatttgtgataacagcaatgtaaagccatcaacacagtgcttggtacatgcagaacagccatcaacacaggcaaccatccctgtgaacagagggagtgcattatttatgatgggaaactagttttagttggaaaattatcaaattaccaggaacggaaagaacaaaacagttctcccaagtagctcttctggggccaagccccagcaccccacccatgcaggaccaggcccccaaaggccttggaaccaccttgttccagggtctcgctccactgtcctctcctccttcccaaagtcaggactcctttccttgggcttcagaattcctatcttctgctctagaaggcttggagcaagtgggggaaaggcaccactcaccaagtctgtcaggggatgacatggtatagagggagaggagctacataaaatacaagatgccagttaagtttgaatttcacataaacaatgaaataacattcctttctctgccatcgtggtgtgtgcttgactccacttctcgccatgtctttcccacaagacttttgggattaagcaattcctggccaagaaacaaaagcaaaatcgtccccagtggattcggatgaaaactgataataaaatcaggtacaactccaaaaggagacattgaagaagaaccgagctgggcctataaggaattgcacatgagagggcacacatatttatgctgtctgaaggtcacagtcatgttaccacatcaagctgaaaatgtcaccgctctctggagagttgtacatgttttattgagaatatattttttctctctgaatctgtgatgaatgcgttggttggctgggttcagtaataaatatgtgagacctttcacttaaaaaaaaaaagaactatttttttttttttgagaagggatcgccctgtgttgcccagcctggagtacagtggctattcacaggcacaatcctagcgcacagcagccttcaactcctggagcctctaaatccatcctcctgcctcagcctccctagtagctgggactacgggtgagtaccactgtgcaaggctacaaaataactttttagtaaaagtatatcccaaactttatacgagacgtagttactctaaaaaaaaaaaaggatttgctgtttatctgaaattctaatttaactggttgtcctggattttctttgccaaattggtctgccctacggagtgcgagggctgggattttaacccaggcctgcctgctctgagctgacctttcctggcacctgcaaaattaggatgacacgttaggaacttcctggggttcttaagggaattagaagagggacctgagtgcaaagggctttggaggcattcaactgctatgaaacgttagtaaggacagggattgcgttcacctcaatcacagctgaacccattgccgagaactgttatcccacacagctggatcttcatcattatgtgttttaatgaaaaatcgctgatattgctgtccctaaatagccaacccccaaaataattaaatcacctcaagggactctaggtccaatatccgcagcacgccacacaaacatctctcagctcagccacgcagggccgatgcctgcgcgacccacactcagggaggcgcccgcctcagggcctcacaggtgggaccgcgcctgagagccctgcgcttgcgcactccacgccgtgctctacgcatacgcctgtccagccccgcctctgggtgtgtggcgtgggcacgccggccgctcagaaagcgcgggaaaggcacgcagccacgccccaagggcgcagcctaggacaggggcttctggagcttctggcagccgtctgccctcatggcctttgcacctatggggcccgaggcctcgttcttcgacgttttggaccgacacagggagtccctgctggctgccctgaggagaggtggcagggagcccccaactgggggaagccgcctggcctccaggtacaggagctggtgccgaggcgcgacgcagccactctgtagaaaagtcgggcgctcttcctggccccgggctgcctcctagtgttgaggctgaggaggcaccccttggcgggccagccaggaacccccaaaaagatccttcctgagtacccgtgacctgctttgaacccttattttgaactcaaaaaagaaagccaggtggcagccccccttctgtggcttctaggatgttccccttctagaacgttccagaggctccctgcagctgggttggaaggtttcctaagatccttataggttggggagtttggggtacagttagctttgtattttttaaacgttttttgggataaaattttwggttaaactttaagggttttttttggtttttattttttggtttttttwtagaaagaaaatgagtgttgtatgtcttctctcagtaagcgaatggttttctcagaattaacaaggacatcaacacattttaagtggtttataataagacaacatgtttaattgttttgcaagtggagagaatgtacatattttaaatgatttatttaaaatcaattacaggaaccctccagctatccatgttagaattaaccacagaaaacatgactacgttattgaccattttcacttaaaaatactttattttgtttcctcgacttgctttcttggttgagcaaagtttttcagccttttatttttaagcccaaaccaaccaccaaaaaatctgaaaaacctacaaacaaaccaatttttacaaaagaatttattttgagggagaacttgggagagtgagggaaaaggagagtggcaagtcccttgttaatatcgcagatgtagacgaatctgattgtatcttaaagttggttacagtattatcctgcaacactttttttctccaaactaggaaaaatgagtatttgggtcagtttttacctcccaatattagaatagattaaatgttttaaaattcattttctgaaacacaagttttcagtaaaaattctgaagttcctgtggaaattaaaactctcaacattttgcccgttttctagagtgcatttgatttctcttcctagacaataagctcatggtgtttataacagaacaacattttttgcagctgatggcttgtgaaattaacagtcagctgacagaaaactgggcttagtcttcgcattttgctgtagagtggcgtaatagctgccaagtcaaccgtttgttgcagaactcacaatttattctttccagggtagtgattaaacgttttcctttttgtatcgctaaatttcaaaagagccgattttaaggcatgagatcaactagggtaatgtgcgaccacaaaaggtgtttcttttgaaatttttgcattgcatttttgggaaagaaattcaaagccaatattgtatcactttttaattaaaacatatatcagtagtatgtcaagtctagtttgtattcaagttcagctagattacagtaggttaatatgataaaattacagttgtaaatttagtcattaatgtaaaagggagaccttccattggtaattgcttgagaagtaaaattacaagcaaatgaaatttatttgtaaatacagttgttttaatgcagtagtaaaggtttaatgggagagataattattgacatggattacctagtctttttttttgtctttttttaaaaccccaccccaattacctagtcttaaaaaagaataaaataaaaagttactttagtattgatctgggaaaatcttacatattaaaaagtcaaaatttatgattaagatggaatcatgctctgtttattgtttcagttctgaggttcttgcatctatagaaaatattatccaagacataatcacaagcttggcaagaaatgaagcacctgcattcacgatagacaacagatcaagctgggaaaacataaagtgggcattttgcatttttattttttaaatgcaatatctatgtcattattaaaattatttgaattagagttctggtcatatttttttcattttattgcctttaccttgccaaaaaaaaggatttaggaagtttacgaaatacataccrtacagagaggttatgtaaactagaagtaggtgtgaaagatgaggcaaaggaaaacaatgctagcaccaacagaatggagcaccagaagaggttagaattccaaatgcatgtgataaagtctcataattttgctaagaataggcaccatacttggagctaagctttctagcagtcagagggggagatgtcatgggtgcaattctcacatatgccacaaaagcaaaccacttgctcaggggaartataaccaatcctgataccagaccaaaataaaagtatcctgaacatagagcacatttaaggctttctcctgacagatcttctgcccctgctaaatcatgtgtccaaaaagggtaaaatcagcaaacagctttatcagaattcttgaacctagttataccggttttttccagcctctcatattttttaagagatacagaaacaaaatgaaaggaattttgagtctccttcatcactgttgttttatgatctatataagtaatataagctgtatacttttcagtcatgttttgaaagatggattttatctagctttgaagcagcttacacctgacatatccacctggtgccttctgccacctttaggggaagcttggcagttcaacttaacctaataaaattgttattttatgtaatgtaattttgcaggtaaatcagaaatgaaacatttcaaagcttattaaattgagtaaaattattaaatgagtaggttattaaaatgagtaaagtactaattgtgaaatatttgaaaacattttacatacactaaaaatgtcttcccagtaaaaaagtatgcacacacacaaacacactcccacaccccctaatcaaaggtgttagctcatttatgttaaatggtttatcttagtgcctctgtatgtcacaaacctaatttcctagttatcacctggaatgatctatgctctcaaaccagttgatcctaaagcttcagtgcttaaattgagaagaaatgtgggttttaaatgatgtgcagaagaccataagtatatattgtttggtgtttagaagttgtctttttcacttttttcctttgctttaaacaaaatgacaggtttgaagattctgtgggtcttcagrtggtatcccattgcaccaccagaaagatcaaaagtgattcaccaaaatcagctcaaaaattttgtaagttaattgttcttagcttttggtaataaaggataaataaattttgttatcttctcaattttatttgttgctagttaaataattttacctgtttttaatagatcactttcatacataaaataaatttctataatttttcattgkcaataactatggaagtaggttatcaacataaacatttttcaaggtatatggttcagtgcataattatcctctcagttttgctatccatagagcaattaattttaactgattctgcaggtaattgttctgtacttaaccctcccattttggaaagataattttttaaatgttaactaaaattaagttaaaatccttgatagcagtatcttttgaatcagtaagagaaatgatgagtaacttgtttgttgaattttattttccagctctaatccttaaaatattgtccatgatttataaattagtacagagcaacasttatgcaaccaaaaggtaaatatattgttctagtaaattactcttcaaaatgtaatgtgagaaatagttggattaacttttattatatgctttgaaaagttacataagactaaactatagctcataatttactttctttatatgttgtgttttcatccagttaaagctttcttcaattaacactgtaatacttgtcatattcaaaaagaatatagttaattaaaaatatgtattttaaattttcatagggacatatattacactgacagtcaactctttggtaaccagactgtcgtcgacaatattatcaatgacatttcttgcatgttaaaagtgtcaaggaggagtctacatatagtaagtagtacctaatacaaaacattttattttaaaacaaaatgtttgtataaaacataatttttttttttttttttgagacggagtcttgctctgtcgcctaggctggagtgcagtggcgcgatctcaactcactgcaagctctgcctcctgggttcatgccattctcctgcctcagcctcccgagtagctgggactacaggcgcctgccaccacgcccggctaattttttgtattgttagtagggactaggtttcactgtgttagccaggatggtctcgatctcctgacctcgtgatccacctgcctcggcctcccaaagttctaggattacaggcgtaagccaccgcgcccagacaaaacataattttaaaacataatatagtcttcttttgctattatttgatgcttgcatttttctcactataaatttaagtaatagattctcaatatattcctttgggtgaatggaccaaactgatgaattaccaaatatttttaattcctaaatcccttacatattttctctttcatctctgaaatttcaatccaagtgaaaatgccagtaattcagcagatgaacacaaggagtgacttaatagcataaaacatattcgtgaagcaggtttcaaatatgtctattattttttgcagttatctacatcaaaaggtttaattgctggcaacttaagatacatcgaggaagatggcaccaaagtgaattgtacctgtggtgcaacggtaagaagcatcattgaagttttcacagctttaactcttctagctccttcagttttgaagcataattttatttcttgctttattatgtaacctagagcttaagatttcaaaataaaactgaaagatggataggaatatgctttacagaactgtacattacatagtttcaaattatgctaattgtcaaatgtcagattgaaataaacatacaaatataactcttaaaaatgcactattattttcagataaagtgtggcttggtcattttagcatgttatttagtaatgttcataaaattttctggttctgaaagtaatatttttaatactaaactatttgctgggctttgatacaaagagagcccacagtactaaacttagtacccctgttgggagaattgctgtgagtcatgtgccggttttcttactgaggggtaaagctgttttctactattttttaacagaggaagaagtctctgatgactggtatggtcaaagaaaaataaaaacagagggctttgtgataaactaaaaatgtggttattttgctttttatgtaagataaaaactttttttttaaaaggctgttgctgtgccatcgaatattcaaggaattcggagtatcctttaagtgggaaaactatttaaacntttggaatgttcattcattcattaattcctttggtaagccaagccttcataatgtgtaaggaacaagttaggccctgtagcagtcaagatgaacacaccatggtcccttctttagtactyttttaggagctcaccatctagtggaagagacagatatctgaatatatgaatagatgtgtttatatgtttgaaggtacaaactaaaatgttgtatctatagctgcttttgaattatctatatggcaccttaatttagttggtgattaaattgaaatactcttgctttcaatttatcagccttaacttcacagatttagttacagatgcaaagtttgtattaattgtagaaaaagatgcaacatttcagcggctcctagatgacaacttttgcaacaaattgtctccttgcatcatgattacggtatattatctaactttactacaattccaagactaatgtatactgttatggtgattggtaagaggatttacaatattatctacacaatgtcctgttttcaatataatgcatcctttgggatcatagaacgggaatttccaatgtgtttatttaaasatcctcaaagctggctatcacctcaagttcttttttttttaatagagacagggtctcgctctgttgcccaggccgaagtaccatggcatgatcatagagcactgtaaccttgataagttcatgtttctaaaaccacactcaaaagctttcttccttgaaaagctgagtgttcctgccacttgtcctgtggctatcagtgcagacactgcaatgaggtccacacgtcagagtcagtttgacttactcctcacatcccatggtcaccaagtccttttgaattggccttgggaatctctttcatttcagccctttctccttaatccttcccctttcattcttacacaagacaaccacctggtagcctccagacaggcccctgacttcaattatctctcatccctgccacaccagacttgtcatttccctccttgccagttcaaaaacttttggttttgtctgatacttctactccaaatctggatgcctctgtggaactggtcagcccttctaagactccattccgcctcctctccagggcagcgctcctcactgcctccataaacatctctcgcaaatgcctctcaagaagaggctgggactcgagggccatattaggaagagccatttttcaccaggtcctttaaccctgtttgactcctctactgtgttcatgtgctattatttttcccaaagaacattatgaaaatacactaaatactcacgatgagctaggacccctgctaagcacttgacatagtaagagttcacatttactggtgtttatcacatgtcaacttgtataggctctcaatggccttaggaggtaggtactaacatcatcgtcactttaataatggggtactggaatgcaggaaggtattttaccacgtctctatggctattcaaaaccaggactggatttgaatagttgaaatccatgttgctataatgccatcacttggtgtgataggcatatttatgctgattttatagataaagccatggcctaaagagactaagaaacttgcccaacatcacaccactgatgatgggcagagagggaattcaaactcggagctgtgacccgaagcccattctgaatctctagggctactctgcgctcttcctctgctctctgtttcatttggttttctgcttttctctaacattgttgtaacactcttcaatttacttttctacataattattattttaatgacttcataatattatcccaccatttaagttttattaaaccctaaatttaagccaggtactcttctaagtgctttatgattattaaataatttaattcctataataatctcatatgttgttacagagcatcaaaccacagagtggttttgttactcattcaagttcatgctgctaagaagtagcagagctgagatgcgagctcaggctgcctagccccgcaactgctgcagatcaccgctgtactatgctgcctctccacatccctgttgttagatattttggctatttatattagtttgcgccattttaaataacacttcagtgagcatctttaaatatgtaggatgtttattatttctgtttttgctgaaatatttccttaggaccatttcctaggactggcataattcccagtccttcagtctgtttgtatataatgtacatttttttttcacagtcaacaccagtctttcagcacctgaaatccaaggtaggaagatgtaacccttttttttggtgctgtgactcagatatgaaccagggttgctgtggccacatgcagagtactaaccgttgtatgagcataacctataatttattattactattattattatgattttgaggtggagtttcactctttttgcccaggctggagtgcaatggcgtgatttcggctcattgcaacttctgcctcctaggttcaagtgattctcctgcctcagcctcccgagtacctgggattacaggcgtgtaccaccacacctggctaattttgtatttttagtagagacggggtttcaccacgttggccagactggtctcaaattcctgacctcaggtgatcgatccccctaccttggcctcccaacgtgctgggattacaggcgtgaaccactgcgtccagcctaacttttaaattattaataagagtataattgtaaccattttattctactgaagttaaaattcttaattttcatcttccttttagggaaagggagttcctgatctaaacacaagacttttagtcaagaaactgtgggatacatttcatgttcctgttttcactcttgtagatgctgatccacatggtaatttatcactggactatttacaacaatagtcataactaaatcatatttgttgttgtgttttcttcctctttttttttttttctttttgagattgagtcctgctctgtcacccaggagtgcaatggygcgatcttggctcactgcaacctccacctcctgggttcaagtgattctcctgcctcagcctcctgagtagctggaactataggcacatgccaccatgcctggctaattttttatatttttagtagagacggggttttaccatgttggccaggctggtctcgaactcctgacctcaggtaatctgcccacctcggcatcccaaagtgctgggattacaggcaggaaccaccgtgcccagcctgtagttgtgttttctactctcgggacacttatgaaacattttaaaagaaaatgattacattaaaattwggtctataattatttgacacaatttatcgttactttgtcatattaaactgagaatgataaatttttcactggtgatgtccacaaaattaaaattatagatagataaaatttgagagtgcaaattaacctgtaatatgtaaggagactaattttatagttaactttcttttaacaggcatagaaataatgtgcatctataagtatggatctatggtaagtatagaaaagcagttttccttttttattatttagacattttatattcattgaggtgatttctgcatttattaatcacccccaagcaggctgagagtgcccaaagtgtacctgagggcctagtatcctattctaggagcaatctgtgtgtcggtggctgtgactccagctcccagtatgaccagtgcaaacacagatgacagagtgggattagctgtgggcaagcagcattattatcctgcactctcttggcatactgaaggaactgtggggctctggggtgacaacaacgctgtctgatcaccaaatatactcgaaatattatatagagccttgaattctgacttttctaatcccttttctcccaccataaggagaaatggaaacaataaatgtcaccaccagtgtctacaattaccatataccagtggtctcacagtgtggtcctaagccaggagcatcagcatcatctggaagattcttagaaatgcaaatctcagtccccatccagaactactgagccaaaatctctaggggtgggatcctccaagcattctgatgcatggtgaaatttatagcagatgaaaaggatggtggagcagggtgtaagatggggaatcatgaacaataagaaatgtaggtcagagggcttcatttatagtttgctttagaaaattaatacagaaacactatatagaagttgtggttgttgttttgttgctgttttgagacagggtctcactctgtcatccaggctggagtgcggtggtgcagtgacagctcactgcaaccttggacttttgagctcaagccatcctcccgccttggtctcccaaagtactgggattacaagcatgagccaccgcacttaacccagagaagttttaacaccttcactaaaagcccagcttagcatagcccctgatggttttcttacttctgtgggctctgggcatgtgaagccagctttagtacttgtccttcttaataagtgaaaaatttgactgaaaaacaagaatgctagttttctacaatttagcctcacctaatatacttttgttctttattttagtctatgtcttttgaagctcatcatctcacagttccagctattagatggcttggtcttctcccttctgatcttaaaaggttagatagtatagcagaactaggatatttaaaatgacagttcattatcatatgtaacaataagcctaaaaagtcactacaagggaaagctcttaatgttttttatttatattgtccacgatgacttatgattatgtaattatgaattaaattcattaatgtttctgtttcaactactaaaatatttaacacatgaatttggttaatgtgttacactttcagctagctaaaactttctgttttacttttatggttaagacattttatacactttttatacttaaaagtacaatacattgtaggccgggcacatggtggctgacgcctgtaatcccagcactttgggaggccaaggtgggcggatcacttgaggccaggagtttgagaccagccagggcaacgtgacaaaaccctgtctctactaaaaatgcaaacattagctgggtgtggtggtggtgtatgcctgtaatcccagctaccgggaaggctgaggcccaagaattgcttgaacctgggagacggcagttgcagtgagccacgatcgcaccactgcactccagcctgggtgacagagcttgactctgtctccaaaaaaaaaaaagtacaatatagtaaatccaattaaattgtaaccattgacaacatcatttgccatatgaatcaatttttgtcatagatttaaatttttaacttcaaaagaaaaatatcattttaagagtattaaaatttgggaacttcaagtttggcaagtttattatatatgttcattatagaaaaaaatattaagcaacaagttaaatatcacctacagatcagcagccttacctttgtagattttttttctgtgcatagccataactttttcacaaaactgagatcatactctgttattttataatctgctttttttaaaacacaacaaaataatgtgatcacttttccatgtcaataaagtacatttcttattttagcatcttttgttgctgagttttaactctagatgtgctagtgtttattcagccattccctcatagccatttaagtggtttccaaatctctattctgataggtcgtgctttgatgcagtctcttgtaactaaatctctatgcacatccttarttagtcccttaggctgaattcccagaagaactggtgggtcaaagaggatccccataatcagggtttgactgttgtctggatagattaagtttcttgctttctctgaagagtaagagtccacctgtccctcagcttatggcattaacattttttttcacctctgctaatgtgatattttaaaatgttttattgttgtaattggtcagtaagaatgaatttaaacatgtttattggatttctttaagtggtgagcaatccttgataacagttgcttgtttcctaaatatggaatgtgaacaggttttgggtgatcagccacttcctataaaatgagggtccaagaggaaacatttcattctttatttttgaatattcacactccactggattaacgtgttcaatttagtgtatgtgtgtcatggtcagaatcccttgggggtgatctgtttgtataaaaacaattttaacacaaattcaagacatatgatctgataattagtaaggtgaatagcttcaagaaactctagctgcatctcataaattctatcagtgcactaaaaagccactccaaatgaatatacgatcaaaggaaaaacactatggtagctacagaagccaggctgcaagggaaatcctccaggcctccctttcaatcaaattgtcacccctatccaagaactgcccctggcaaatggtcataattatggacacattgaaaaagactctcctgggaaatctaggatttgtgacttcaaaaggtagtccacaccataaatccaggacctctcatgttctatttttaaaacacataccatgataaagttatattccacgtttttcaaatttaaaactagataggtaagaatgtgtttgtgtgtgtgtaaagtgataaaagtgtgtgtgtgtgtgtgtaaaatgataaaagtgagacactaacttccatggcccagaatcttcaaatgaattatgaagaattaaatactcaatggaacctaaagtccctcagtgaatctcagccgttggccatgcatattggagctcactgccagaagagtgtgaagctctgagaggcttaatgtacattattaagctgccctggtatctgtatacctgatggtagtgctattggcatttgtttaataaccaatatcagtcttcctgtcatcctgtcatcatcccacgagtgtgacatgaaggaaaacaaaaactttagaatcttactgtggaaacacaaacttccactatgaacttgaaaacttgctggtctaagacatgacagatcccttcaatcctggatgtaagaggtagatctgtactaattttcttatttctgagtttcttgaagtagtaccataaatacaggcaaaatacaggacattcaagttacagaaacacttttttactgatttttttcacctacttttttccagattaaatgtacctaaagatagtttgattccactgacaaaaagggaccaaatgaaacttgacagtatcctgaggagaccttatgttacctgccaaccattttggagaaaagaagtatgtttccttttacaactcaagtgttgcatgtttaattgtcttttactttagtagtggctattcacatcgtattttgaaaatatccctcttgaaattttatatgacaygactaacrtaagtgttgtttggcagtaaatagttgttgaaattgagtcatatgaatgctaatagatgagatcagtgaatggagctggcctgtttgtatccttatcatggttatatacacattcttgatggctgtatcatagtttgtgggattaaaaaaaggaagaagaaatcataaagatttcagactatccctaattattgaagacagcatacagagtactctcactccagatatttttagctgtagcagctctggaatattctggctgacccttaagactattgtccctggttttggagaataaagcaattctagattactagtttgttgaattgacagaaatgcaactaagaactctggtatgagtayattttacttttattgacagatggaaataatggcagactctaaaatgaaggcagaaattcaagctttgactttcctatcatcagattatctttccagagtgtacttacctaacaaattaaaatttggaggatggatataaaaataaatcagaagaacttctgattgccagaggcttttcattagttttgttttgattggcaaatactattgtggaaagaacatatattatattcttaattctgtaaaagtgaaataaaataactttccgttaattatatwtttttgtcaaaacaaatgctgtactccaattttctttgcaaggccttattcttgcctctatagagacagatttctgtcctatcttctaaagcaaattataaaagaatatgttattttgacctttaaattatttttgaaaaaataatattttatacatgtcatcaaagtctacaaaatatttaccttctacgatacaactaatgttaacgcataaagtatcttactggtaacaaaaatcataatgatctgaatttgagatgttgcaaatgaattgtggkgtccggtagtttcttcttacattttcctttgcctttatactttaggggtcttrctccattaattcatttgttacattagtaaaattcagtatgaataaatatttggattgatgtagtcttcagtgttttgctttattttgtattgagcctattttttattgataatattatttatttgaaaagtttctcgaaggtcttgaatgcttctctagtctgtctatagaacaaaaaacttcttcagttttaagatctacagaagcctcagattttaataaggtacttctccaacagtaaatatgtgaccttttccctccataaacctatcttaattttgccagaggtcagttttatgattttattctgtactttcagtaaacctttaactgcactgaaagtttcttgtgcttgcaagcaagaataagaatttatagaagcacggtaatattaggttagctattttataaagagaaatggtaacaataataataatatataccatttctgagaacttacatgtgccaatcactgctgattcagtatctcatttaattcccccaaggaccttgtaattactgggtaactacaccatagttttcaggtgagaacactgaggatgctatttgtccaaagccacaataataccaggggacaataatactacctacctcaagaaaatgtgggtctcaatgcaaaatgtaaatgtgggatccctttttattaagaatttcaagatgatagcagcagagaattaaaccaagcacaggcccttcttagcctggggtcctgggtgactgcacgggtggtacacctgtgaggctgggcctgcccaagaggttgtatgtagtaaggattgaagaaggtaatataataataaaggaaaatacatacatagcacttactatgtgctaggtatttttgtaggtgctttgtaaacaataactcattgcatcttcacagaaaccttatgagctaggtacttttaaaaaatcacccccattttacaggtgagaaaacaaaggtacagaaaggttaaataattttcccaaggtcacataactaataagcagtggagctgggacttcaaaccagaaagtgtgggtaccatggcgctagtacaggtaaagtacttcacgtgtggtctgtgtcctcactgcatggaaaggtctgcaagtcttattgttggctagtgtcaaatcaagatcccccgataccatacctacaattaacaaatatgttatattccctggtcacataggaaccacacatttcattttgggaacattctggtatgctgttaattttacttactcgtgagactatcaaaaattctaaaaacatttttataaataagaaaaaatttcctctgaatttataccatacttactcctttaacatgtaacagtgtcacttaactttggtatgctttgtaaaggaagaaattactaacttaaaaatatgtttaacccacgacacatctggcttaggatatactatcaaaatgggaaggagtgacaaatctacgatagtcattcaaatttaaaaataaatttgaaaaagacagatacctccagtttggataattaagtcatctcaagtttattattgcaaatttacttaaaataattttcaattatttgggaaatgaaaatggaaagagagcaaaatacactatagtttgacgttactacctatctttattagatgaaaatgaaaaattaatgctagtagctatttgggaaccatctagaattctaattctaaagatttctttctaaaaaggattaccataatacttagcatttaaaatggtaactgataacaataatctcatctaccatcatctaactgtatctaatttggatatttccataattttaatcaagaaaacattagattggaatctttaaaattaaaatgtataaaaactaatacaacaaggctgggcacggtggctcacacctgtaatcccagagctttgggagactgaggaggaggattgcttgaacccaggagttcaagaccagcctgagcaaaataatgggactcccatctcaatttttaaaaattagttggttatggtggcacatgtccataggctcatctactagggaggttgaggtggaaggatcacttgaaaccaggagttcaatgctgcagtgagctatgattgcaccactgcactcaggcctgggtgacagagtgagaccttgtttcaaacaacaataacaacaaaaactagtacaacaaaaaggtgctcagagactcttagttttcccttaagggttcataattaccctaacaaactaaaagttgcttgtagtatcccccgttttctgagaaatttgattataataattggtgatactaagtgatttcagaagttatgagttcatagggaagaaaaaccatagtgcactttataaaaataaggaaaaccctccagggtttccatctatgacttccttactgagtgtctcagttgagctgctagtttgatgtagataatctgttcagtggtgctgaaaagaacatattctctaagctatatatacatgtacattaaaagattttcaatgaaatgtttttgtagtgaaatattgagaaacgtgcacttctgtttgctaaatgaacttctctgttcactgttacacagataggtatcccaaggaaacaatcctgtagaaacaagccaaggtcgccctctgctggcaaacgctcattattctctcaactccttccactattttgggtggaaatttctttgaaatgttttcaagtcattgtctaaaggaatggggtagagtcttgagtcacaacaaaagagtttggggaaaaccaagagggtttctatgtgatacactcaacaggaatccgctttgttaatcagctttggatgccccaattccctgtaaagctacacttaatgtgtgcttctttgcaacctagctattcacaaaactttaagccaacatattacatctcttttattaaaaattcaaaatgaaaagtaactcatgctaagaatataggcatgttcagtttctattcatctagcaattaatagaaactgtacttattcataaatattccctgtgtaaaaatggcagaaaagtttaccagtttgaatgacagtcactaccaaaatttaattatttttctattgtttaattatttttcacctatattgtatggctcaataatcatacaatcatacccagggataaaatcttactgatctcgcagagcacggtagctcacgcctgtaatcccagcactttgggaggccaaggtgggcggatcacaaggtcaggagttcaagaccagcctgaccaacatagtgaaaccccgtctctacgaaagatacaaaaattagccaggcatggtggtgtgcacccgtaatcccagttactggagaggctgaggcaggataatcgcttgagccctagaggcagaggttacaccgagccgaggtcgcgccactgcactcactccagcctgggcgacagggcgagagtccatctcaaaaaaaaataaaataaaataccgttctccctttttgtttctaggaggcaaaacataaatcagcataatctgccacctgtggaagtgtagagttaggttttggggcaggctgcttgcattccaattctacgtctactccttgcctctatggctgggacaagttacaacctgatctcagtttcatcaaccataaaatgggcataacaacaataataatgacttggtagggtcatggtgaggattaaatgagattatccatttaacaagagtcttggaatatcagctataatatttgggcgagcatactgctcctcagtggttccactgatggtatatgcaaaagcagtttgtcaactacataatcctaaacagcgggaagagtttatagagcatgctgaataaccaggattatagaggaatctgtatcataatagaggcttctggaagatacattgggcgttgaaacataaaatgcaacaagtattaataacgaacacatgtaagatactctgcttggtgctgcaaagcatatacatggaagtagatacaagttttaaatctaggaatctagacaagacaaatacactatttaatgaggcagaatatgcctcgaaaccctgagagagctttgggagggcttttgagagtttaaaggaaagatagtaagaggagttccattgaaaaaggataagaaaatgtagttgaagcacttctcagagatgagtccaaagctttgctggtaggagggtcaggcacaggacagacatcatggacctactctgtatcagttgtgtgagctctggtaagtcacattgagagatgacagcgtgctggcagtcctcacagccctcgctcgctctcggggcatcctctgcctgggctcccactttggcggcacttgaggagcccttcagcccaccgctgcactgtgggaccccgtttctgggctggccaaggccgaagcccgctccctcagcttgcagggaggggtggagggagaggcgcgagcgggaaccggggctgcgcgcggcgcttgcgggccagctggagttccgggtgggcgtgggcttggcgggccccgcactcggagcagccggccggccctgctggcccctggcaatgaggggcttggcacccgggccagcggctgcgaagggtgtactgggtcccccagcagtgccagcccaccagcgctgcgctctatttctcaccgggccttagctgccttcccgcagggcagggctcgggacctgcagcctgccatgcctgagcctcccaccccctccatgggctcctgtgctgcccgagcctccccgacgcgagtgccacccccgctccacggcgcccagtcccacggaccacccaagggctgaggagcgcgagcgcacggcctgggactggtgggcagctccacctgcagccccggtgcgggatccactgggtgaagccagctgggctcctgagtctggtggggaggtggagaacctttatgtctagctcagggattgtaaatacaccaatcgacactctgtatctagctactctgatgcggccttggagaatctttatgtctagctcagggattgtaaatacaccaatcagcactctgtatctagctcaaggtttgtaaacacaccaatcagcaccctgtgtctagctcagggtttgtaaatgcaccaatggacactctgtatctggctactctggtggggccttggagaacctttgtgtctagctgagggattgtaaaggcaccaatcagcgacctgtcaaaacagaccactgggctctaccaatcagcaggatgtgggtggggccagataagagaataaaagcaggctgccggagctagtagtggcaatctgctcggggcaccttccacggtgtgggaggtttgttctttcgctttttgggaccacgtcgtctttatgagctgtaacactcaccgcaaaggtctgcagctttactcctgaagccagcgagaccacgagcccgccgggaggaaggaacaactccagatgcgtcgccttaagagctgtaacactcactgcccgaaggtctgcagcttcgcttctgagccagcgaggccataaaccaccagaaggaagaaactccaaacacatcttaacatcagaaggaacagactccggatgcgctgcttttaagaactgtaacactcaccgcgaggctccgcagcttcattcttgaagtcagtgagaccaagaacccaccaattccggacacaacatcacctctgtcagcttcattttccatatctataaaatggagataatcacaatacctatcttttagggctggtctggaaactacaggagatggagcatctaaagcgcttagcatagggtgatgctcaaaagagctattattaccatcatcgtctagactagaggttctcagtcttggctgcatcttagaatcacctggggagcttttaaaaaatattaatttcctcttttctagcccaggcgtactaaatcagaatctctaagggtgcagtgtaaacatcacagtttttaaaaagctgcccaggattccaaatgatctacagccttggtacttaactc

SEQ ID NO: 95933 - DNA, 44197 bp, Homo sapiens
  misc_feature (1)...(44197): n = A,T,C or G
gacaaagtgcaaaatattgaagatgggtaaaaccgaacagtaaaataagaggaatccccaaaaaagaagactttcaaaaaggtttgaaactacaagctgaaagaacataatgcatgcccagaactatcactgctaagatatgttctaataaaatattaaggctttaggctgggtgagtggctcacacctttaatcccagcactttgggaggccgatgcaggtggatcacctgaggtcaggagttcgagaccagcctggccaacatggcgaaactctgtctctactaaaaatacaaaaattagctgggcatgttggcgcatgcctataatcccagctactcaggaggctgaggcaggagaatggcttgaacccaggaggtggatgttgcagtgagccgagattgcgacactgcactccagcctgggcaacagagtgagatgccatctcaaaaaaacaaaaaacaaaaaaacacacaaaaaaagttatttgcagaaatttgtggctggcctgcaggtggtaatttgcagactcatgctctgtagggaaggaacatgccctcctggttcctacttctcattagctggtgctctgatttacatgtttttgtaccctccaaaaattcatattggaatttattccctaatgccacagaattggaaggagtggcctttgggagatgattgagtaatgaaggctttgcctttgtgaattgtattaagttcccttataaaatggcttgatggggggggagttcactgcttttttgcccttcttccatatgaacacccagcattcctttccctggaagatgcagcatcaagccaccctcttaaaagcagagagcagccctcaccagacagccagtcctgctgatgtcttttttttttttttttgagacggagtctcgctctgtcgcccaggctatagtgcagtggcatgatctcggctcactgcaagctccgcctcccgggttcacaccattctcctgcctcagcctccagagtagctgggactacaggcracckccatcacgccctgctaatttttctatttttagtagagacggggtttcaccgtgttagccaggatggtctcaaactcctgaccttgtgatctgcccgcctaggcctcccaaagtgtgggattacaggcgtgagccaccgcgcccagcctggtttcgatcccttgacctcgtgatccgcttgcctcagcctcccaaggtgctgggattacaggtgcgaaccactgtgcctggctgagttttgactaatatagataataacagaaatttggagtgtgaaggaactgttctgaacattcttccatgtgcatttggtgggctcagtatttttgtttcctgtgatatctggttagttctatatttccaaaattagggaataaggaggtttcgctaatctgctgatgtgcagtgtggtatttctcacgtttacttgactatgtggaaacacttttctagagctttttactgagacttgcaacaccccagtcactctggaagtcatcaatggggaagaaatggagggaaccttggtgttctcctttcccacaaggaaaatcaggtgcacatacaacctatgaggagacatggaggtaagaaggattaatatttgaagagtcggttattttgtagaattttcttcaattttggtttgtctgattttatctattttttttattattactatttttttgagatggagtcttgctctgtcacccaggctggagtgcagtggcatgatcttggctcactgcaacttctgtctcctgggttcaaatgattctccggcctcaacctcccaggtagctggaattacaggtgtgtgccaccatacctggctaattttttgtatttttagtagacacggggtttcaccatgttggcctggctggtcttgaactcctgacctcaggtgatctgcctgccacagcctcccaaagttttgggattacaggcgtgagccatggcgtccggccttcttttttcttttttttttttttttgagacaaagtctcactttgtcatccagggtggagtgcagtgtcatgatcacagctcactgcagctacaacctcccaggcccaagtgatcctcccacttcagcctcttgagtagctgggactacaggggcatgccaccacactaggctaatttaaaatattttttgtaaagatagaatgttgctatgttgtccagactggtctcaaactcctggggtcaagcaatcctcctgccttggccttccaaagtgctgtgattacaagcatgagccaccatgcccagccttgttttgttttttgagacagggtcttgctgtcacccaggctgaagcggcatgaacatagcttactgaagccttgatctccggggctccagtgatcctcctgcttcagcctctcaagtagcggagactacaggtgtcagaggcatgtgaacgacaacaactccatcctgaataggaactgggtaaaacgaggttgaaacctgtgagctgcattcccatacagttaaggcattttaagtcacagcgtgttgggaattggtgggttcttggtctcactgacttcaagaatgaaaccgcagacccttgcggtgagtgttacagttcttaaaggtggcgtgtctggagtttgctccttctgatgtttggatgtgttcggagtttcttccttctggtggggttcgtggtctcgctggctcgggagtgaagcggaggaccttcgcggtgagtgttaacagctcttaaggaggcgcgtctggagttgttcgttcctcccggtaggtttgtggtctcgctggcttcaggagtgaagctgcagaccttcgtggtgtgtgttacagctcataaaggcagcgtggacccaaagagtgaacagcagcaagatttattgccaagagcgaaagaacaaactctccagtgtggaaggagaccccagcgggttgccactgctggctctggcagcctgcctttattttcttatctggccctacccacatcctgctgattggttcattttacagagaggggagaggtctgttttgacagtgtgctgattggtgtctttataatccctgagctagacacaaaggttctccacgtccccactagattagctagatacagagtgtccacacaaaggttctccaagtccccaccagagtagttagatacagagtgtcaactggtgcattcacaaaccctgagctagacacagggtgctgattggtgtgtttacaaaccttgagctagatacagactgccgattggtgtatttacaatcccttagctagacataaagattctccaagtccccaacagtctcaggagcccagctggcttcacccagtgaatcctgcacccgggcggcagggggagctgcctgccagtccccggccgtgcgcccgcactcctcagcccttgcgtggtcgatgggactgggcgccttggagcagggggcggcgctcgtcggggaggctggggccgcacagcagcccacggaggagggggaggctcaggcatggcgggctgcaggtcccgagccctgccctgcggggaggcagctaaggcccggcgagaaatcgagtgcagcgcccgtgggccggcactgctgggggacccagcacaccctccgcagccgctggccggggtgctaagcccctcattgcccagggctggcagggccggccggccggccgctccgagtgcggggcccgccaagcccaggcccacccagaactccagctggcccgcaagcgccgtgcgcagcctcggttcccgctcgcgcctctccctccacacctccctgcaagctgaaggagccggctccggccttggccagcccagaagggggctcccacagtgcagcggtgggctgaagggctcctcaagcgcggccagagtgggcgccaaggccgaggaggcgccgagagcgagggagggcgcacgctgtcacctctcaacaggatgagatagaaggtcggcacaaaatactggtcataaagaccttactgataaaacaggttgcggtaaaggagccggccaaaacccaccaaaaccaaaatggcaatgagtcctcactactacactcccaccagcgccatgacagtttgcaaatgccatggcaacatcaggaagttatcctatatggtctaaaaaggggaggcatgaataatccaccccttgtatagcatatcatcaagaaataaccataaagatgggcaaccagcagtcctcgggctgctctgtcaatggagtagccattcttttattcttttactttcttaataaacttgctggctgggggcggtggctcatgcctgtaatcccagcactttgggaggctgaggcaggtgggtcacgaggtcaggagtgcaagaccagcctggccaagatgttgaaaccccgtctctactaaaaatacaaaaattagccgggcgtggtggcgggcgcctgtaatcgcagctacttgggaggctaaggcagagaattgcttgaacccgggaggcacaggttgctgtgagccaagactgcgccactgcaatccagcctgggcaacagagcgagactccatctcaaataaataaataaataaaataaaaaataataaacttgctttcactttgcactgcggactcatcctgaattctttcttgcgtgagatccaggaaccctctcttggggtcaggatccagacccctttcctgtaacacaggcacttgtcaccaggcccggctgatttttgattttttgtagagatggggttttaccctgttgcccggtctagttttgaactccttggctcaagggatcctccctacttggcctcccaaagtgctgggattggtggcatgagccactgtgcctggccttgtctgatatttatgactagattgaggtaatggattttcaataattttgtggcaataccacagaagtgatgtgcctttctcaatggatcctattagtagatacctaatgttactatattttatatgtggtgatgttaactttgatcacttgtttaaagtggtgcctgccaggattctccactgtaaactattttttcctttgtaattactaaacattttatttttattttttaatttccttttgagagggagtctcgcccagtcgcccaggctggagtgcagtggcacgatcttggctcactgcatctcctgcctcccgggttcaaatgattctggtacctcagcctctggagtagctgggattacaggcacgcaccaccacacccggctaattttattttatttatttatttatttattttgagacggagtctcaccctgtcgcctaggctggagtgcaatggcgcgatcttagctcactgcaacctccgcctcccaggttcaagcgattctcctgcctcagccaccccaagtagctggaattacaggcgcctgccaccacgcccggctaattttttgtatctttagtatagacggggtttcaccatgttggccaggctggtctcgaactcctgacctcaggtgatccacccgcctcggcctcctaaagcgctggaattacaggcgtgagtcaccgtgcccggcctaattactaaacattttagtagagatgttttgaaactttgcatatatcctgtttcggcttcaagttctgcctactaattttagcattcatccgtggatgttggggaaggccaacttttactttctcaatctgagcaaaatttcactgttttaaggagcaaaacgagcagaattattggacaggaagaatggtaggagagagtagagacctaggcaagggccgctcctgtaaaaattaggtaagtgaaaactagtaataataagtacactcgcggctgggcgcagtggctcacgcttgtaatccagcacttcgggaggccgaggtgggcggatcacgaggtcaggagatggaggccacagtgaaaccccatctctactaaaaatataaaaaaaaattagccgggcgtggtggcgggcgcctgtagtcccagccacccgggaggctgaggcaggagaatggtgtgaacccgggaggcggagcttgcagtgagctgagatcgtgccactgcactccagcctgggcgacagagcgagactccgtctcaaaaaaaaaaaaaaaaaaaaaaaaaaaaaaaaaaaaaagtaagtacactcgcactacgaacagaaggatatcccgagcagctctgaaagggctttagcaatcaggcgccgggtcggcttcccggttgccccggagacagggtccttccttgttcggcgccgccatcttgtgtcaccagcccttgcccaatgaacggctgctcagtggcgggagggcgggctaccgcgcccgggccctacccgccctggcgcactgctcttcccggtcatggaggcgccagccgccggcttgtttctgctcctgttgcttgggacttgggccccggcgccgggcagcgcctcctccgaggcaccgccgctgatcaatgaggacgtgaagcgcacagtggacctaagcagccacctggctaaggtgacggccgaggtggtcctggcgcacctgggcggcggctccacgtcccgagctacctctttcctgctggctttggagcctgagctcgaggcccggctggcgcacctgggcgtgcaggtgagtgtgggcgacccctcgccgccgctcccgggacccttcccgcctcccttcctggcggtcccccgactccgcccgcgcccctctaggcctcaggaaatgcggagacccgggcggcgggcggggcacagggggtccgtgggattgcctcggggcccgcgaggagtcctgggtggccaggggccccggcgcctccgctgcccccggtgcgcgcccgccctcctgcctgggccacgtcagcaccggcctgcccccgcgcgggtcgctgctcacgtgggcagctgctgggatccgcggccgaccagcctcggagcttgcccctgtttgsgccgttctcggcaccgctcgggagacctcgggccggtagaacgcacctcccttccgtaaggcgagcgcggcagcccctcggcccggtgccagcgggcgccagacttcatttctcacggcccgacgaggtggctcaagtagaggacaaataaatgaattaaagtgaatttcattctcttaattcagtatctggtccgttgtaggtgcttctttctagacatagagaaccatcagaaatgtaacaggtttcgcatttttaagttggtaatcacttgaaatccctatgaatgtgatgcattttaaggttcctagtgaacgctttctaaatgttaaaactctttttaaagttagttttaaaactcctgcacgtaatataagttctcttatgctgtacagaaaaggaaagtccaattttctcccttccccctgctgcttctcattcttacacctcggcaataaatggctgtgtttggcttaaatgtttccaggtatttcagtgatcaccaaagaaaatgttgggtttgggagtaaagggaatgtacatacacagaggtttggtttttattactattgttgttaaacaatttcattaaatgattacctaattatttgttgagagaatagtcattatagtgtcacatttcttctaagcacacttcgttctctgactgaatatggagctataaagatgggtttatagagattacgtttctgaaatgactcctattttctttcatgcgttgtccatgatgaaataaagttttactcaaaggcttgtggaaagatagatcaaaacttcatgtaaatttgccttgccatctttgaatgtcttgaatgttaaatcccgttctttatagaagccagttgtgatttaatgagcttgttacagtataagtggaccacagcaggagctcggctatcctgccatcatgcctgcgagctaggttaatgtacttattttatcttgtttttattttttctcccaactttattgaggtataattggtatacaaaaaactgcctattattagtatattcaaaatacgtatacactggtgtaaccattaccacaatccgggtaataaacatatctgtcacctccagaagtttccttttgtcctttagtttgtttgtttctgtggtaagatactttcttactgggactctactgtgtgtcagatattatggtgggtattttaaatatattctcatttagccctcatagcaaccatttaaggtataaatcctcatatagcaggcaaggaggctgtagtctgtcaggttaagttatttagccccttacatgcggtcttacagtgcagagtaagtcagggctccagcttattccgtaagttgtgtgttctcacactgtataatgttgcctcttctggcttttatggctgtgagataggattgtattgggtataagacttgcagtcacattaacagatttatttaaaatcattttcaattttgtagtccaagacaccagttaaatggatatatgtgctattttgtactcctatcccagtgggaaacaactggatgataaacttaacaaggagatgtatattttccaacagttgtgttggaaactgatgaggttgctgaaatgtttttcagtgggttcttttctttttctttttttttttgagacggagtttcactctcgttgcccatgctggagtgcaatggcgctatcttggctcactgcaacctctgcctcctgggttcaagcaattctcctgtctctcctctggagtaactgggattacaggtgcatgccaccacgcctggctaatttttgtattttttttttgatgcagagtcttgctctgtcgccaggctggagtgcggtggtgcaatctcggctcactgcaacctctgcctcccaggttcaagtgattctcctgcctcagcctccggagtagctgggactacaggcgcgtgctgccacgcccagctaattgttgtattttttttgtagagacagggtttcacgcatgttggccaggatggtcttgatctcttgacctcatgatccgcccacctcggcctcccaaagtgctgagattacaggtgtgagccactgcgcccggccaatttttgtatttttagtagagacagggtttcatcatattggtcaggctgctctcgaactcctgacctcaggtgatctacctgcctcggcctcccaaagtgctgggattgcaggcgtgagccaccattcctggccttcagtgggttattttcaaacccttgtagaattttaggagctagcagaagggaccatggtggttactgactaggagccagtggttgcttctctktttaccaccaaggacccatctaatgatttttcctctcttttggatcctgtatctgaaatattttggcatgctaatattttattaagtaacaatatttttcaataaaacaaataagtctgtataactgaacacaatgagagttcctgatacacacacatatactagaatgttccttttttttttttttttcttgaggcaagttctcaatctgttccccagggtagagcacagtggcccagtcagagctcactgcagcctcgaatttctgggctcaagctatcctcccacctagccccctgagtagctaggactacatgtgcgcaccactacgcctggctaattaagagcaattttttgttttttcagagatggggtcttgctgtgttgcccaggctggtcttcaacacctagcctcaagcagtcctcccaaagtgttgggattacaggtgtgagccactgcacttggcctrgctggaatattcccactgtgataagattctagtcaaagtaatgaaacttgtttgtattagactgtacagctttattgaggatgattgtatgattgtttttaggctttttgatatattttaaaagttctccaatacagctttttgtatcttactgggaatcactacttcagtcctaaaagatagtctaatttttgtttttttcagwtgagggtgggttggcagagagatcagtgggatatgtatacccttctcccttgcagtctgctccacagtcttatgattggagataactactctttctcagaaaacccctgcagcctgctggagtgaacatccttttcctggttatgtatcttgttgctgtgagggtaccccaaacagtggtcattggctcctccccaagggtattttgccactgttaaccatttttttttttttttgagaggaagtcccactctgttgcccaggctggagtgcagtggcacgatctcagctcactgcaacctctgcctcccaggttcaagtgattctcctgcctcagcctcccaagtagctggccttaaaggtgccygccaccacacccagctaatttttttatttttagtagagatggggtttcaccatgttggccagctgctctcaaactcctgacctcaggtgattggcctctcaaaatgctgggattacaggtgtgagccaccgcacccggccaacttttttttttatgagatggagtttcactcttgtcgcccaggctggagtgcagtggcatggtcatggctcactgcagcctccacctcctgggttcaagcaattctcctgcctcagcctcccaagtagctggattacaggcacctgccaccacgcccarctaattgttgtattttttagtagagatgaagtttcactatattggccaggctggtctcgaactcctgacctcaggtgatccgcacccctcctctgcctgtcagagtgctgggattacaggcgtgagccaccatgcctgcccagttttaacttttatattagtgaagaaacagttttaggctgggcgtggtatctcgtgcctgtaatctgtgggaggatcgcttgagcccaagagttcgaaaccagtctgggcaacatagggagatcttgtctctacaaaaataaaaacccatgagacttttttttttttttttttttttgagacggagtctcactctgtcgaccaggctggagtgcaatggcacgatctcagctcactgcaacctccgtctcccagattcacgaaattctcctgcctcagcctccacacgccaccacacccggctaattttttgtttttttagtagagatggggtttcactatattggccagactggtcttgaactcctgacctcgtgatccgcccaccttggcctcccaaagtgctgggattacaggtgtgagccactgcgcccagccctgagacttttctattacatcactaaatacatttctttgagtatgcttatttgaatgtaaatgagaaaagcatcaagaaagaggcctttgggaagtatatttggaagtgtaatctttttgtgtatgtgtgtatttctttttttgagacagagtctcgctctgtcacccaggctagagtgcagtggtggtgcaatctcggctcactgcaacctctgcctcccaggttcaagtgattgttctgcctcagcctccctagtagctgggacaacaggcgagcgccaccacgcctggttaatttttgtatttttcgtagagacggggtttcaccatactggccaggctggtctcaaactcctgacctggtgatcctcccgcctcagcctcccaaagtgttgggattacaggtgtgagctaccacacccagctgtgtgtatttcatcattcaggaaaatgttacgcatttatagcggttttatgccacttttttttttttagatggaattttgctcttgttatgcaggctggagtgtgatggcrccatctcagccggctgcaacctctgcctcccgggttcaagcaattctcctgcctcagcctcccgagtagctgggattacaggcatgtgccaccatgcctagctaatttgtatttttagtagagatggggtttctccatgttggtcaggctggtctcgaactcctgacctcaggtgatccgcccactttggcctcccaragtgctgggattaygggtgtgagcccctgcgcctggccatatgccactttgtaaaagtaagtctttgacaatattcttgtgtttcagagaaaaaaaaattgttactgaaaagaaaattcaatctctaaaaagttctgatagtttgactgctttaatggggatgttctaaagcacttggttaattattgactcaaaatttagaagccaaaagacatgaataataaactatctttttctgttgtaggtaaagggagaagatgaggaagagaacaatttggaagtacgtgaaaccaaaattaagggtaaaaggtaagctgacaaacaatataccttgtctcttgttaaaggttatgtcagggttgggatcatatgggatcataaactaggagagttgcttaggaagtgcctgctttattacagggttttttttttgtagagaggaggtctagctatgttgcccaggctggtcttgaactcctgagctcaagccatccttctaccttggcctctcaaagtgctgggattacaggtgtgaaccactgcatctgtcctagaggatttttttttttttcttgagacagggtctgttgcccaggctccattactgtggtgccatgttgactcactgcaacctccacctccagggctcaaaccgtccttctccctcagcctcccaaataggtgggactagaggtatgtaccaccacacttggctaatatgtgtgtgtgtatatgtatrtatttttagtagacaccgggttttgccatgtcacccaggctggtcttgaactcctgtcctcaagcagttctttgcctcccagagtcctaggattataggcgtgagtccattacgccccaccgaggatgttttaattaatgtatgtgataataagcaacatgctgtaatatattctggactcatttatgacttctcattactaatgctgaaattggattcccctaagcagtggcagtttgttttataggaagaaagtagttactttctatatcagatcagttctccctcctggttccacagagctttatgtgagaactccaagctgtttgcctcagcaagtattctcctatctatgattggctaccattctgcttccatggggcagacaaccttccccctggatatctcacccctaagccttcagggcattcaaagtggtaacttctttgaaggcctactgtgaaggctgggtggggttaaacttgcatagttgtttgctcagacctcagcacctagcgtggagcctggaacttattagttattattattattattttttggagacagtgtctgttgcccaggctggagtgcagtggtgcgatggttcaagtgattctcttgcctcaggctcccgagtatctgggattacaggcgtgtgccaccatgcccggctaatttttgtattttttttttttgagagagtttcgctctctttgcctgggctggagtgcaatggcgcaatcttggctcactgcaacctcctcctcccgggttcaagtgattgtcctgtgcagcctcccgagtagctgtgattacaggcatgcaccagcacacctggctaatttttgtatttttaatagagatggggtttcaccatattggtcaggctggtcttgaactcctgacctcaggtgatctgccgcctcggcctcccaaaatgctgggattacaaatgtgagccaccgtgccccacaagttttgtgtttttagtagagacgggtttccccatgttggccaggctggtctcgaacttctgacttcaggtgatctgcctgcctcagccttccaaagtgcggggattacaggtgtgagccaccactcctggccccatagtttcaattactgtgtgatcctacctatctttgtttttttttttttttggagatggagtcttggtcttgttgcccagactggagtgcagtggcgtgatctcggctcactgcaacctcagcctcctaggttcaagcgattctcctgcctcaggctcctgagtaactgggattataggcgtccgctaccacacctggctactttttgtatttttagtagagatgggatttctccatattggccagactgttctccaactcctgacctcaggtgatctgcccgtcttggcctcccaaagtgctgggattacaggtgtgagccactgctcttggcccttttttcttttttcttttttttttgagacggaatttccctcttgttgcccaagctgaagtgcaatggcacgtgatctcggctcactgcaacctccgcctctggggttcaagcgattctcctgcctcagcctcccaagtagttgggattaaggcgcgtgctaccacgcccagttaattttttgtaattttagtagaaatggggtttcaccatgttagccaggctggtctcgaactcctcaggtgatgcacccgcctcggcctcccaaagtgttgggttacagttgtgagccactgcgcctgacccctttttttcttgtatgtgagtatatctattcttttcttttttgtgagttggagtctcggtctgtcacccaggctggaatgcagtggtgcgatcttggctcactgcaacctctgcctcccaggctcaagtgattctactgtctcagcctcccgagtagctgggattacaggtgttcaccaccacgcccagctaatttttttgtatttttagtagagagagggtttcactatgttggccaggctggttttgaattcctgacctcaggtgatccacctgccttggcctcccagagtgctaggattacagrtatcagccactacctggccaccttttttgttttctgtgttatcttcatagttgtctttctttggttgttaagtttaatccttgaattactttgagttcatgtacagcaacatcctctcaggagccacattttaatgcgtggtgattatctcaatttttcttggtgattatcttgattttccactgagtgtatgaagtaggcatctcaccagccccgaggctgtaagatctgagagttagctttaaataagtcgctattaaaattgctttctcttgctttaagagactcctctccctctctgaggctgtctgagtaccctgtctgtgtttattggctctagctgctggcttgtagcgtcttggataggcaaggtaacttagttattaggactgtgctttttgcatctttactgcctgggatcaaatcctagctctgttatgtttactagcattttcctcagtttcctcatcagtaaaataatagtgtttacctgatatgatcatggctaagagtcactaaattggccaggcgtggtggctcacgcctgtaatcccagcactttgggaggccgaggcaggcagatcacctgaggttgggagttcgagaccagcctgaccaacatggagaaaccccatctctactaaaaatgcaaaaaagttagccaggagtggtggtgcatgcctgtaaccccagctactcgggaggctgaggcaggagaaccacttgaaccgggaggcagaggttccggtgagccgagattatgccattgccagcctgggcaacaaaagcaaaactccgtgtcaaaaaaaaaaaaaaaaaaaaagattcactaaatcaatatatatataatgtacttggagccttagtaagcacttaataaattttgaattaatcacaaagaaggctaatggaatggaaggaacatttcaggcagagatatctgtaaagatacggagggttgacatttcatggtgtgtttagttaactgggctttcagagtggctcttgctcagaggaaggtgaagctgtgtagggtgggttgagttcagtttaaggactgctctgaaccattattaaaggcgtgggctttatccttaaagcccacagttgggaacattaaaaaattttttttcatagcttaccattttattcatttctagttatatgtgcatacattatatgaatttgtctttatcacctcttcctgccacagaaactgacctatatggggttctcagtaaatcagtttgagtacatgagtaaaaaaccaagtcattcacacaatgttctcccattagatccagctagagaagagctwyaggaaaaaaaaaaaagacctgctccatgtacatcagtttagacagttctgtgttgtctagccttttattgattgaaaaaccttcattagctggtgcttccacattttggtaagacttgatgttcctaatgatcttggagtgctgaaaggttctgatttgtcttctgaattatcaaagcaaaattaaattatgtggcagcatttaacaacttgtaaaatgaatgtgggaatgttgatttgagattgtgtagatgggctggggggaagggagattaggagattaataggaagagatgcagtagtctaggcacatggtattggtttgaatggaggaggaggcaaaggaagggatgggtctgagaggaatttctgaggcaggattgcccaggtattggggacagggcagagtgaggcatcagaagatgcctgggtttctagcttagagttgatcagatggcagtggtattaagagagatcaagacttgggatcatgaatgataaggttttgttgaattgcatgtggggtggtcagtggagctgtctagtaaacatttgaaaatttgattttagaattcaggacagagagtgggatgagaagcacatttgggacttgaaactaagaattggttaagactgtcctgaggagaagattccgctacttatattttgagtagtgaacgtcacagttgtaatatgaaatataatggtgtgactgataaagacatgcaagttttgtgttctataaagtcatatcaggaagagtgatccatgttctcacctttgaggacaaactcattgaagcttattaattcaatttttcactagtggtttctacgtcttctaaaaattgttctcctggcttggaaaactgattcagtttagaattagtaccctgtgaattttaagtttccaggccatctgtttttcttttttttccttttttgagatggattctcgctccgtcacccaggctggagtgcagtggcacaatctcggctcactgcaacctccgcctcccaggttcaagcaattctcctgtctcagcctcccgagtatctgggactacaggcgcctgccaccacgcccggctaatttttgtacttttagtagagacagggtttcaccttgttggtaaggctggtcagccatctgtttttctttaaaatattagtagctttatttttttcttgatatgaggatgatataagctccttataagacaaattagggcctggcgcagtggctcatgcctgtaatcccagcactttgggagcccgaggcgggtgtatcacctgaggtcaggagttcagaccatcctggccaatgtggcgaaatcccctctgtactaaaaacacaaaaattagctgggcgtggtggcggacgcctgtaatcccagctactggggaggctcaggtaggagaatcacttgaacccagcaggcggaggttgcggtgagccaagattgtgccatttcactccagcctgggctacaagagtaagactccgtctcaaaaaataataataataaaaaataaaatgaaattggaaaagacaaactaaacttattctacaaccttgagacagttaccattaacattttgttgaacattccttgaaatactattctttacattcattcatttttttttttttttttttcttgagacggtatctcgctctgtcgcccggctggagtgcagtggcacgatctcggcgcactgcaagctccgccttccgggttcacatcattctcctgccccagcctcctgagtagctgggactacaggtgcccgccacaacgcccggctatttttttttgtatttttagtagagatgggctttcactgtgttagccaggttggtcttgatctcctgacctcgtgatccacccatctcggtctcccaaagtgctgggattacaggcgtaagccaccctccccgggtctatgtatgtttttaaatggagttattctttgtcatttgtaaacagattttcgttatttacattgtacatggacatctttccatgttaatatagatatgtaggttagccatatttctaatgactgccaatattctattgtgtgaagccatatttctaacgactgtcagtattctgttgtgtggttctattaaaatttttttttttgagatggagtctctctctgtcacccaggctggagtgtagtggcgctatcttggctcactgcaacctccgcctcccgggttcaagtgatcctcccacttcaacctcycaagtagctgggactacaggtgtgcaccaccacgcccagctaatttttgtatttttaatagagacagggttttgccatgttggccaggctggtctggaactcctgacctcaggaaattcacctgacttggcctcccaaagtgctgggattacaggcatgagccactgcacccagccaagagatcacctttaatatagtaatttaagtcttttattaacaggacatggtggcaggtgccagtagtcccagctactcgggaggctgaggcaatagaatctcttgaacctgggaggtggaagttgcagtgagctgagatcatgccactgcactccagcctgggcgacagagcaacactctgtctcaaaaaaagaaaaaaataatttaagtcttctaagacagatatstagctgtttctctcagggctgtttataaatagcaagagtgtaaaacagtgtaaatgttcaacaatggaacaaaagttaaaaacattctaataggtaatcccagctattcgggaggttgaggcaggagaatcgcttgaacccaagaggtggaggttgtggtgagccgagatcgcaccattgcactccagcctgagtgatagagtgagactccatctcaaaaaggaaaaggtgatctcttaaagataattgcttttgtctttggttcaaaattttgttgtgactttgaactgctactactgttttcagtatcctcagtctctcttacttctcttgccttgttcttcctttagtgggagattcttcacagtcaagctcccagttgctcttgatcctggggccaagatttcagtcattgtggaaacagtctacacccatgtgcttcatccrtatccaacccagatcacccagtcagagaaacagtttgtggtgtttgaggggaaccattatttctactctccctatccaacgaagacacaaaccatgcgtgtgaagcttgcctctcgaaatgtggagagctacaccaagctggggaaccccacgcgctctgaggacctactggattatgggcctttcagagatgtgcctgcctatagtcaggtaagctcaggtggagtccagcccatccctgtctgcttcagagaatgtcttgcagagtgactactggttgataggcttgggtggtrtggggtggatgaaatctgcagtcatttctaaggtcatcccaaaagtgtttaacctgcagtgaaatgactccatgggggtcttgtttctccttgggggatcacaggtagaggctaggggtagcatttggagaggtggaatgggtgttggagatggaagcaaggcattccacgcagaggcagtaagagggacaaaggctttgagatggtgtggctgggcagatactggggtagcaaagctgttggagtggttgagggccttccttgaatgttgggcctyggttggaacttgaagagagagggagcaattaaggcttacaaagattttgttactatggcaaatcgcaaacatgccaaagtacaaagactagtataaactcccacacacgtcacttagattcagcggttatcaggttaccataattaacctacctctttttttctttggtggagtacttaaaaaaatttttttttttaagagacaggatcctgctctgttgcccagcctggagtacagtggcataatcatagctcactgtaacctcaaactcctgggctcagtccatcctcccagctcagcctcccatgtagctggagtgacaggtgtgcgtcaccatgcccagttaattttttatttttgttgtagagacgggatcttgctttattgcccaggctagtctcaaactcctgggcccaggtgatcttcctgcctttgtctcccaaagtgctgggattacaggcatgagccatggtccctggcctttttgctagaggattttaaagcaaatctcagcagtcatgtctttttacctacttctataccatctctaaaaaatatgggtattttagacgtttaagatttctttgcactgggtgcagtggctcatgcctataatcctagcactttgggaggccaatatgggaggattatttgtgcccaggaattcaagaccagtctgggcaacatagtgagacctcatttttacaaaaaataataagctgggcatggtgacacactcctgtagtctcagctacttgggaggctgaggtgggaggattacttgagcccaggaggttaatgctgcagttagctatgattgcaccaccccactctaaaaaaaagatgtctttgcatctctctgtgtgtttagaacatgtgtcaccaaggatgtgcaatcaaaatactttgttctaatgctacttgaaataattgtttctttttttttttttgtctttattttattttattttttttgagaaggagtcttgatctgtcattcagactggagtgcagtggggcgatctcagctaaccgcaacctctgcctcctgggttcaagcaattctcctacctcagcctcctgagtagctgggattacaggtgcccgctaccacacctggctaatttttgtattttttgtagagacggggtttctccatgttggccaggctggtcttgaactcctgagctcaggtgatccgcctgcctcggcctcccaaagtgctgtgatagcaggtgtgagtcactgcgcccagcctgttttttatgtttcaaatgtcagtttgatacatagttagggctgttcgttttgggttgttttaaacttttaagaactttttattaacataattttttgaatatgaaaacaacatgatttcgtagtcaaaattacatataacaagttatgtgtaacaaaatcatataacaagttatatgtaacaaaatcatatataacaagttatgtgtaacaaaatcatatataacaagttgtatgtaacaaaatcatatataacaagttgtatgtaacaaaatcatacataacaagttgtatgtaacaaaattatacataacaagttttatataacaagttaaaaggccaggtgcatatatatatatgtatatatggccttatatatataagtgcacttatatatttatatatatacacacacgtatatatataaggccaggtgtaccattttgttttttatatatacacgtgtgtgtgtgtgtgtgtgtgtgtatatatctatagatatctatagatatctatctatctatatatatatatatatctcaagttataggggcaggcgcactggctcacgcctgtaatcccagcactttgggaggctgaggcgggcagatcacttgaagctaggagttcaagaccagcctggccaacgtggtgaaaccgcatctctactaaaaatacaaaaattagctgggtgtagttgcactcaactctagtcccatctactagggaggttgaggtacgagaactgcttgaacccaggaggtaggggttgcggtagccaaggttgtgccactgcactccagcctgggcaacagagcaagactctgtctccaaaaaaaaaaaataatagagaattcttgcttccaattctcccattcatttgttctccttggtaaccatttatgttagctttaggtttattcttctagtgtttccttctaaatgtatgaggatttgtagtaaacatacttatattcctccatgtctcaaaacatagctccctatgtatattgttgcacggtggggttgtttttggggagagakagggtctctgtgcctcctgttgtggttgcagagtgcccagggcccacgtgcccactgtgaagatgacagccttgccactctgagctgtgctttctctaactgcatgatttcttttacttacttcaaactgagtgagagttcatgttgggacactgatttgattttcctctacgcaggcttttaaaaatataaatatttggggttttccactttcctccattttaagttaatagaacgttcatgagaggctgggtgcggtggctcaggtctgtaaccctggcactttaggaggccaaggttggcggatcacgaggtcaggagttcgagaccagcctggccaacatggtgaaaccccgtctctactaaagataaaaaaattagctgagcatgctggcgtgcacctgtaattctaactacttgagaggccgaggcaggagaatcacttgaacctgggaggtggaagttgcagtgagccaagatcgcgtcattgcactccaatctgggcgacagggtgagagtttgtctcaaaaaaaaaaaaaaaaaggtttatggagaccatttggcaaaaaggaagatttgaggtcagttcacaaccactatcgacactatggacattttagtacctgagtcgtgtctaagcatagggctttttaatgtacttattatgcttattgtcatattatgtataaagtattgtgtaatacctttgccacttagaatattctctaaacattttacatattactacattacctttgtcaacctttttttttttttccttaagacagggtcttactctcgcccaggctggagtgtagtggtgcaatctcagctcactgcaacctctgcctcttgagtttaagtgattctyccacctcagcctccccagtagctgggacttacaggcatgtgcgaccatgcctggctaatttttgtattttttgttagagacagggtttcaccatgttggccaggctggtctcaaactcctgacctcaagtgatctacccactttggcctcccaaagtgctgggattacaagtgtgagccactgtgcccggctggcctgtaaacagtttttttgttttgttgtttttgtttttgtttgtttatttgttttttttgagagacagtctcgctctgttgcccaggctggagtgcagtggcacaatctcggctcactgcagcctccgcctcccgggttcaagcgattctcctacctcagcctccttagtatctgggactacaggcgcccatcaccacacctggctaatttttctatttttagtagagacggggtttcaccatattggccaggctggtctcaaacttctgaccttgtgatctgcccgccttggcctcccaaagtttcactgtgcccagcctgtaaaccgtttttaagtggctgactcactgatttgatgtcctagagcttatttgccaagtttctatagttaaacagtttttttctatttaatattataatatacatctctgcatattatacaaaagttatgaatttttgtattctcaggattttctgaagtaatgtttttcaaattgaaggatatraacattttaaaatctcttgctggttgggcacagtggcttatgcttgtaatcccagcactttgggaggtcaaggtgggtagattgcttgagaccagcttggggaacatggtgaaattccatgtctacaaaaaatacaaaaaattagctgggcgtggtggcatgcacctggaatcccagccactcatggggcttgaggtgggaggattgcttgagcccaggaggttgagactgcattgagccaagattgtgccactgtactccagcctgggtgacagagtgagaccgtttataatttaaaaaaaaaaagaaaaaaaaagaaaaacctcttgctgtattttgccaagtagtttttcaaaagatttaatcaattttttaggattccagtgtgtgaaactgccggtttccttatgcccttgcttgtactggcattaaatgctatcaaatatgattatgagtgaattgtagttttaaaaatctagtcatagaatgagtgaataaactagcgaataaactagttgtaagagctaacaaaatagatcttgtccttttcatggacttttgggaagcaaggtgtgttgggccttattgagaggtagtatttaccacatagaagagtgaaatcrggctgggcacgatggcttgctgggcacggtggctcatgcctgtaatcccagcactttggtaggccaaggtgggcagatcacctgaggtcaggggttcgagaccagcttggccaacatggtgaaaccccatctctactaaaaatacaaaaattagccagatgtggtggcacacgcctgtaatcccagctactagggaggctaaggcaggagaatcgcttgaacccaggaggcggaggttgcagtgagctgaggttgtaccattgtactccagcctgggtgacagagcaagactctgtctcaaaaagaaagaaaaaaaagtgaagtcagaacttagcagaccttgtattgccacttaggtttatgaccttgaacaagatattggaaactgccagggcttgaaatttttatttgtcaaatggggataagtagttcttatttcatcatattgtcttgagaatgagatgagataatgcacttatttagaactcttacaaaactgcctaatacaatcagctccagacacattatttttttgtgtcctattttttgagttaataatatatcatgaatatttattcccatatgttagcaagaagtcctagtaaacataattttaaaatgttgcatacgttagatacatcataatttacccgttctgttgctgatatataggttgtctccaatcaatctgatttaaactratggtgcattctctgttgccaaaactttgaactatttgtttccttccttccaggatacttttaaagtacattatgagaacaacagccctttcctgaccatcaccagcatgacccgagtcattgaagtctctcactggggtaatattgctgtggaagaaaatgtggacttaaagcacacaggagctgtgcttaaggggcctttctcacgctatgattaccagagacagccagatagtggaatatcctccatccgttcttttaaggtatggaatgttcaacttggacattgtgagaaatgaggactttatcacagctacctattctttgcttttcgaaactagctaaatatttaggcagttgtttagggttractgatgttcatcttgttgattggcagtgttagaaaccaacagaatcttaaaaaatacccccccatatatatagataagccattttcttttttttctttgagacagagtctcactctgccacccaggctggagcatagtggcgtgatctctgctcattgcagcctccgcctcctgggttcaagtgattcttctgcctcagactcctgaatagctgggattacacgcatgcaccactacacctggctaatttttgtatttttagtagagacaggatttcaccatgttggccaggctggtcttgaactcctggcctcaagtgatccacctgccttggcttctctttcttttttttttttttcttgagayggagttttgctcttgttgcccaggctggagggcaatggcgcgatctcggctcgccacaacctccrcctcccaggttcaagcaattctcccgcctcagcctcccgagtagctgggattacaggcatgcaccaccaagcctggctaatttttttttgtatttttagtagagacagggtttctccatgttggacaggctggtctcgaactcctgacttcaggtgatccgcccacttcrgcctcccaaagtgctgggattacaggcatgagccaccgcgcccrgccgccttggcctctcaaagtgctgggattacaggcgtgagccaccatgcccagcctaaaccatatattttttttttttttggagacagagtctcgctctattgcccaggctggagtgtagtggcacgatctcggctcacggcaagctctgcctcccgggttcatgctattctcctgcctcagcctcccgagtagctgggactacaggcgcccgccaccatgcccagctaattttttgtgtttttagtagagacggggtttcaccatgttagccaggatggtctcgatcttctgaccttgtgatccgcccgcctcggcctcccaaagtgctgggattacaggcgtgagccaccgtgcccggcctaaaccatattttttaagtgaaaatttgaatagaaaaaggaaaagcatattcatagtactgcgccacccaaacacagctgtcattttgatctatttctttgttcttttgtagtgtttttaaaaaacattttatcatattgcatatacagtttttaaatcttttttgtcccataaatgaaatcttataaacttttttttttacttatgtatgatagaaggggtcagtatgtgaacaaaggtattataccttcctcccatgatcaaaatacactgacagatttggaagatacaataaagtatatcaggtagaaaaaccctttctgtaaccctaccacctagtaatttgatgaaatttcttccgtcttctatctttacttttcttctctgcaaaataacttgcaagattatttttacctttgtattaagtcttcaatgttcacaaaggtatttgcatttcccttaattatttactgtttagaagaatttgggtagttagcacccttgattgagaagtcgacgcaaacctttgtggggaaagttagacttttttaggttgtttatgtttggggactattttaattaagtagtaccatgtgaggatcttggtgcaggaagtcttctgtgtttaggatcatttcctctcagctggttcctggagttttagaagggcatatccactctcttgcagaccatccttcctgctgctgcccaggatgtttattaccgggatgagattggcaatgtttctaccagccacctccttattttggatgactctgtagagatggaaatccggcctcgcttccctctctttggcgggtggaagacccattacatcgttggctacaacctcccaagctatgagtacctctataatttgggtcagtcttcaatagtaagggagaaactaaccttttctttaatttcgtgaatttttttctttcaattatcagtctttatagatggggtgtgttcatttgtcattctgaggaaggctggttttatcaggaacaactttttataagtgggtacgagttagtattgtaaaagtaatacatgcatttgatagtcaatccgaacagtatgtaaaagtcttcttcttacttgcagttctgtcatcagatggaaccgctgaaattcctttaaatagtttttgagttatttaaaaaatgaaaattcagagaataataaaaaacayttttatatgaacacccagaactaatgattgaaaacattttgtcatattttctttcaagtctttcttttttttgagacggaatctcactcttgccacccaggctggagtggaatggtgcgattttggctcactgcaacctccacctcctggttcaagcgattctcctgcctcagcctcctgagtagctgggattataggtgcccgccaccacgctcagctaattttttgtatttctagtagagatggggtttcaccatgttggccaggttggtcttgaactcctgacctcaggtgatccacaggcctcggcctcccaaagtgctaggattataggtgacagccaccatgcccggccaagtcttttttttaaacctttttactgaaaaataagatacagaaaaccatacaaaaaatgtatagctcagtgaattattatgaggaagaccttgtgccgctccccacmccctcctgtcaagaaatcaaaatttgctagctactcaaaaagtgttccatgtacctcttccttctcaaagtcattgccccgactttgagtaatcactttcttgaatatctttgtagttttatcacccaagtgtatatmtctacatactataccttagttttgcccttttcaatctattcaatttgccttatctattaatctgcagttaatacctacatctgtttttcttggcttgatcttcactcactgcaacctctgcctcctaggttcaagcgattctcttgcctcagcctcccgagtagctgagactacaggcacccgccatcatgcctggttattttttgtatttttagtagagatggggtttaactacgttggtcaggcaggttttgaactcctgacctcaagtgatctgctcgccttggcctcctaaagtgctgggattataggtgtaagccactgtgccaggcctgttttttcatttaaaacttttctgggaggctgaggtgggaggattgcttgcactcaggagtttgagaccagccggggcaacatggtgaaaacgggtctctacaaaaaaatttttaaaaatgaaaaattatctggctcacacctgtagtctcagctactcgggaggctgaggcaggagtaacacttgagtccaggaagttgccctttagcctgggtgacagagcaagaccctgtctctaaaaaataattaaagttgcttttctttgcatttatgttaaagcattattatttgttgttattcactctaatccatcttaattagccttaattcctaaaatgcctcttttatttctaaatttttttcctgatttctatcatttttctgaatttttcttttttttttttctgtctcactttgttgcccaggctggagtgcagtggagcgatctcagttcactgtaacctcccaggctggagtgcattggcgcgatctcagctcattgcaacctccgcctcctgggttcaagagattctcctgcctcagcttctggagtagctgggactacaggcatgcaccactacgcccagctaattttttatttttagtagagatggggtttcactatgttggccaggctggtctcgaactcctgacctcaggtgatccacccgcctcagcctcccaaagtgctgggattacaggagtgagccaccgcgcccggcctgaatttttctaattattgtttacattgttcttgcatgacttacatgattttattaatacctttagcttgttttggaatagcaggagcagtctcctggttcgtttttatgggcgtcttgctggcatgttttcattttcttacaggggtgttcttgttttcatcccatttttcttatataacttaatcttttttttttttttttttttgagatggagtcttgcactgtttcccaggctggagtacggtggcacaatctcagcttactgcaacctccacctcctgggttccagtgattttcttacctcagcttcccaagttgctgggattacaggcatgtgccaccacacctgactaatttttatagttttagtagagatggggtttcaccatgttggccaggctggtcttgaactcctgacctcaggtgatctgcctgcctctgcctcccaaagtactgggattacaggcatgagccactgtctgttgatcatttttaatgtgacctttccgaaggagggatggtttagagtggcttttgtaccttcccagatctctgctattttagtgcaaaaacatgtggcttgctttctgagctttcctctgtgyggtttttgagttccattgtccctatcatgttcatttttgattgtgttgagcagtttctcctcactgtagggcactgtcccagaaggggagttctgctctcagggactagactgctgcagactcgtagaccttctgcaggcccgtttcactcaccattaggcagggcacaactgctccgagtttcagccactcctcacactggcctgctgtgctctctagggaatcccggttgtgtgttttggggttctgctgttctcaagcccatcagttgccctgtttcttctctctgcgttctccttcacagacactgataacgtgaaggtcttgtggctgtcggtgttttgacccccatccctgtctctgtgttgtggggttcagtagagatactttgttgcctggttttgttgtaaacatggtccgtgggtttttggttttgctgtctacttgctctgtctttatgtgagcccctgtacttctttctctcctgcccatttgatccgttttccacatcattgcttatgcttgcttgatccttcaggtgaccagtatgcactgaagatgaggtttgtggaccatgtgtttgatgaacaagtgatagattctctgactgtgaagatcatcctgcctgaaggagccaagtgagtgtgactgttcctctcctttgcacccgatttctctggttgtacccttgtggtaccctaaggagagcctatgttctaggggcacagtctttgtgtcacttttctctagatttactttatcagggaacatctacttggcctctcttgagtcacatgtccactctgactgccagaatgagagaccccttgattttcttcctgtggagaatgttccatagtggaagagtagttcctcatgcaaatccaggctgtgctgtttaccaggagaagggacagtgggcctgggcagacaaaagcaggacatgtcccctgccccgtaagaagctcttattcatgtgaagagaaagaacattcagaacagctcgtgaggcatctgttcaagcctcccagggaytcactgggtaggatgtacaggagagctgtgtcaactttgtgactccaaggagtggggccagtactggtgagaacttgggagtggaggattcagagggacagttgttgccccagcagacaagggctttaaaacaaagggctttctggcactggctcccctgtctcaagagagtgggtgttctccatagctgagaagggagcagagtggaggagtgtgaatttagtgatcttgaaaggctccttagccttggaattctctgatcctaaatctggtttattgatgtagttggttggaggctatattttattcccatcttcttccaggaacattgaaattgatagtccctatgaaatcagccgtgccccagatgagctgcactacacctatctggayacatttggccgccctgtgattgttgcctacaagaaaaatctggtagaacagcacattcaggacattgtggtgagtggctccactgtttgccttccatggcgtcttccccagacagtgggctctgggggccaagaactcaccttctgtccctccttgggctggagtcatttgagctcatggcgtcttctggtcttggggtggggcagcaggtcgagtgggccagcctgggtgagtctaggctcccatgtccctacagccccgatgaagcctgtcctcttgcttctcccaggtccactacacgttcaacaaggtgctcatgctgcaggagcccctgctggtggtggcggccttctacatcctgttcttcaccgttatcatctatgttcggctggacttctccatcaccaaggtaccgtctctgccttcttcctgcttgtcatttgtgtccttggtaatatttcaccagcttgagcactgatcctcacagtgagcccagggcaggacgccatggccaaaagacccctgcctgtgctcatccttgccggaagggtactttgtttttgttgcttgtggtcactagcacaggaggttaagtccctgcttctgtcttgctttggctctggagacagagtaacttggatgctcagttgaggtaggaaaaacatgaaaagattggtgcttatttagctgttttgcttcttgttattcagtggaacttggaggtggaagtcccctcttagtcccctctccctccccacctcccccttggtgattccttgttgggagcagaaaccactgacctggccctgtcagcaccgttctccccactcccactctctgctccctgacaggctccgtggctccttggtcctccccaggctgcactgctgttatcctcaggtcatcctcttgctcttttcttccttccttcctccatttctcattctctcattgttccttagggctcttggctccatgccccagggtaggcactagtaccaggcacttattgtagtcaggtgggtgaggcctggtggaggagatgagcacagctggtgcttgaggactgtggaatgtgatgacaggcacagcgtgtgtttttttttttgagatggagtctcgctctgttgccatgctggagtgcagtggygcgatctccattcactgcaacctctgcctcccgggttcgagcgattctgcctcagcctcctgtgtagctgggaccacaggtgcgcaccaagggtgtgcttctagtggggcaacttgggaggccccaaggctaccctgaggaggtgacaggcaaagaaggtggggaagggcattcagttggaggggctgatgtttgtgagacagcagggaggggttttggtaggacctgtgagcaaagatgttgatccagccgaactgtgtgggtccacttatatgcagatttttttcttttcgttttcttttttttttttcctgagacggagtcttgctctgttgcccaggctggagtgcagtggtgcgctctcagcttgctgcaacctccgcctcctgggttcgagcaattctcctgccttggcctctcgaatagctgggactacaggtacgtgccaccacgcccggctaattttttgtatttttagtagagacggggtttcaccgtgttaggatggtctcaatctcctgacctcgtgatccacccgcctcggcctcccaaagtgctgggattacaggcatgagcctccgcgcccagccaaccaatccactttttccactatgctgtttccttgttcctggtcaagctgcctgccttagaaaaacctactgctctgccatgcctggtagagctcctgtctattttgtaggctggatgttgctcagttcatgaatcaccaataaaagctaattagatctttattttttttacagacagtgtcttgctctgtcacccaggctacagtgcagtagtgcaatcctagctcactgtaaccttaaactcctaggctctggtgatccccccaccccggcctcccaaagtaaggagattacaagcatgagataccacannnnnnnnnnnnnnnnnnnntcgaggatttccctcaccttcttgtagttggcccacagtgcgcaccaaggtgtcttctagtgggcacctgggagccccaaggctaccccgaggaggtgacaggcaaagaaggtggggaagggcattcagttggaggggctgatgtttgtgagacagcagggaggggttttggtaggacctgtgagcaaagatgttgatccagccgaactgtgtgggtccacttatatgcagatttttttcttttcgttttcttttttttttttcctgagacggagtcttgctctgttgcccaggctggagtgcagtggtgcgctctcagcttgctgcaacctccgcctcctgggttcgagcaattctcctgccttggcctctcgaatagctgggactacaggtacgtgccaccacgcccggctaattttttgtatttttagtagagacggggtttcaccgtgttaggatggtctcaatctcctgacctcgtgatccacccgcctcggcctcccaaagtgctgggattacaggcatgagacaccgtgcctggtcagatttttataatcaaatgcagataggaaatacagtactcaatacagtgtttgagggaactgaaaccaaatatgtggagggctgactttttgtatacttgggtttcacagggctgactacaggacttgagtatgtgcagatagtcggagatgcgggggggcgggggctcgaggaataactgtgtgtgtgtgtgtgtgcgtgtgtgtgtgtgtaattatttctgctgaatcattggaggttaagttgcagacgttgtgcccctttacccttgaatagttgagcatgtgtgtagcctgagagcaagggtattctcttacataatcataatacaatgatcaaattcaggaaatgtaatgttgccaaaaatctggtagaacagcacgttcagaactttgtggtgtgttctgccttctgtgccttcttcctcaaagaatgggtaatgtaattgtccattagttagttaatactattaactggccagttaattagtactgttgaccaacatccagtccataattttgctgactgtcccccgatcaatcacagctcactgcagcctcaaactcctgggctcaagccatcctcccacctcatcctcccaagtagtttgggactacaggagcataccatcatgcccagctaattaaaaaaatgttttttttctcgagacagagtctcactctgttacccaggctggagtgcagtggcacgatcagggctcactgcagcctcgacctcctgggctaaagagatcctaccatctcagctccctgagtagctgggactacaagcatgcaccaccatgcccggctaattttctgtatttttattagagatggggttttgccatgttggctaggctggtctcgaactcctggactcaagcaatctgcctgcctcggccttctacaatgttgggattacaggtgtgagccactgcacctggccaaaatatttttttgtagagacggagtctcattatgttacccaggctggtcttgaacgcctgacctcaagtgatcctcctgcctcagctgcccaaagtgtggggattataggtgtgacccaccattcctggtcctttctttgtgtttaataaccttgacatttgtggtgttgtagagaccagttttatagaatgtcccttaattttggtttatctaatgtttcctgctgattaaatgggcaagactgctgtaatatatatgcagggcacactgacattatcatccttgttcacatctatctgtctgccttactggactgtgaagtgaaatgtctgcttcatctttttttttttttttttgagatggagtttcgctctgtcrcccaggctggagtgcagtggtgcgatctcggctcactgcaacctccgcctcctgggttcaggtgattctcctgcctcagcctcctgagtagctgagattacaggtgcctgccaccatgcccggctaatttttttttctatttttagtagagatgggatgtcaccatattggtcaggctggtcttgaactcctgacctcgtgatctgcccaccttggcctcccaaagtgctgggattacaggcatgagccaccaggcccggctggtctgctcatctttatggccctagttttgcccattgctgaacctggtccagattaggtatcagtaggggtttgactttgactttccaagaaggtggcatttcatttttggatggctgctggtggcagatgttctttgggagataaggtcagagtggacccaagcctggatgttgtcacacatggtgcctctccttccttcaggatccagccgcagaagccaggatgaaggtagcctgcatcacagagcaggtcttgaccctggtcaacaagagaataggcctttaccgtcactttgacgagaccgtcaataggtacaagcaatcccgggacatctccaccctcaacagtggcaagaagagcctggagactgaacacaaggccttgaccagtgagattgcactgctgcagtccaggctgaagacagagggctctgatctgtgcgacagagtaagtgtcgggcgtcacagagttgcttggcttggggccctccatgcctcactgctttgtctagggcagacactgggcagctctcttgcttacctgcatgcttgtgggatragactgcatctggccataacttttcatgtggtgccagtccttgtggaggaaaaagggatttttggggtcctggtgtgagctgggtgtggaggaagctctgctagcctcgtcagcactgcgtgcccttgtggccagtattgagagtagctgcatcctctcctggaggccagactgttctaggtcccaggctgcttatgttgtggtaaaatgaacctagactttagaatcaataggtttgaatccaggctctgattcagagtttgtaaacctggccaagtcacctaacttctgtgcctcagtttcctcatctataaaatgggaatgctgttagcccctcataggggttctgagtgtgaaatgagttaatgcatgcaaaatattcagaaccctgycctgatacaagctatgtaaaggagttatctgtaaatgaggacagtaaccttttcgcagaggtgcccctcagagtcactgactcccctgtccactccctggcattccctctcctcactctgtgtgaatttcctcatagcacctaccactttttttgttgtttgtttttgagacagggtttcactctgtcgcccatgctggagtgtagtggcgcaatctctgctcactgcaagccccacctccaggctcaagcgatccttccacctcaagtagctgggatcacaggtgcacaccaccatgcctggctaattttttgtagagatggggtttcgccatgttgcccaggctggtcttgaactcctgagcccaagtgttctgcctgccttggcctccaaagtactggaattacagatgtgagccaccgtgtctggcccacgcctaccactttctgaaacgatttattcttctacttaagtgttaattatatgtcagcatctgtggacaagatcccttatctgtccttagtgctgttttctggaacctagaattgtgccgcgcgccatggctcactaaacatttgttgaatgttgaatgaatgtgactataccagtcctcaatgtgacgtacagtaggtgacaatgcctgtcacccccccttcccttgccattgatcttttgcctaattgaatccctggaactgatttgacaagctgcaaggagagaagtgatgttcatagaggagctgctatgtgccaggggcatgataggtgctgccaagtagtttcatactcagtcctcagagtcctagaatggagatgaggcccagggatggtgcagggcttgttcacaagggcgtaagaacggggcttgtgggtggtgaagttggcatttgaagccaggcctatcttcctccatagccagccctgctgccctgggacactgtgctgttggctgcatttgtggctgatacctgtggagctctggggtctgtaggcctgggagatggtggggcctgctgagtggggtgggaggacagctcacaagtcctgccctgctcttgcctcggccaggtgagygaaatgcagaagctggatgcacaggtcaaggagctggtgctgaagtcggcggtggaggctgagcgcctggtggctggcaagctcaagaaagacacgtacattgagaatgagaagctcatctcaggaaagcgccaggagctggtcaccaagatcgaccacatcctggatgccctgtagcccctgcccgcatcctccagggggccyagggtgcctgcactttgctgtggcaggcagattgggtggtagtgggaggttgtgcatggaggccagtgaaagctgacatctgtaaaaggccttcaaggaaragaaaccaggccctgcgtcaggcagtgtgagtttgccgtttgtccttaactttcttttttttttttttwwaaaaaagaaaactttaaaaaaactcccattaaaaacaaaacatctttgtgttttgaacaaaggaattttcaatatttgattggtattctgttctgaagtctargatatttttcagcctataaagccccctgttttatgcccttctaattytgatgtttgggtattgtgtgagtgcatgtgtttttttttttttttttaaagcgtgtgtgaacaaatggaaataaagcagggactgtgaacatttgtttttggtctgttgaagatctctcataatttaattcttaattttgggaatagtgcttttatcragtgctttttattcattaaataatggatttgcttctcagcaggtttgcaaggcaagcatttacattttacatattagaacactgaggtattctagtaccagagtgttgaaagtggtgccagagtgttgaaagagttgacgtggcttakgtcacagaatggagtagtggagtgaggcctccatttttgtagtttttgcatccttcctgtgagtcatgttttactcagcatcaaggaaacagtgatgagcaaagcagagatggttcctctcaagaggcaagggattgaaaggtcatgtggggaatcgacagtgccagtgagtgccaggctttctgcccctctttcctctctgcaggagttcgctccctgtctccacctaatgaattcctgctcagcctcaggatgtgttacttaaggttactgtgtcagggagccatccgtggcctgccacactcagtcaagtcctgtggtaccctctcgttttcctttgtacctcttctccacctcatataccacggttggaatgtgtgtgattactgaactagcttcaatagggcaggggttttgtcttttatgctcatctttatgttaacagctaggtgttcagaccaatctatgacacgtagttgggttattgaatgtttgcatgagtggcttacaaacagcttaaatattggcaggtgggttgagggattactggggaagtctgtagaagaccagttgtgaggaactgatgctgaattctgtttcagacatggcaaaatggaggtgctcgggacatccaagtgggagtgtccctgggcaggtggatattcaggcctggaattataaggtctggtgtgcaagtggtaaatgtggggctgccgggcctagacatggttatggaaaaggtgagaaggaggctgtgggaggggacagtgcctaggaagggtatagaataagaagagatccagaactgaatattaagacgacaaagtaatagtggccacctgggttgacaaagaccaggactctccttacctgggacgagaaagaccaggactgtggtgtcatgaagccaagtggaaaaatgtttccaggagtgaaccatctgaggctgaagagaccgagcagtgccttttggctgtaggagtggatcactgaagccttttacccattggtgacttgagaactgtgttggtgtggggatgggaattggacggaagtgagacttaactttgagtcctgacaaagcatttcgcaaacaggctgggaaagggatgagtgagggccttcaggaggctgtgctgcttgaatgttctactctaaggtgggggacaccaagtgtgttgaatgccattgggaaagatccagttgaaaatgagaagttgaacatagggattaggagattgtgcagggggaaaatgggggatccaaggacagtggaaggatgggaggagcaagaaggaagaccctccagagtcgtgctctgcagtcggatccctggatggaaatcccaggcctgccgctctctgtgacctcaggcaagtctttccgtgcaaaatggagtagggctgttacctgcttcctaggatggctgtgtgggtcacatgctgtcataatgcaaggtggcgtatagcaaatgcttgttaaacagcgacggtctcgccgagctctggcctgagccgggggcagagggttggtcctgtcctgggggttggaagccgtggaggccacgtttaatcagtgttcacagtggtgtgcccgtggacctggcctcacgcacgcccggccttgggagcccctgcgggagggtgcataccctgacctgcccgagaggcgtctgccgcagcccctgcttcccctagggaacccccgggcggctgtgcctcacggaggggccctgctttaccgcggctgcataccacctcgggccatttggtcagctgcttcaccagctctcttcatcctcttactctccctgaatctttttcttcgttttttggagcagtcagaaagcttggccgaaatcaagataactcgctgggcccgcgtgcagattggtgggcgccctctgctgggccggcgggcctctcgcaggcctgaggagcgagctgcgcctgcgccctggtgtcccttcgtaacactgcggcacgtcacgaggcgggcaccggggagtatgggcgaaatcgcaggcgcagacggcgggctcgggctagaaaagtcgcgcatgcgtggggctaatttaaaggcggcgcggctccaacagaaccaaagccaattctccggctgtggcgccacctacgggtgtgggctcgtaaacggcctcctctggccggactaggactgggtctggggtcggcgggctcaggaccactgggctgctgaggggcttagccatggggacctgggctctcagctgccctggaaagccacagggctagctgggctggccaaggccggtggctccccmagcatcctgtggtgggtgcatccctgggcccagtggggcatccggtgctgccctccccacctacgggcttacatcctttggttgctgggacagagcgccctacgccacgcgcagccctgcgcttccctgatcctcggtttccccagtagtaaacagggcctcagtttcccccttgtaaatctcagggaggaggtgaagtggggccctaggtgtaaagccaggttcaggctgggcatcccttggcgcaaggtgacatgccccagacacctgacacctctcagtctcagacccagcgtactttctctgtggccctcatgtggccgtataggagtggcccacccactcccactcccattcagatccccaggccacagtgccttttgtccagccttggccaagatgcctgaccctagtggcctggccctggctgcttccatggctgcagctttgggatgtccctgtagtcataggtggcctcatggcagtcccccagccttgaacctggaccctggctcagggaggggaaaacacggctgaagaagggctgggtgtcactttctctcttccatttgtcttggaggctgtcatgggagaaaaccccaaaggacccagtgcgccctcacagtttcaccacaagtatcctgaccgggcgtctggtgccgagctgatagtgcaggccccggccgcagccccgccggaagcccatgctgccagcggttgggggccgcaggctcagacaggaaatgcccccgagtgtaccccagggccctctgcaaaggcctgatgctttggatgaggcctggcgccattttgaagctgggcctgactctgggactctggcctggttctggggctggtggcctgggatctggggactgctttgtcacctgcctgggcaggtgtgggagatgacagggagggaagagagaaccttcaaactgggctagacctgaagcgaaagctgaatgatgcagcctgtcccctaccatggccaaccccttcatggtgcccccagcccagccctttagggtctcagcttccatcaggcccttagttccatatgtggtgtgacaggcccaggactaaatgcaggggacacagaagggagcagacagcagaagtgctgggcatcaggaaaggcaagtcagaaggtagggccatcaggagggtccatcgcagcatctgaaggatttgcttgtgggggttggtggggagggaggagcccagactccttttttgacttccactcaggggatagaatccagaaagatttaagacgagtgtctcagtctgttaaggctgctataacaaaataccatagactgggtagctataaatagaaatttgcttcttacagttctggaggctgggaagtccaagatcaaggcaccggcagatttggtgttgagaggtcctgctgcttggttcaaagatagcaccttctcgtgtcctcacatggtggcagagatgagggaactctcggatgtatcttataagggcactaatgtccattcatgaaggctctaccctcatggcctaatcacctcacaaaggtgccaccctctaatgcttcacattgggggttaggtttcaacataagaattctggggggatgcagacattcagtctgtagcagtgggaaggacaggagcctgttcaaatgctgatgggaaggaaggaggtaacagggacataaaggctgaagatccaggagagaaggggccagtgaatagatcccagtagagcaggattgggtgggattgagggcttaaggcagtgatctcatgggagagccctgagagactgtgccttcattagcactgaggagatcagcaaagacctgttcaagcttcgcctcctgggcagccttccctattctccaggtgggctgagatgtccctaccttacactactggacactgctttctgaagtggaatggactgtttgcctccctacactgggtgctctatttcagcagagtttaaacagaggcagcacatccattcattcaacaaatatcttcaactgagtgcagtggactttataaatgtcctcccaacactttgggaggctgagttgggaggatcatttgaacccaggaggttgaggctgcagtgagctatgatcacaccactgcactccagcctgggtgacagagagaaaccctgtcttgaaaacaaaaacaatttttgtattttttgtagagacggggttttgctgtgttgctcaggctggtctcaaactcctgggctcaagtgatccacctgccttggcctcctgaagtgctgagattataggcatgaagcaccatgcctggcctatttgccatttttaaataatggatgaggttggtcatttttccttgtgaatttgccttcttatgtgtggtttatgcattgttgaggtttttgcctttttcaaaggtgagtaggaaagctagtaacagaaaaatgggtgctcattgttatttctttttttttctttctttttttctttttgagacagagtcttgctcagccacccaggctgatcttgcccgggtgcagtggcgtgatctgggctcactgcaaccaccgtctcccaggttcaagggattctcccacctcagcctcccaagtagctgggattacaggcacccaccatcatgcctgactaatttttgtatttttagtagagacggggtttcaccatgttggccagcctggtcttgaactcctgacctcaggtgatccacccacctcggcctcccaaagtgctgggattacaggcatgagccactgcatccggcctcattatgatttctaaaagtcagcaactccgagggtagacaggagtgttcaggaaagggcgctgccctgggagggacagggactggaagaccagagggagggctgcatgcgtattgttacaaataaatgcaatctgaatggctaaaaacaaacaaacaaactatacaaacacacaccaaagaaaaatccactttgtagtgggcactgttttgggcaccagcaatatgatagtgataaatgctatgaaggaaataaaatgggtgatatgataaatggatgtagtctggagggtcaggagggcatcccttagaggagactcctgagctgagacccaggacagctgagagctgggcagggtggtgtagcagggtgtgggctgggtggccataaatccttcagcctcttttctcttggcctcttcctcaccccatccaggcctctggtggctgcaggacctcctgcctgcaagtcaggtctcatgcatacctgccctctagagcgctccagcttctcagcttccagcttcctctcccctaggcttgggtcctggtgcctgcaatggccccagcactcatgccccctagactttgcgtcaaggagctgtcatactcatgccaagctcctgatgggtgtctgacccactcaagcctccgggctttctgtttctcttctctgagcctcacattgctcacctggagaatgaggaccataacgatatcaggactggaaggagctcagaggtatgctgcctgggaaagcccctggcgcagcaccggctcaaggagcaggagtctcttcctttgacagat

SEQ ID NO: 95934 - DNA, 70991 bp, Homo sapiens
  misc_feature (1)...(70991): n = A,T,C or G
attagctctctatttttcctttccccagcccctggcaaccaccattgtactttttgtctttatgaatttaactacttcctcatagtggagccatactgtacttgtctttttgtgactggcttattttacctagcatgatggctcaatattcatctatattgtaacatgtcagaattttcttcttttttagggcttaataatattctattatatgtatataccatcttttaaaaatccattatctgtcaatggatgcttatattgcttctgcctctttactactgggaatactgctattctctaatctttattgtttcttttcttttgctagttttggatttagcttgttcttttgttgttgttgttgttgtttttcctggtccctgtaggtgtacagttaggttatgaatttgagatctttcttcttttttattatagctgttcatagctataaacttctctcttaacactgcttttgctgcatcccataagtttcggtacgttgttcttttgttgtcattcatttcaaagtattttctgatttcccttatgatttcttcttgacctgttaattgtttaagaatgtatggtttaatttccacatatttgtgatttttccttctgttattgatttcaagttttattccattgtgattggaaaagtattatgtattatttcaatttttaacatttattaagactcattttgtggcaccctggacttttgagatagcagattcatgggagcagcaagagtaaaagctacattgcactgggctgaagcctgggaagggaaaggggggcacttggcaagatgagaactgtgctaggaaagaaatgcaagtgatgacattaggagggggaggagggagaaagattgcacatatcctgtgggaatgatcagggaggatagatggaaatacaagaaaaggaaggtaatgggtggagcaaggcctttgagagatggaatggggcccaggttgctaacctgagacccagatagtaaagatgccttggctagaaggaaggtcatacctgcctttgagtcgcatacaaggagaatccagcagtgcttggcacatagtagaagcttagggtagcgcctgagagttgtttcccaatctatcttctcctctctttacataggaattgaatttttaactgggcacatatccatccagtgtaagactacatttctcagcctcctttgcagctagttctagctatttgattaagtgctggcccctgggatatgagtagaaatgatggtgcaacttcaatatcaaggttaaagggaagaagtatgtcctcttcttccccttttttccttctagttggtgcaaattcagcccttttgggaggagtttgagcagctatcttggaccacacgatagacaatgtgtgtggggagtggcagagccacatcatagaaggaccataggcccttactgattgtaaagccagcccacctcctggcatgcctgcttggactttctgtgagataaagtgacttctctcttgtttgatccactgttattttagatctctctgttactgcagctgaactaatcttttaactaatgtaacatttactgctgggtgctatggctaatgcctgtaatcccagcattttgggaggtcaaggcaggaggattgcttgagttcaggaattcaagaccagcttagccaacacagcaagacccctgtctttacaaaaaaatagaaaaaattagctgggtgtggtggcgcatgcccagctactcgggaggctgagatgggaggatcacttgaagccccccaaaaaactaacacaacgtttatgtatttatgtatgtatgtatgtatgtatgtatgtatgtatgtatgtatgtatttattatttttgagacagggtctcactctgtcgcccaggctggagtgcagtggcgcaatctcggctcactgcaacctctgccttctgggttcaagcaattcttctgcctcagcctcccgagtagctgggactacaggtgtgtgctgccatgcctggctaatttttgtatttttagtagagatggggtttcaccatgttggccaggctggtctcgaactcctgacctcaagtgatctgcccacctcggcctcccaaagtgttgggattacaggcgtgagccactgcacctggccaaataacaacatttaatcattacttgggttgctccagttgaggctggagaccatgactgtgcagtggttacagggcaccactgggtagttgcatcctgccacacacagtagccctcaggaggcagtgaagaaggcagagggaggcttgacctgggcttgtgggttcaaagttcaggtgtgatagaagtcaaggtaaggagggagcagaagggtcaggaaacaagtgattgagataatcaagcttgggctggagaaagagaggtcaaaggcctggaggtgaaagagcaaaggtcgtgggagtaagggaatgagagggtcgtgggagtgagggaatgagagctggcaggtctagggctgtcacagcacaattctggaatgtagtagtccacacaattacttacatatgtgtcactacattgatatggattttcagtacccacagatagaaatctaactcaaacatcttaagccccaaagtaaatgccatgttacactgcaagtaaggcgaggatgatgcagggatataaaggatttcatcgggaatctctttctgtcagctttcctttcctctgtcttggcttcattctcaggtagagtctccccatgaagtaacaaagaagaccagcctgcagatccattacctacattttctctcctgatatgtccagtaaattgccaggactgactgtcattgaactagctgctcacatttctgagccaattacagtgtctgagaggatgggatactgataggtcaggccagggccacgtgtttaccactgaaacaaacatggggtgtggggtcagttcgcccaaactacgcagactcaaagtgggagaacggtcatttcctgaaagaaaacgagagtggtggtgcgcagaagtgggatggacgctggtcaggaataaccctgtccactgcagcaggcctcacttgctgtttattggacttgtgtagcttggatactggcctgccacattgttttctgttgaaatgaaagaaattgtctgactttgcagccaggtccagcatctttacacactggatctgtgtcaggcatttgctcaatttgtgaccttggacaaaccctgtcccttcctggggcctcagttccgtcacatgtaaaatgagaatgctaggccagatcaatgacctttttttttttttttgagatgagtcttgctctgttgcccaggttggagtgcaatggcacgatctcggctcactgcaacctccacctcctgagttcaagcgattctcgtgcctcagcctcctgagtagctggggttacaggcgcctgccatcacgcccaggtaatttttgtatttttagtagagatggggttttgccatattggccgggctggtttcgaactcctgacctcaggtgatccacctgcctcggcctcccagagtgctgggattacaggcgtgtaccaccgcccctggcccatcagtgatgtttgaactgttatttagcacacacacacacacacacacacacacacacaaaggaacaactctggtggaagtgggggcatggagctggtatcctacactctcagcattccctgtccccacccgtactggccacaaaaggattccacaactgctgggaatgtggtttgaaaaccactagaccaagtaatccaggggatattcctctgtgctctaaaatcctgattctccctttctctttttggactagaaggaaatccttctttctgtgccaaaagatacaaagactagggctgaaataataagtgtaaaaaaagtctttttccttaattggacaatacacaaagaagtcagtcccatagaatgcctcactttgactactagttggtggaaaagtttccttctccatatagagaaaggaattgcttcttttctaagagtaatgaccaggaacaagtcaatgaggggctaagcaactttgtggggtgctgtctctagtgctgatgaaccacatgccctagtaacaacctcagccttccaaggcctggcctctgttcttttaggccctgaaaatgccaaaagattccattcactgatggaaatcattaccaagtcctataaaagccaacgtgtaaaatacatgcagcaaaactgatgaattcaagtgtatgtgtttgtgtgtggtctagaaccttaattgaattcatgagaagccttaattgtgagctgtgttgtaggctgtgtgccaggcacttaggttaaaatggtaaacaatcaaatgtggtctacaccctcaaaaggcctgcagtttactgggagagaaaaacattgacccagtaattatgcaaatcattagaaacctagattcaaaagaaaagaaaaaagtatatagaaacctagattcaaatgttagaatcaagatgtacaaggaggtgtgagaggccgggcgcggtggctcacgcttgtaatcccagcactttgggaggccgaggcgggcggatcacgaggtcaggagattgagaccattctggctaacacggtgaaaccccgtctctactaaaaatacaaaaaaattagccgggcgtgatggtgggcgcctgtagtcccagctactcgggaggctgaggcaggagaatggcgtgaacccgggaggcggagcttgcagtgagccgagattgcgccactgcactcccgcctgggccacaaagcaagactccgtctcaaaaaaaaaaaaaaaaaaaaaaaaaaaaaggcggtgtgagactgtggaactactgtaattggatttgatttcaggtctgtctcaattctaacataaactctcctgcactctgggcaagtccttcccttcctctggatgttagtatcctcttctgtaaaaatggtgtcataccatttgcttctgaggaaatctctcctatttgttggaattcagccaaggcaacatcaccttcatgatgccttccctggctctccaggctgttccgggggcttctgctctggtcttctcgccacctgggtgtacctgtctcagcacatctcacgttgcaagttttctaagcaagaagtaaacgcatcaagacttttatccctgtatccccagtgcattgtggtgtctggctcgtgtttgttgaacggatggatggatggatggcaagtacaattgtggtgcaggttgtgctaatatcattatgaaacctgaagggacaatttgctggctgattgtctcagctggagtcatgggacgtgatgagcattattatataggttttgaagcctgaagatttctagttctgattatttgtgatgctttcttgggcggatgggcctctttccgcttgtttgtagctgcatgcgtaattacactaccttacagggctgtggaattttgaaaactgcaaaatgttatttacagtcaactgaactcagcaggaaccttatctctcggtggaggatggaggatagaagcaggggaagacaattccacggaaacggtggtgggttgagctgggcctttccagggagatgcaaaggtatgggagtcagaaaacattggttagtaaccaatcccagtttaagctctgaacctcagttcttctgtttccaaaacggaaataataacttgagatttgcgtaagagtatgacgttcaaatgtgctaatggataggacggaaggattaggagtggtacccgggggccactgcctcgtgcaacgccccagccctagatcaaatccggggcgtggtcccactgtgctcccgaccccagcctcggcaggaagcgccggctacgggggaagccaacccggagacacagacggaagtgggtgaccggagctctagcagcagccgcgatgggcgcagccgtgagcctatggagagcggaggtgttyccgcttccaccaatggaaagccggtctaggcgggcctttgcaaattgccctagtaacggccgcatggtaactcaggcgccgggcgcactgtcctagctgctggttttccacgctggttttagctcccggcgtctgcaaaatgaagattgaggaggtgaagagcactacgaagacgcagcgcatcgcctcccacagccacgtgaaagggctggggctggacgagagcggcttggccaagcaggcggcctcagggcttgtgggccaggagaacgcgcgagaggtgtggccagtggaccagggagttgggggctgcaagcagggctgctgcggcgagagagctgctgaagtcggtggctcsgggcgggatgcgcgcgccaggggtctcccgccattatttcctcagggaagtgaaaatgggccaggggctcggggaggggcgccgccctggagctgggtgaggggccgccccaggatacctagtgacgayccactgggggcagttgacggtttgccaactcatggacaagtgctgatataaacccacacaaccccgtccccttaattcgtaccaggctctattcgcgacactgggatacagcgggaattaagataggagcttacattttagtgtagtgagagacgataaacgtgtacaccaataaataaaaataattatcttatcttggtggggttagttactgcagggctttgtcggccacggtcaggaaattggattttattgtgaatgcagtggcaggctatgggacggtttaaagtagggaattgactaaactttaaaagctcattttggttcccaggatccgggaactgagggagagaagtgggaattatggagaagagcaatctggtttatccacccctccaagcatcctttttgaccattccaattaaatctcctttttctaagtgctggtgatgccaagtactttcacatacatattwttttttggcaggtgaaaatattgagttggggagagggcacttcacgtatatgcttgacactcgttttagtaacggtaaacctggggtttgcacccacgtgtatttctgactcccaaatcagtgctctatgatgatacagccaccctctctgcctgctgttctctaaggtcacagccatgccccttggcctttggagagccttagcttctacaaaaatcttcacttaatataaagttaagctactgcctcttagcctgatttttctaaatggaaaggcctcaaagaaaagcctcaggtttccattttgagcatcatctttccaaaaaggaagtgtttgaccctggcttactaagcagctagtactgcaagtagctaacattggttgagtgctttccatgtgccaagcactgtgctaagtagctatatgtccactgccttgtcatatccaacgtattagttgtcccttccccgctttagtatgacagttttcagacacaaaaaaagttgaaagacttgtaaatacttgtgtgcctaaattctataattaacattttactgtgctgctttatcatatatcttttcatctgtccctctcccaatccacttttacatttcaaggtgaattgcaggcatcactacactttayccctacaccctttaacctgtgtgccattgactagtatraactctgttcaagtgaggaaattctggttcatagaggtcaaataagtaggtccaaggttactcatctggtaagtgcgagagccagtattttaactcaagtctatgtatttaaacccagagtgcatgctctatgcctaagtgcatgctctatgcctaagagtgatgctgtatgcctaagacccacctcagctaccaggttcttgtgtgactctggtcacatcagtaacctccctgaaaaatgagagttagactaggtgatcttttaaagacccttccaattctttttaaatgttagaattcaagcttatctcacctgagagtagttggagtggaaattgagggagaatggatggaagaggtcctggtctgtaaataaacgcacatctccaaggtttgtaaagtctcttctaccttgggtttcccaaagagcttcagtgctggggattatgatatgacagggttgtgtggaaagaccatagtagtttgttttttttttttttttttgagacgaagttttgctcttgttgcccaggctggagtgcaatgtatatatatatatatatatatatatatatatatatatatatatatatatatatatatatatatatatatatatatatatatatatatatatatatatatatatatatatatatatatacatatatatatataggtatatatatatatatatatatatatatatatatatatatatatatatatatatatatatatatatatatatatatatatatatatatatatatatatatatatatatatatatatatatatatatatatatatatatatatatatatatatatatatatatatatatatatatatatatatatatatatatatatatatatatatatatatatatatatatatatatatatatatatatatatatatatatatatatatatatatatatatatatatatatatatatatatatatatatatatatatatatatatatatatatatatatatatatatatatatatatatatatatatatatatatatatatatatatatatatatatatatatatatatatatatatatatatatatatatatatatatatatatatatatatatcctcaccctcctcccaccctctaccctcaagtaggccccagtgtctgttgttcctttctttatataaagcatatctaggactgcatttttattcattaatatatttatatacaaaatactttataatttcttacattttatactcctttggatctgtaacattattatcattgtgcaaaaaatattctcacattatataagctgtattttatggttacagagctccattttattgttaatgatttcttttgattcggcctgttaacctcttctgatatctgaccagcagtccactcgcacgcacactacttgctcaccatctgcattggcgcagccccnnnnnnnnnnnnnnnnnnnncgagactccatctgaaagagaaaagaaaagtagcatctgaagaatatcttctaggttctattaagggcagtgtgctttggtaactgaagtggaaatgggatggatatagcatacccacacacattgcttacatcattttttttttttttgagagggagtctcgctctgtcgcccaggctggagtgcagtggcgccatctcggttcactgcaagctccgcctcctgggttcacgccattcttctgcctcagcctcccgagtagcaggtggattacatggtcgggagattgagaccatcccggctaacatggtgaaaccccttctctactaaaaatacaagaaattagctaggcatggtggcaggcgcctgtagtccttacatattttttgaggggctgccataagtgtgggaccaaggtacttcacagtccatgaggaatagaggtagaagagataagatgtattcacaagactctggcacagtgtggtcactgcccagagagaagagcaccttttagatagtcacgtattcagttattaaatcagtgtagcaaaccttatattatgtaatcctgagatatagatgctcagctagtgtaactttctcagtgttccccccttatagtcaaatattctaaaatatatgaagttccatagcccatttatggaatatgtgtgtgtatatatacacacatgtgtactgcaaatggttaataaaattcagagatttataatgtatttaaaatatactaacagatgataaagtaatttaaccttgaggattcaaaacatattcaatggatctaatagtgccataggtttaacttcacattcagtatttacagtgttcactgatggccagctagtactctatgtcattgattcttaccccttaataggttactctgggaatttgatgaaagctatggatcctttctctggaaaaaatgtatatatgaacataaacacagttttgttcccaacttcaagaggtatttgggcccctggcgtctatccctgtaccctgggccaaaaatcagtgttcccacttgtactcatactgtgcattcttcacacagtagtagctagcaccatcttttaaaaacaaatcatagcatgacacatagtcttcaagaccttttcagtggctttgtattatttatgtagaataaaatccaaactttaccacacactgtaagttcctgttctgcgttctggccgctgtctacctcttcaacctcatcttcctggtctttttcgctatactttggtcactgcaacctttctgtcccttggatatgccaagcttgtttctgctttggattttctgaattcgctgttttstttgcctggaacgctgactcctgctcctcccagaggttcacatatcaaattaaatgtcatcagaaagacactccaggatcactttctagccactcgttctctctcatcatccctttttcttcatagtagtgatgaagattatgtgtgcaatgtttgtatgtttgtatccctccctaaaacatgagctccacaagtacaaggcttttctgccttgccttcgttaccctcggcacctagaacagtgactgcagtgcactggcactcagtgttagttggatgagtgtgtgacttgtgtaggccagggactgagatttttccccttgtgaaacattttaatattgatttattatttctttccattgtggtgtgtaggcatgtggcgtcatagtagaattaatcaaaagcaagaaaatggctggaagagctgtcttgttggcaggacctcctggaactggcaaggtactcattttctctcattttttaaatctacccaggagaatgatcctagtgtctaagccaaattgaattcatgtcttaactagtctttgtttagctaaatgggttatatgtatgtttttaaaattaatatgcaataatacaattgggtatctaaaatccctgcttctaaaattcaaattatcctggcctacctccagagaagaaagaatgaagtccttgaaggggtctcattgtctctagaatttgtcctttttctctttcaagtctcctttgctgtggaaatacatttctgttggcctagggcttcataaagatcttctgagtgacatcttacttgaggggacaaaaaaatgagtcaagcattcttccaaatgctagctttacgcatcgctattgtggctgtgtgggagatgaaaaaaaggaaaacaagaattagagacatgatttttatcttcaaggggcttacagtctctccagggcagaaagaaaggaaatcatgacagcacaggaggactcagtatgagtgctcagctttgaggtattgactaatattaaatgcagctggaatttaaggaggcagcactgtgggctggtacagctggaagggttgagacttgacattttcccttcagagctgggagaggatttggctttgcagggaarataagggcctttcaggcagaggacaccgtgtggcttcttgggattcgtgaggggactggccagatacttgaaactcaccagagttcccaatttgagcttgcttattcttcaaaagggccgcttgatgtgggcaagtaggagcttggggttgtgtgtgaaaagaaatgggctttaaattccagctctagtattgacttgctatgagacctgaggcaggtcccttaacttttctaagcaaaagcatactctacctatttcaagcaattattaaactgatcgattgtaagataatgacttgcattataattttgaaatgattactgattgtgtatcttatattggtatcttacaagaggaagaagtgctatatttgtgaacagttttttctcttcctatataaaagcaaattgtgaacagttttttaaactgtaaagtgccatacagatgtgagcttcagttacctctctccaggcaacattagcttgtccagtgcatttaccatttatttgcttgctattccttatatcttagaccttctctttccctccatttttcttcttcctaaagtaaataatttagaaatttcttctagaagtttgttggtgggaaagtctctcacgtttgcattcattatgttgcccttgttttgaaaaagagctatgttggctatataattcagttgacagatattttcttcagtactgtttcacagtacttctctctcaatgttatttgctcctttggcttctgttgtttttgagaagtctaattttgagggttttgagtcttctttctgcatgtttttgagatatttttgggtttggtgtttcactattatatgtcagagtggattaatttttgtttatcatgcttaatgctaattgtgcttcttgaatctgagtattatgtctctgctcaattctggaaaattgtcagccttaggagaatcgcttgaacctgggaggcagaggtatcagtgagccaagatcatgccattgcactctagcctgggtgacagagcaagactacgtctcaaaaaaaaaaaaaacaaaaaaactgtcagcgttaatctcttcagctattgcctttccccattctctttgttctttccttctggaactccactgagatgaggttaagattgcagtggttttcaacctggggcagttttgcccttgcaggggactttgacaacgtctggagacatttttggttctcacgacttggttgggggtgctactggcatctagtgggtggaggccagggatgctactaaacatcctgtagtgcacagagcagtttccataataaggaattatctggccacaaacgtcatggagtcaagctgagaaaccctgggctagagcttctcgttttgtcctctttgtcttttagcctctcatatttgttatctttttgactctgctaaattatgggtaatttcttttagatctttgttccagtctaattgtctcttaagctatgattaagtgactgattaatccaatctattgaatatttttttccttttcattttgaaaagtttggaacctacaaaaaacttgaaagaatagtgtgatgagcccctctataccctatacctagatagccagttataaatattttgtgacatttgctttttctctagtttatttctgaaccacttgacagtaagttgtaaggatgtcttcctacatgaccacggtgccatcatcagacccaccttgctaatgctattatattcccccaatttttgtcaattaaaaattaaattaattaatttttaaaaaatgagcagcagagccagggagagaatggtgtctcaggaaccaagaaaggagaacctttaaagaaaggagtaggtaaccatatccactgtggtagagaaatcacaaagatgagggagcctggcagctcatcatatgattccatgagcagttaacaaatgtgctttcaaagacaacgaagttaaattgttttaatgaaaagaaaatataggtgatagaaatcagaaaacatctttccaagttgtttcagtttttggctttttaaaaaacaccagaatatcaaaatgcaatcaaagattacacactgcataaattgttacaagttataatgtctttttttttttttttttgagatgaagtctcgctctcttgcccagggtggagtacagtggcgtgatcttggctcactgcaatctctgcctcccaggttcaaacgattctcctgcctcagcctcctgggtagctgggattacaggtgcctggctaatttttgtatttttagtggagatggggtttcatcatgttggtcaggctggtctcgaactcctgactttaggtgatccacctgccttggcttcccaaagtgctgggattacaggcgtgagccactgtgcctggcccccagatgtattttgttatggcccaccttttttactcatgtgtggcccttcaagagtcctcttttatgttttttttttaattgtaatgtttttgtttgtttgtttgttttttgagacagtttcagtctgtcgcccaggctggagtgcagtggtctgttacccaggctggagtgcagtgatctcggctcactgcagtctctacctcttgggttcaggtggtcctcccacctcagcctcctgagtagctgggactacaggtgcacaccaccacgctttggctaatttttgtagttttcgtagagatggggtatcgccattttgcccaggctggtcttgaactcctgggctcaagcaatccacctgcctcggcctcccaaagtgctgggattgcaggcttgagccaccgygcccagtcccggttttattcaggggtttctatcttaagtgctataccttgctgagctttcctgtatctacagtctctgaactttcaaggcaaatagtttactgctctgaatgttattatttattcaattctaggtgttttgtaagaggagaggttttcagtggacccagtgtgccatattgctagaagcatatgtctttcattttttttggtgatattgtattgctttcctcccaggaaatatgagaagtgctcagcactgtggtattaccttataagtttgtccactcccttccaatgtgtatgaaggaatttggtgacttctgcttaatggtttgctgcagggtcccaaagtttaggcaacttacctgggtgacaggcagaaatactgcttattttagagatgcaaatgcatggttcatatgcatttccactcttgaggacctcacactgttaataatgggtttgggttttagaagaaggagatattcagatgagattgaaaaatagagatttcttcaaccttcttttggcaacaacctcttttttgtgccacttgtcactcacatggggtgagtacaaaaaaaaatggctttggagattggggtttgcatcctggtgctgctgcttgcggttttaycttgggtgtgttggtaacttttgagtttgtttcttaatctataaaatacaaaytagatgatcaaggtcataggctagttggggagattcgatgaggtctatgcagcactctgtagtaggtgtaggaatagtagccatatcatatactttccctctggaagtctttaaatggaggaaacgagacacacatgaagctttttttttttaaccaagtatttatcatattttaatggaagtatgttcatctcttctgtattagttaaagggagggagagtgccattgaattggatgtggtcactgtctttgaagttcaaaactgagggtagggaattggggctggcagagatacaaggaagagaaagaggagtaactgggaaggggtggtcctgtccagcctgtggccccacggggagtctgctgttagagtgctgctcctctcattgtgccctttcatgttccagagatttttttcctttgctcttagaagaataccagttttcaaggtgtcagccttgagctcacaagtgcagatgcctaatgaggcaggcaacggggatgagggaagtggctgggtgcactgtggcgtgtctgccttgagccccaggtgctcggccttgctgaaggtcaccatgagactgcaggccaaacagaaccaggctgtgagcaacgagtttgccacttgtgatctagcatggcactttagtactttcatttgacagatgaggaaatcgggcacctgagatttgctgagtgcccaaggtcacactgaaaattagtggcagaaccagcactaatctttctgttcctggctagtgcattttatactstgctatacactgattctctaccagattttactacctcaaaactatcaccaaaagggcatagaaaagaaaatctgagaggaaccttgactgttaattttaagacaccgtctcagtttcactttgttcttcagtaacaagcttgttttcagtcttagcccatatacctggggagctggccttactcgtgctcctgtttcagagttgaggaaagatgaaaatggcatttagaggccatggcattgcccagttctgtaccaactttaaagcatttgcttgccatacttgacatttgaccgtacacctgtgaagtctggttctgtttagcatttgccagctgtaattatcttgtcaaaaatcaatttgtagtttaccacagggcgtgtttaagtgtaacttgttaagaccaactcatagcttcaaaatcctacttgaggtatccttcttcactctttgtgggctacataacataaaatgaacaatccattcattcattccttcattatttctgatgggttgtagattggtgttttcctgtatttgtaaaaagagaaagcaggtatctcaaagatccagtggtgtattcggagcaattaggtcagagccatatattgatattgagagaacaattttggatgactgtaaagttggcccttcctatctgtgggttccacgtatgtggattctgccaaccacaaatcaaaaatactcaggaaaaaaacaataaaaaataaaaatacaataacaaaaataatacatacttaaaaatacaatataataactatttacatagcatttatattaggtattgtatgtaatctagagatgatttaaagtaacaggaggatgtgcataggttatatgcaaataccctgccattttataccaggacttgaacatccatggattttggtatccctgtggatactgaagagtagactcttctaattatgataacatgatctttggagtcctgctgccagagattaaatctgcgctgccattttctagattatggtacttacgttgcattacttaatgtctctcagtttctcatgtgtaaaatggggagaatactagtgtctatttcataggctggttgtgaggatcatgtgaggcatttggagttgggcctgcactgggtaagtctgagtgaatgataacttgtaattatagggaagataagagatgccatttatgatttaaattgactgtccacaaaagtcatcaaacatttattgtgtgaaacatgctaaatggtaggactagatgttcagctgttcctagttcctggtggttctgtagcatgtgtttctgaactgtcatgttttcaggactgtgaactgtgtttccgttgctttcttttgtagacagctctggctctggctattgctcaggagctgggtagtaaggtccccttctgcccaatggtggggagtgaagtttactcaactgagatcaagaagacagaggtgctgatggagaacttccgcagggccattggtaagtagtgtcacatttgtgggaggagttggtctcacttcctgaagcctgtgcaccgaagcctctttgtggtgaagatgcctttatgactggtattcgtggcactgctgtttttcttttggcacttagtagtgcattatttttcaaataaaacaaaaccccagtttttctcattgaagtgcgttagcaattggagcaactatggaccctagctgtgagcctgcgcttcttcatgcaataaatagatgtgtctaaaagtgtttttttaatgagtcatattttcctggaagtcttattttgccattagagatgactatccactgaaaaggttttggactcaagccagaatctttgtgtgccatgtggccagaatgcccctggtcctggatggcgagccagaagagttgtggcctgtcatagagtgaggagactgaggagtggggactggcagagcttagaggcttatggcgcctaacccttagggcctcaggctatcatagtgagtgcctgtgatgagccaggccttccctcctctgaggggagattatcaatctacatttcgcatttgaagaagcagtctcagaaggttaaataacttgctagggacccagttagtaagtggcagaagtagtttgatccgacatctttctcatttctagagccgttgctgtgaagattggctgtgagaagaamatggcttctctttcgaatttttgctttttgctagctaggacttctggggcagttttttggccccatttctgctggcacagcactgggcaagtcctagtttccctcagatctgcttatagaaatagcttatttcttttaactgttacataaaagtccagttattaagccatttctgttttttgaacatttagawttattctcagcttttactcttaaaaacaaggctactaggaatatccttttatgtgtctttgtgcacatgtgcgagtatgtttctaggatttgcctgctgagtcgtgggttatgaacactagtcagagtgcctgtaccagtttccaggctctttcattgtcaaaccaaagtaagtattcttaagaaggaaatttaccagaaaacttcaaggaaatgatgaaacttaaaagactgatgaaaaagttcagtttcggagtaagatcaggtagggccatggttaaagcttttgattttacattgaacaaaaggagaagcagttagaaagtgctggtatccctgggctctggttttgcttttaccagacccctccggctgggttgggagtggatagtaaggagggtgagggcagagaggagtctgagcaggacaaaatagtggcttggaccagggtggtggcagtggaagtgcaaagtggttggattctgggtgtgtttgcatggtagcgctgacaggatttcctaaagggttagatgtggggctgaaagaaagagaggagtcgaggaaaattcccaggtttggccatttttggagatggggaagaatgggagggagcaggttgggtgtttactcagcgtctcctggggatacagtggtcagtgcttatctttgtagacacagttcctggcacatagtgggtgctcaggaaagttcttctgagtgagtgagagaagtgggtagactttgaagcagttagaaaacagaagccttttttttttttttttgagagagagtctctgtcgccaggctggagtgcagtggcgtgatctcagctcactgcaacctcagcctcctgggttcaagcgattctcgtgcctcagcctcctgaatagctggaattacaggcatgcatcaccacacccagctaatttttgtatttttagtagagatggggtttcaccatgttggccaggatggtcttgatttcctgacctcatgattcacctgcctcggcctcccagagtgctggggttacaggcatgagccaccgtgcctggctcatgcctgtaatcccagaagtctttagctaaaaaatatgaaaacagaagtctttagctaaaaaatatgtctgggctatagacatatgttgtttggtttatgaagtattttttataaatttggagctagttgtcaatatttagcaatagggaagtgtcataaagtgctcatttctgcctccttgaagcagctttccttcccacagcaggcggagctgagcgggtacttctgaccaggtccccataagcattgaagtttgtgactgtttttctaaaccagagagattatgaactgtgtccagaggctaaattttgtgttacttggaatatatttatttttattttataattttaacacttcctcagtgccacgatttgaatatttttaaaactgcaaagtatttctgactggaaatatattatttttaccatgaaatattggattttttggtgcttattttaattattttattttgttttagtgccatggtctcactctgttgcccaggctggcctttaactcctgggctcaagtgattcttccacctcagcctcccaagtagctggggctataggtgcacaccatcatgcctgggtttggtgcctattttatttaagttatctatttttaaaacatttttctctttttaaattttttttagagacagggtcttactctgttgtccaggctaaagtgcagtggtgtaacaatagctcgctgcaggctcaactccttgggctcaagagatcctcctgccccagcctcccaagtagctaggactgcaggtgtgcatcaccacacccagctaattttttaaaaactgtatgtaggccgagtgcggtggctcatgcctgtaatcccagcactttgggaggccgaggccggtggatcacctgaggtcaggagttcgagaccaggctggccaacatggtgaaaccccgtctctactaaaaatacaaaaaattagcggggcatggtggcatacgcctgtaatcccagctacttgggaggctgaggcaggagaattgcttgaacccgggaggtggaggttacagtgagtggcgattatgccattgcacttcagcctgggtaacagagagactctgtctcaaaaaaaaaaaaaaaaaaaaaaaaaaaaaatttacagagaggccaggcctggtggctcatggtggtgcctgtaatctcagcactttaggaggcaaaggcaggcagattgtttgagcccaggagttcgagaccagcctggggaacatggtgaaactgtgtctctacaaaaaatacaaaaattagctgggtgtggtgacgtgtgcctgtagtcccagctactcggaagsctggggtgggaggatcacctgagtaagtcgaggctgcagtgagctgaaatcacaccactgcacttcaacacaggcaacagtgagaccctgtctcaaaaacaaaatcgggaggctgagacatgagaatcgcttgagcccaggagttggtggttgtagtgaggtgacattgcgccactgcattccagcttgggctacagagtgagacaccatctcaaaaaaaaaattgtttttgtagagatggggtctcactatgttgcccaggtggtctcgaactcctggcctcaagtaatccttttgccttggccccacagagtgctgagattataggagtgagccactacacccatcccagtgccagttttaaacagaggtattacaaacttatagagaaggatgtaaaacattaattaattatgaagtaaaggcttataccgtcaccaccgaaggaacagagcacggccagcacctcagacatgtgtccctccctggtcacaaccccttcctctcctaggtgggacccacaatgtgccataattgtgtgggaatggtttatgtgatcatcataaccttgtacaccccatgtgtgtatctttaaaccatggggcttaattttgccctttttaaagtttatctaaatcatactttatgtgttccttgtgtcttgcttctttagctcagcgtctatatctgtaaggttcagcccatgtgattacatgcagtgtactttgtggatttttacgttgtatttggaatagcagtggaaatgactcgcaggactcctttaaggtttaaaatcttctgagtattttttttttaaacatgtgcccatggttttatttaactcataataaagatgagatgaacagtaagatgttacaactagttcaaatgtctgagtactttttttttttttaattgagacaaggtgtcacactgtcgcccatgctggagtacgtggcatgatcttggctcactgcaatctgtttcctgggctgaaatgatctacctaccttggcctgccaaagtcctgggattacaggcgtgaaccaccgtgtctggtccctgagtattttttttaaatgttctatttacttaaaaaatgtttttctgatattgataaaatctgtgaaaactggctttcacatggatgtatgtgtttgcattgcttaaaggtaacttgaatgctttaaaattcagaaaaatagagataagttccttggcatctgttttgtaatttgccatttttgaggggaggggacagtagtaccattcttttgatggcagcgaggtgaaaagaaaatttcttgatcctaccagagaataaaaaggcaggccattgactatcttcaaaaaggaaccctgcccatcttcctctgcctttgaattctgtgaagttgggagagggggtggggaggaagcaataagccgaccagaaataaaaagcagggagtctgtgctatttccttgatgtgatgaaggtccctgtcagggatatagaaacctgagccagcagatgaaacctgtgtcatttgtgttgtcgttgccagagatagcgccagctcagcccctttcctggctaacagccggtttcattgtccgtcacccacgtcccctgccagcttgtcagcacagagcaacttctaaacaaatgtgggggctagtgagagacgggaatgtctttcttcccctccttgaggaatttcatgccacattcatctagcagtaaatataagtaagcattccatttgaaggaatttatcgctgtgggatataaaaggtttgattttaaaaaatcaaagttcactttaaaagtacaggattttcccagtttaccacaatgttctgatatattcgtgttgtttggagaatttttgtcyaagattaatgttcaggaactaagaatttggtaaagcacaaatgaaatgggtcctctcttttggggctattccaaaacttccatttataggctatcagatagaatgaaggtagagtaaaacttttccttaactttaatatctgagagtctttgtcctgactgggtttctggggtagagaaggcaaacagcccaatgataagataatgaccacatttaaaagtgagaagttacagagcgtacctgacactataggtagtgtttcttagtgccattggaatatttccatatcagaacggaggtagcttaatggtgagaacaccaaatccttatcaagccaccctgccatcagaactagtttatgtctccacatttgtgagttgaatagtttttcatttattctttagataactggatctcaactgtgtctgcactttggaatcatggggggaatattaaactaatagtgatggcaggggcccatcccctaggatttggaagcaagtagtctgggtacagccagggcgtgattcattataggggcccctcaggtggacctaaaggttgagaaccatgaccataggctccagcggagatttagagcagtatttcgtaaacttaggccatcagtggtcttacttcaccgggtcccactggtattatttacttaaaatttttttttaaagtagacttggtaattttatgcatatgtacagaaaagtgtgcagaacataaatgcatagcttggtggattattgtaaagtaaaaacccgtgaaaccagcagctaatcaaaaaagggaatgttgccagaactccaaggtacccttgatgtccactcccagttgccatccttccttccccaagttaatggtagtcttgatttctaacagtacagttcagttatgcctggcttttagtgctgaggttgagggtgtttcggtgatacaggctataacattacatggctgactccttagagttctcaggccattaccatatagaacatgtaaatgtatctgcaggttcgtttcttgggtattattagtagatgatgtgcctaatgacaaccccttcactcttagtgacttcattcattcatccattcactctacctgcctatgtgctgtgccctcagctcaggtgtgggcaatctgcagaggggtaggcaaggtctgcaagttatggcattgccgtgggctgctgctgtgccagtggaaacacaggtcaccatggggacaatttggaggatgaggaagaagaatgtgtgaagggggrggggatacgttttaaactgagtctgctaggaggagttgcctaagctaaaaagagtggttcaggaagcagaaccgttatatgcaaaagcatgtaatgaacatagagatcacgttctaaaagttaatttaacaatgattcttggataatgaacaaacgtttattaaagagctaatgtggatgatgtttagaattcagagagaaatttacctttatttgcaatattctaaygtaaggtgctttggaaattggttttgttgttatggccttagaaaaactgtagagcagctgggaatggtagctcacacctgtaatcccagcactttgggaggccaaggtgggtggatcacctgaggtcaggagttcaagaccagtctggccaacatggtgaaacctatctctactaaaagtacaaaaaaaccccaaaaattagccagatgtggtggtgcacgcctgtaatcccagctacttgggaggctgaggcaggagaatcacttgaacctgggaggcggagcttgctgtgagccaagttcgcaccattgcattccagcctgggtgacagaatgagattctatctcaaaaaaaaaaaaaaaaaaaaagaaaaagggaaagaaagaaagaaagaaaattgtagagcaacacattgcaaataatgcatgacaactgggtatttcttcttggagtatgcagtgagagccagaggcccataacacctggcagttttgagtgtcacccactgttgacatagatacctaattattttagtatgttctgctcaggtttcatagtgtcagagggtgtgtaatgagttattccactggttttaagatttcctttgagagtcagaaattcaggaaacaaggctacaggagttttgatagccactgttctggtggaatagaatagtgtgggttcagagactggattaaaggctaaaggtaaatttcacccccttggaaatgaagcagacaattttaagaattataacttgtctatctagttctggatttgaacctagaaagttcccttaaaaagttgcatttctaggccgggtgtggtggctcacacctataacccagcactttgggaggccgaggagggtagatcatgaggtcaggagatcaagaccatcctggctaacatggtgaaaccctgtccctaccaaaaatacaaaaaaattagccgggcgtggtggcgggcgcctgtagtcccagctactcgggaggctggaggctgaggcaggagaatggagtgaaccsgggaggcagaggttgcagtgagtcgagatcgygccactgcactccagcctgggcaacagagcgagactctatctcaaaaaaaaaaaaaaaaaaagttgcatttctaatagtgcctctaatttacattgatatgtttgtattgcctttttacccatcatgacaccctggaatgtacattattaaggttgatttggcagttctggtgacatggaagttttgggctctcagtgtgagagaaaagattctgcttctcaccatggcccctctgccacctcttccagggctgcgaataaaggagaccaaggaagtttatgaaggtgaagtcacagagctaactccgtgtgagacagagaatcccatgggaggatatggcaaaaccattagccatgtgatcataggactcaaaacagccaaaggaaccaaacagttgaaagtgagtacatgtatgtggcctcttttcccttgactctcccagcactgtgtggctttgggcaggtggtgtaacctctctgcatcccagtttcctgacctgtgcactgcaggtattgatttctcacagaattggttgaggatattgtgtgtataaagcggtacctagcatagggcttgcacataggaggactcaaggaagatagctcttttcttacttactcctaggaaactctgcatgttaaaatgtgagctgtgtggttaagtcaagaaactgcctctgccatcccatgtcccatattatgaccatgcatcaaataccctgggctgggtctgaacctgggcattaatttttccagttatcagtgcccatgctcatagaaagaaacagcattgagtaatcaaataagagttgtataaagatgatggatgggcttcccaggggccacatgcagaatcctgactgcagttgcttgtgtcaggaacctgtggtcgcttcagtggctggttctgtttagtacagggctttgtggagaggccagaatggtgacactggatagcgctcaaagacagtcctcagccacctgtcctgtaagtctttaggatggaggcagtagagtttctaggggaagagcatgagttttggagtctaagtccttaaggaatccctggctttgttacttacaactgtgtggcattaatctctgagtagtagtttctttatttgttgaatgggaataataattgcctgtctttcagggttatggctttgggtgtggcacctagttacctaatgaatgatagctgttaatgttatcgtgagagccttcacttggagaaatggagcagtctggattttaggctttgccttattattattaataaatattatcattatagctctcatttattgtatgtgtcaggccttggactaagtgcttcaacaaacatttattgtcattcataactttatatgtgtatatgtttgcgtgtgtgtatgtgtgtatagttttcctcatgttaacagatgaaggctcataaagaggttacatggttatcctgggatcatccagccagtcatgtggcagagctgaccctctgagtcctaaccgttgtactgtctgcccaccagcttgctgtgtgacctttggaagtcagttgagctctctgggactcagttttctcatctataaactgcaggagattgaccatataatttctccatttttattctgttctacgattttatggttctttgattctctgaggttgtttcttggtcactgctttatggagatcgtaaaaatgtcacttcttcaaagggccatttttctttttcctaacagggtttccatctcaggaacttgcctctgcaaatatctcttttatacctacccctcgtcacttccattctgaattaattagatttctcagtagcatctgccacctttccagtaattacatcttcagtcaattcatttgggaaattaaccgatataaaaatgcttgaggcaaaaaagaagtatattctccaatgtaggacagataaaataaggcgtacagtttaaatttcagctatttgtaacactgctttgtacagtttctttacaaaaataatgtagaggagaagatgaaatttttcttccaaaatgaatacttttaggtatttttagaatatgtacaagatatttggatagaaggtgctcaaatacttggtggatattcaagtctgaaggagtcttctgagttctagcaacgagaatgccattagtactcatgaccccttcctgccaggccttacctgggggcctcacccacttttgtccttaggcgcacagactcacagcagttctgccagggtctgccgtccccacccagctaaggagaggcagaaccctgggtttgctgctgtggtggtagttttttaaaagctttattcagatagcattttaaataaaactcacccattttaagtatacaattccaggaattttaatttattttcacagttgtacaatcaccacaatcttaatttcagaacattttcatcgccccaaaaagaatcctcctactcatttacagtcattccccattccaactatagccctcggcaactactaatctactttcggttgccttcttttggacatttcatataaatggaacatacagtgtatgtctttttttgtatctgrcttctttcaccaagtcctgggttttcactttttaattttgtttgggcaaagcccaagttttttttccaccatagctacattgtataacatagatctccatgaagacctcgagaaacttgtgtttaactatagaatccttacaaaggcagctgtcctagaatattaatcactgagggtcaccagaatctggagaaaagcaacagttccgcaaatctgcttatttcctttcctggagatataagcaggcagacccaagggcacaaacactgggatgtgagtcaaaaggcttgggaaagattctcatttatgtttttctttgaattactgtatacatctgtgattgcacctgggtgctgttgtatagatgaggaaacttagaactgagaaccttatccaaaatcaaaggccctgcaagatgccagctttgagattggtaagcaggtgctggcaggtacttcagttgtggaaagttccaccccacctgaggtgaggcaaatgaaggagtgaagtagggatgatgatttcaagaggggtgatagggcctgtggtcctgtggacagtgggggctgggcccacccrtctcacggcagccaggaccatccttataaaagygctgctgccagtttacagcctttggaatcaagggaaagaggagagtacgtgtcccctgtgtccctctcatgctcgttacatagggatgcaggtatgctggcccccctattttctccctggtgtgcttagtcccccagccagtctgttgtgtggtacttatgcattcacactcctgcaggtcccagtattcatgcaaacgcaaaacaggctttctccatgcacctgctagctacctcagatcccttacggaaaggtaccttacatggtgtcagaaggaaatggaatatgtattacacttctgatttacatttttttttttagctggaccccagcatttttgaaagtttgcagaaagagcgagtagaagctggagatgtgatttacattgaagccaacagtggggccgtgaaggtaatgccttccttgggacacagcattgtccctgatttgtttgccatgagaagacctaagtgacaagggagttgctttcttcagagggtgtggggtgtgtggggaggggctggtgtctgttatgaggctgatggaaggtcaactagtggccctttatgtataataaagtttgccttccctttatcttcattctttaaccttctcgcgattaaaacagatagtctgttagaaaaaatactaaaacctkttcagagggggaggacagggtgagaaaccaaaacaactttagtcactttcaaattgaaatgtgcagtgtatttaatcttccttttatctctttggtattttcttcccaagatatatgcatgtgggaaggaacgctgcattcgttggcattcttttctatctgattttcagggtcctgtacagtgttcctcactgtttaatggatgggcataatacttcatatcatacaataaatcatccacctacaaaagagtctgagcagctcctctgcctccagttaatctactggatttggcctttatcaggaattgcatacagttaaaagaaagaagggaaaaaggattttgggagaaagtatcaggtgtttttcaacccagtttttggagcccagcgatgagcagatagctcccttctcttggcagcaggggagtggggcatatttggagtttgtcaagtaggctgtcaggcctgcagtgggaactgagacctttatctcacttagccctgtgccatttggggacttggcagtgaaaacttaccaggcactcatgtttctctctttttgcagaggcagggcaggtgtgatacctatgccacagaattcgaccttgaagctgaagagtatgtccccttgccaaaaggggatgtgcacaaaaagaaagaaatcatccaagatgtgaccttgcatgacttggatgtggctaatgcgcggccccaggtactgcctcgatgcctgggtgatctggcacattagcccttttgtatgtgtgtggagatctgggaatgaattgtcagagtcttgctgcctttcttgaggtagacggtccttttctatctgtaatgttcagcaattaacatcgacatgagctacgagggactcctttgttcccattcaaatgctctagtcacagatgatttcatgtgtattgtttcttatcccagccaagcctctggccctgagctagccagcttcctccatggcttcactccagcagtgggctcacrcctgggattttctgggtgttaatggcaggagggcaggagtgttctatgagccctttacaggatttcagaaagcctaacaaagctctttstttccccctgcttagcaaaagccacagtgttttagctttgagctggtactgttgtctgcttctcatacagatggatacttatgccttggctagtaaagtgcaggaaaggatgttatcactatatgacatttctaggaaatagtgaatagtcactattagggaatagtttgttttctgacttgaaatttgatcygtgggtgttttgttccttggagctttggtcaagagattactgaagactcatcttggaccaacaggtccccttggttggtgaaatggccatccccaaactgacctcctgggagcccttgacctgagaagagtgctgggctgggagtcagaagtcaggaactgtgttgctccatcactgaccagcttggttaatttgtcactttgggtctctgggttttctgtggtttggggttcggttttgagttccctcctacttggcaaggcagttttgaggaccagacaggaaacatttgctgcctttagctattcagcatttagtgagcccttctgtgtctcagggcctggtaaccaacaggtgatcactaaatgctgaataaatgaccaaacaccagcctcttcctcttgctgactgcactgttaggagcccgcaggaggatgcaggtgagtggtgaacctgttatggagtcagccatgatcagctccaagttaagtaaggactaggctgatgcaagcctgtggtcaaatctagtgagaggaggcacagcaatataatcatggtatatttatacttgctctttatacttactcttatagtccatgtgtccccaaaggcacaggaacatttggaggaagtcctgagtccggttagggtcagatgcgccctagagggcatttgacgtgaactttaatgactgggaacttctaggaaggagaatggcattcctggcagatggaatagactcaaaagcattgagtcataaaaaagcttgkgggtgtccagggcagggctggtagtcttgtgtggctaatcaaggaacaaggggttggaaaaagatagggctggaaaaggaggctgggcaggccccacggagcttatacttgccatgaaaggattttgtttgattcttacaggtyaggggaacytctaaaaattcctctgtgtttagaagctcctcaggctttgaggaggggtctccatacctcaggatcccatgttgagttgatgagtgggatgcagggggatgaggcttctgtagtcaccttagaaagcagcactgaytctaagtcttctcttatgcaggggggacaagatatcctgtccatgatgggccagctaatgaagccaaagaagacagaaatcacaggtaggagaaccagtgtgccctgtgagcaaggggcagggcggagggccccacattctgagatgctcttgcggctctgtgagcacagtcgccctgaggaaatgcctcagaacagttctttcttcctcatagcttagagcttgactctagcctaagtttctggcggcatttaggcagccatatagcacactgtgtgctatctgccccactgcagtcacartttctggcccctatgaggccccagaaatakggatttgtgtcgcccagctctgctggagcacaggctctggagccttggggctgtcagccccctccctagtagagcacagggcagctccacagaccagctccacatactgccctgcccagtttgtgggcacttcccagagctccacaggggacactgctgctgctcccctgtgaacctttatttaacctgctgctcttcccagctttcctgttgctgttttttttctaattccacctacagtttcgtcaccttaagatgttagttaaacattaaagcaaatattgtctttaaagtttaagccagggcagcaatctgagacctttctgttcgagttgtcagaagcagtttctttcttttcacacggttttcggtgtgcatcctctttggacaatccccgcctcttgcctttggtggaagacgctgcctcagatcttccagttttctatttgtgagctrctccctcctgatgataacacaggagctggtttggaaaatgagcactgagaccttagctgggttatgtaacttttgagagactcatccctctaggagctctgagattgggcctttcttcagagcctttcattcctcaaaggtttctgctcaggattctaaaagcacccacttccttagtccaggcacttgattgaaagttaattaacctaagcattgttgtatgggaccaaaagaaagggtcatttactgagtatagaacaggtaaatttgcatgtgaaaactcatttcacccagggctcccaaactccaatgtctcccagatcagacagagctagattgggtatgtgggaagtgataaggcatggtagggagtgtgacagcagtgagcgtgtgctgtgaagggattcccatgcagaacacctgtgcaacctttttacatttaaccaaacycatcttttgggggaggctgccaattttgtgaccttttaggtgtgattatcactgtgttcagatgacgacactgaaacctggagtggggacacaccctgtctgggatcacatagctagtaggaaaactaggctcctagcrtgggtttggattgaattcaggtggaggagaaaaggcgatagtctcccccagccctgtgctgaccttgcctgcccatccttgcatctcctagacaaacttcgaggggagattaataaggtggtgaacaagtacatcgaccagggcattgctgagctggtcccgggtgtgctgtttgttgatgaggtccacatgctggacattgagtgcttcacctacctgcaccgcgccctggagtcttctatcgctcccatcgtcatytttgcatccaaccgaggcaactgtgtcatcaggtaggatggctgcctgccagccacaaggcttttttaacttccatctgggctcatttgttcctcaggatctctccaaaccccatgaggtgggacagggatgaggggaggtcatgttgtttttgagggaaaatgtgccaagtggcttgcctctggcctcatttccctagtcaccaaaggcagcagctgtcctgtcactcatgaggagggtctcccacstgatcttttgggtgtgatactacaatttggtcgttcaattggagtgtacaaaggtgagatcagacagggctagcctttgatgacattatacacatgaacgtcttcagtcttcatctgcgctctgagaggtaggcattattggcgtcatttttcaaataaggaaactggaatcataacttgtccctcatcgtaaagacaggataagaacccagctccttctgataacaaaaccagcattttctttctttttttttttkgggacagagtctcactgtgtcgcccaggctggagtgcagtggcgcgatctcggctcactgcaagctccacctcccgggttcacaccattctcctgcctcagcctcccgagtagctgggactacagttgcccaccaccacgcctggctaatttttttgtatttttagtagagacagggtttcaccgtgttagccaggatggtcttgatctcctgacctcgtgatctgcccgcctcagcctcccaaagtgctgggattacaggcatgaaccaccacgcccggccccagcattttctttctatcccagacctctgaaccacactggtgtctttccatcctcccgctccactcyttcccatccctttggcctgcctttgggaagggcagatgttgacccctggaagacaagtgttcatacggtgctcatcctgccaagattggcccaaagctgggccaggaactttcctgcggttgctttttctcctaagcactctccacgctcgtggtcctggagaacaccccatcttcccatctctcaagcccagtgtcagtattcccagtacctggtagttttattgctcttttggttttctgtgatcttgtttaaacattagtgcctggtctctgcagtgctgggggcacaaaggtgggtgatgaggggcctgttttcaagcctgcaatagagtagtgtggggacaaagtccctgaggctgcatgctcagggcagtggaggcagtgggagttagaaagacaccctgtggcccatgagtatctcaggacacagctggagccaaactgagtttgaaataaaaactgctgatttgcctaactcagctctgaatgatggtgggccctatctaagattttagtttgcttttaatagagaagctttattattaagactgtccaagctgggcacagtggtatgcacctgtagtgtactctctgggaggctgaggcgggaagattgcttgaggctaggagtttaaggttgtagtgtgcaatgattgcacctgtgaatagctatcgcactcccacctggacaacagtgagacctcatctctaaaaataattaaaaaaaaacaaaacatgcaaactctggtgttgctggctctgggtaagccccacaatgggggttctgtagtgctgtgagcactgcagtatagcaacagcccttccccctcaggcggtttctttcacttgcaattaggaatygaatgcgtgattcaagtccatgtggcagcatcttgtagctactctgaatccccgtccgtgatgctctctagacaagaccactgtcataagtgcttcctaagtcttggagagaaagtgtgtgccagatccagcatggctacttgggcagcttctggagacagatgcatgtgggccttatggctggtatgcctggcatgcctgtggctgtctggacttgcttagccttggctaggccaggctgaagcctgacagtgcagttggtgaaagggctcagccttggacagatggtgccccctgctggggagctctgctaataggcttccctccctccacagtagggaacccagcccagcccatacctgcagagcctggcatctctygtctcagaagtaaggtctctcagtcccatcccactcaggactaaggtgcacagaaaggtggccttgatctcagaacctgctcagtggagacaaagctctggtcagcctgagacccgggagatttggccccagccccatctgggctgatttgatcaagggctgctagaggttgtggagactccttgctagactgtagttactcaagtggaaggaagacactcagaacatggatttttaggcaggtcggctcaggtaacgcagattcrgttgtttgctttggaagagaattttggcactatgttctagtaggaaatttgttgtagtggtgataataatgtcaacatggtaatgaaaaaagtaatagccaacaataatagccatctgatatgcttcccacagactccacccctagaggggaactacagggcttccttaccccccagaaccacatctgatctctagagctccgaaggaaagagagggggaagggaggtgactaactgagggcttcctgtgtgtcagaaactatacagagcactctacatgggccatctcatgtcctcccaggacaccctgacaaccctgtgagcagttgaggttatctccagactcaaatgggaggttacctgcccaggccataggctagaaagtgttgccactggaacctgagcccagaggaacgtctgggtccaaactccatgctctcactgctctcccacaccgcttcccagtggaccctgggctgtgagcggggatggagctttgacggggtgctgcctggaggtggcagtggggaactgttggatgctgacaacagattgccgtgaaaatgcagcctcctaggagtgttctttcccaggtagtgtacgctccctctcggcttcttgccgctcacccctccctgtgtaaatgacccttgtggattgagcctcagaagtgagcccactctctgatggccattgtgttttatggagcatgcatttcagcacaagcctggttcccacatggaaaaattacaggcattggagtcacgtggaagctcatgacccaggcgagttccttgacctctctgaatcttaccatcctcatcaggaaatgggaatatcagcaccttttttgcagaattatgtgaagagtagaaaaagtgagtgcaaagttatcacccaggccagccctagagtattgccctcttggaagctgatttcatgcccctgcctggtctgctctgtggacatggcttggcctcagggatctctgagaacccagcaaggcatgaagcctcttcatagcccctcctgaccttgacaagcagcccccaagtcctttaggtcacctctccctgtggacagctgatgtgggagccgttctagaagaagcacctgtccctggtcctcttgatgctccaggctccttctgggaagggtccatccatggatgacagggaggcaaagctctgttgccttcttgcctggctcctccctaacttgccaccataagaagtccctttccttccaggctcaggatcctgaactgttagatgagagcccagcactgatcccagcttgaaaactgggagattttctcttcatattgaggtatagctccctgggattaggagttcttgtaggagtttctcactgaaagtcactttgttgcaccaaaacatcaagacttaagaaacagtatggactctgctcagtgtaaccctgtggcagatagtgttccaamaaaaaaaaaaaccaactttatggagacataattcatataaaatacagtttttttttgtgatttctagtgtattcacagagttgtgcaaccatcaccacggtcaattttagaacattttcatcaccccaaaaagaaactatacccatcaatagtcatcgtccccttctgcacccttacccccatccactggcaaccattaatcaattttgtctctatagatttgctttttctggaaattttgtataaatagcaccatataatctggtcttttgtgactggcttctttcacttagcatgatgctgtagcatgcrtagtacttatttctttttccagctgaatagtattctattatatggaatatttaatagtgtatcttatttaaccattcattagttgatggacattgggttgttgggttattatgaataatggtgctctgaacatttgtgtacaactttttttttctttctttctttttctttttcttttttaaagtagagatggggtctcactttgttgaccaggctggtcttgaactcctgggctccaaggatcctcctgcctcagcctcccaaactgctaggattactgtgagctaccacacctggcctatgtacaacatttttaagtggacatggtttttatttctttcggttatgtacctaggagtggaattgctgggtccagtggtaactgtttaacctttcaaggaactgccagctgttttccaaagccagctgcatcatttgacattcctaccagcaatggacgaaggtcccaatttctccacattcttgccaacacttgtctgtctttttgattatagatattctagtgggtaatgaagtaatatctcattgtggttttgatttgcattgccttaacgactaaggatgttgagcgtcttttcatgtgcttattggccatttgtatattgtctttggagaaatgtttattcacatcctttgcccattttttattcaggttctttgtctttctgttgtcgaattgtaagagttctttatatattctggatactagatctttatcatttatatatgatttataaatatcctattctttggattgtcttttcagtttcttgatagtgtcttttgacacacagaagttttaaatttcagtgaagtccaatttatgttttttcttttgttgtttgtgtttctggtttcgtatctaagaacccattgcctaatctaaaatcacaaatgtttatgcttgtgttttctcctaagagttttatagtttcggcttttatatataggtttatgatccatttgtagttaattttcatgtagggcataagtaaggggttggtccaacttcattattttgcatgtgaatatccagttgtcccagaaccatttgttgaaaagactgttctttttttattgaattgttttggcagcctcatcagaaaatcaaatggctgtctttttagcactcttactgtgtgtccactgagccaaggttaagtggatattaggtgagttacccatcacattacccagagaggtgtttttactgtgctttctgtcagcagaaaagctttgtgttatccgtgtccctgtagttacaggattacataaagmagcatttatgtagtgattcttaaccaggggcaaatttgttccgctggggacatgtagcaatgtctggagacatttttacttaacatgactcagaagtgctgctggcatctagtgggtagaggccaaggatgctgctgaacatcctggagtgcataggacagcccttcaaaaagagttaatttggtccaaaacatccacagtgtcacagttattgtaagaggaaagtagtcacaaatgagtcagccatgttgcacatgtggtggtatatctataggatacttttccagaagtayatttgtcttgcttttatagatacgctgtattggattccaaggagatttgggtctgtggcttcatagctccaaactgtctatctggaggaagctcactaatggccgagtttggacaattgctgaatggtaaaatgttaaaattaatagtagactgaggccaaagccagaaatgaacttctaagatgcaagaataaatctgcagattgaccaaaatgtaattattatccagcttcttattagcagttttataacattaccattatggctgccttgttaaactgtgatcctccccaccccccgttcccccagctcctgctgaggtcagcacatggcctagcaccgctgctggcacatgagggctccactcagccagcccactcagcagcatcactgactagaaccgtctcccactaatatggtttctagaagaaactttctacttcagattcatagcttggacaaatctcagaaatgtttggtctttaattcctgaaaaatgcttagcagtcctcagcagccttttcttttgtttttctcctcaaattcctttttaccacttggtagccttttaatagactttaaaaactataagaaatgttattaatgcatttctataaattctgttcttgtgaagtttgatttgggagtactttatttttctctaaccttttcttctttaaactttttatgtttgttgtgatttatcatgggtggtgtagaattttggatatttttgtccttgggatattttaatgtggcaaaattgagatcttaggatttcctcaaaattaccaaaagaattctcaaataagacttaaaaaacacttatggcctaaatagaattaaaaaactaaaaattaaatgtagttttaaaaggttattttgcttaatgtgaaggttccaggcacaccaaatactgagatttgaatcatgatagaatttcatctttataattcttcttaattttaaaaagacattcgttgctggaaaaagataagttttctctaaagttaacttaatacttgtatttcctattagtttgtttccatatttactttgaagattttaatttttttttgttttgagacggagtctcactctgtcacccaggctggagtgcagtgacacgatctcggtacactgcaagctccgcctcccgggttcacgccattctcctgcctcagcctcccaagtagctgggactacaggcgcccgccaccacgcccggctaattttttgtatttttagtagagacggggtttcaccgtggtctcaatctcctgacctcgtgatctgcccgccttggcctcccaaagtgctgggattacaggcgtgagccactgcgcccggctgattttaatttttttacattagatttaacaattcattaatgtagcattttattctctttttgaattgtttttattgtggtaaaatgtgtgtaacataaaatttgccattttaaccatttttaagcatacaattcattggcattaatgacattcacagggtggcatgaccatcgccactatttctaaaaccatcaccactatttccaaaactttttcatcacctcaaaaacagaaactctgtaaccattaagcatgaagtcccaacccttcctcccctcagatcctggtaacgtctcatttatttctgtgttttttttttttttttttttgagatagggtctcactctgtcacccaggctggagtgcagtggcatagtcttggctcactgcaacctcttcctcctgggctcaagcgattctcatgccttagcttccggagtagctgggattacaggcatacaccaccaggcctggctaatttctgtctctatgaatttgcctactatagatatttcctataaagaaaccagaaaatatttgttcttttgtcggtgacttatttcactttgcatgttttcagggttcatcctgtgctagcatgtattttgtttgcattttatttttgcagtcataaatatgcatttttatacctcaactggatagaatttaaacaggtagattttatttttactaaagttaaatttttagcatgcttacttgtttttgaaaccaaatattcagatactaacaaatccagttgacatgactaattctttgttatattgattacttataaccatagactgtacaatcctgcacaagtttaagaatgccagaagtgtagcctttctgctgttaggacccccagaggccaaggcagaagcctacagcacttgggccctccaaacactagctgaaggctggccccatgtgccaccagtggctgcgcagggcacctcagggtctggtgggttggcaaggttcctccctggggtgttattcctatggcttggctaagggttcaagagaaaaataggcaaaagatgggattggacccttctcaaaaagaagtaaaataatatatataagggaatacattcaaatgcctcattagtaatcaaagaaatgcaaacttaaggtgttacctttccctctttttctaaactgttgaaatagcaaaatatttcagaatgagaatactcggtagtgctatgatcctgtgagattagataactcatgtgtagctstataaattaggatagttattcattcaagtagctattcagggttctgtcaagcactacaacagttgctaaggaaatgcttatggctgtatgcatcaaattatcaaaatatcaataaaaataatagcaacaattggaaactacctaaatgctcaacaatttgggttaagtaaaatatttaatggattgttaagtaaatattaaacataattattaagactgttgcaagccaggtgcagtagctcacgcctgtactccaagctactcgggaggctgaggtgggaggagcccttgagcccaggagtccagggctgcagtgagctagaatcatgccactgcactccagcctgggccacagaacaagacccagtctcaaaaacaaaacaaaacaaggagactgaagcaacatgaaaaaaaacaaaaaaaacttgcatacttagtataatttgtaaaattatactatagagtataattagtatacactatatattatactatagggcataattagtatatactatatattatactatagagtataattagtatatactataatatagtatatactrtatattatactatataatttgtttatatatgaatgtttggcaaatatctagatgattatttttgagtatgattttagttatttttttcctccttcccagttttgctatgatattgatgattaccaagataaataagttggtttttttttttttttctttttggaacagagtctcactctgtcacccagggtggagtgcagtggtacactctcagctcactgcaacatctgcctcacgagttcaggtgattctcatgcctcagcctcctgagtagctgggattacaggtgtgcaccaccatgcccagctaatttttgtatttttagtagagacggggtttcaacatgttggccagccgttcttgaactcctgacctcaggtgatctttgggaggcctctgcctcccaaagtgttgggatttacaggtgtgagccactgcgcctagcctgaagttgtttttatgccactggaggttagtctgtttactctggtcctggctctgattcttaggctgcctagccagctgcttgtggtgtgagtgttggatctgtatttccagtgtcgtttcttgtctaacagaggcttaggtgatgggattaattttgccccttacagaggcactgaggacatcacatcccctcacggcatccctcttgaccttctggaccgagtgatgataatccggaccatgctgtatactccacaggaaatgaaacaggtgagcctcccttcttccctcctgctctcttctctcatttgctcccagtgttcactggtggctgtgcagaaaggtatctgcggcttggatctggctgccattcaccatctcaccacttagctactggcctcgagcaagtcacattactccagagtctcagtctccccatctgaaagatggattggtctaactagacattgccccaagtgtcaacagaagctcagctccctgtcttggctgttcgcttttctgctgttccccctttgataagctttaggaaaaggatagtgaaaaaatcaacatgatgatagccattagggaggctaccagytctataaaaaggaagcaataaaatatgatttagtgatagccttttggtgaccaggccagaatatgcctgtggccttttctactcagaggacaaggccaggctcgctgttccacctgaaccaacagcaagccagctccagcagggtacagaatgtagccaccctgacctggaagaggccagtgcttgtgtcctagcagagcctgtctgctgtaaacagcatgacaagtttctcggcagctttggaggccgcccctgggcaggtctgtggctttgcaatagagtccttgagggcttctgccaagtccacagaggtgatggcgagacagcatcatacagcttagaagagcacctgaaggagggagtttgtgaaactgatcatataataagaggcttcattggaggacccttggaagcatctagctcagtggctggcacacygtgcatgccctgaagtctgcgtgagctgaatctgggttaggctgagttgggagacgacagggatgtatgagcgtgggctttatccaaagggccacagtcccagttgtccctgtaggaattgcctcttgcttggtttggagctagagcacaactatgtgccaagcataggaataccattggactaggaatttctagtcaccttcatggtatttccaggtattccatgtgatcaccatctattttattttttacatttgagtcatggagctgtaagtgcaggatgcaaagccaggcagtgccctgtagagcccaggccatcttcagtggtacataccctgaattggtgtctccgaggcagcatgtgctgtgctctttcctctgccctgcccacctttgccccaaatgttctcttctgatgggctctggcatgcagccatggttggagatgctgagcagactggggctgcagtgacgtctcgatgcgctttgcctggaccttgtcttttcaccagagcatggcatctttgttgagcatcgtgttgagcaggacatgcctggccagtttgattccatttgatccccagtaacccatgaggcagggagaactactgtcattgccattttaaaagatgaggacattgcccaggcatggtgactcacacctgtaatcccagtactttgggaggctgaggctggagggtcacttgagctcaggagtttgagaccagcctgggccacatagtgacacccctactcaccaaaacatcaaaaagttagccaggtgtggtggtgtgtgcctgtagtcccagctacttgggaggctgaggtgagaggatcgctttagcccaggaggtcgaggctgcagtgagctgtgatggtgccactgcactccagcagagtgagaccctgtctcaaaaaaagacagatgaggacactgcgacctagggtaactaattcgcccaagttcataacattagtcagtggctagcaggtaatgggactggctgtaatccaggctttctgatccggaaacccgtgttcttaatcactgtgccacccagcttccctcctgctagaaatctctcatctcattgtcattaggattcatgaggtggctttcctctggcagtttgtgagcaggacctttcctttggagcagtcagggcctctcctgggcctttcctggcacttctgctgctctcctgtggctggaggcccagcctgggcctgccagcatctcttaccgcatgcaggagtgctgtggggatgcatcaggagagtcacagatctccctttgtaaccagcattggcaaattactgaagcagttatggttcatagtagcaattgtatatgttacctaggagatggtgtcaatggccgggggcctcatcgccacgtaagggtgtcttgtcaggtgacttgcaagggtgactgccaggttgaagccaaggcattcactgaacggaggcagaagcagaaacagtcccaggcaattcttggaaaactggcccattcttactgcgggacatagcaccttactgttgggtccaaaaccccatgtgtcctgccaaaaaaggcagcccagcacagatgtgttcagggccagagacaccatttgcctactgaatgacttgagcaatttggtgcatctcaccgagccttcaccttctctgttaaatggaacatctcctccctcctttgcaagattgtcattaggatttgtgaggtattggcaataacgggccctcccatccttcccattgctgttgttattactgtattcatagctttgtgtgcttcataggtaccctctagggtcctctacgtacaacatacaacagcttcgcaatagccagcgttggaggctccaagaacgagggtcctgtggctatgtggagagtaagcagcagagccaggactgccactcagagctagttcacccttgctgccgccattcgaacccagagctcctggcccaaacagtctggaatgttctgtactgtgcttctaggacagtgacttgccaggccaactctgggctggggctgtcttggctctgtcaggagggcctctcctcaggctttctctcaggactcgtggctttgttcccgctggcccaggygataacctcagcatttttactggagcctggggctaggtttttaaacaaactcaatgtaacttgtgtactctgcaatccaagccgacaccctcataaactatccctgcaggttattaaatgattaaagatctcatttatgaactgtccattttcgagcagcctgagacagacgctttcacgattgctctgacctgctgctctctctagtgagagagagagagcagagtgtccctgacattctggaagctgagccacagattcagtgcatctcactgaaggcgaggcacttagcttaagctgtctcctatgaccaggctccaggattcaatatttacatctccctggagtttcagaaggtcatctggggacatttttcttggcaagacctggtggtttcctcagtcccagctgtgagtgagaagccgtttttaccttgaagctgtgttcaggggggagttctgttgtgagtccctcccagctccttttcttggttgtccttgtaccatccagtaacttcagagggcccctttttgcccagctgcatttagctttggatttcagacagtgaagcccctcctgcataagctaagattgtttcagtggagctcacaccctggcagttcacccatgagcccagcagatacgtttcatgtggcctatgcagtgtttgtgaaatgtttgaacaagttgctgacatctagacatcaggacatttctttctttctttctttttttgagatggagtttctctcttgttgcccaggctggagtgcaacggcccaatctcagctcactgcaacctccgcctcccgggttcaagcaattctcctgcctcagcctcctgagtagctgggattacaggcatgtgccaccacacccacctaatttttgtctttttagtagagatggggtttcgccatgttggtcaggctggtcttaaactccagacctcaggtgatccacctgcctcsgcctcccaaagtgctgggattacaggcgtgagccattgtgtcctgccaaaatcaggacgtttcgtacaaggatctgagttctgagcctgtcttgagaaaagggaagactgcagacaacaccttgcagcagtggtggccgcgggtggaggggctgcctccccagggtgtttgctggccaagcatttcaccctcacctggctcatcgcagccgctctgtcctgctggggctttccaaggcctttcccatctgtgggcagccaatgtgctgtcccccaagcccaaccgcgatcatcagagactgggctccccctgcagctcctgcccgcagggtcccagcctggagagctgacaggcgaggcttgatgtggccacctcagtaaacctctggctctcctccctcctggaaggctgaagctgggactcagtctttcccagctcctgtgcctctacactgggtgtgcttttatggctttaatttcaacaagggcttcttgatatcttgtttacgaagctgccaaagtgaaaaattcctgtattatatgcggctcgaagtcctgcagttatctcagctccacaacacacaacatcattatcctggctgccccttatcactcagtgctggtacgcctgcaggatcctggtccaccgtgttacagcatccccgccgccagcctgcctcccctccaactctaccaagatcttcaaactgcaacaagcgtcagcctcttcttgatagattagatatctcccggtgatgttatgaggcctggtaaatctttaaaagtaactkttttgatttatttaaccatcatatttatcaagcaaataaaaaatgtcccttcttgcctgagtgcttgtaggcagtagtgcccatgctggagaggaaggttagagcccttgcaggagcccmgggtaggttagaagaggccccagttctctgcctggggacaggggacgggaggacatggaggcaagagtgagccacttgggaagctgcatacctccttgggcaccagccacacttgagtcagttgaatacagcacactggccgtgatgctattcatgcatactgcagggccgcacatgcctcctggagggtgccgggccggcagtgctgggcaggcgttggctccctgcccaccaacccaggtctcagtttctcttatgctgcacagtgagaaatctgagcaacattgtctttaaagcactttagaaatggggcacttgaggtcagtcaccgttgatcatgttttttatcctttaaaagatcattaaaatccgtgcccagacggaaggaatcaacatcagtgaggaggcactgaaccacctgggggagattggcaccaagaccacactgaggtgagctggtaccctgggcccgccggggcctccccagcacagccagggccctcgctggggtcattctggacaataaaggcaggtcccttcctagggcatgggactctatccatccgctcttcctggcrcgatgggtgccagggcacttgagtttcaaatgcagaggatctatctgatggtttttaacaagctagagtaagggtgaagtccccatgtcctgcagcagatgctcccctctggtggagagtgctttgaccctgggccttcttgtggcagagaagatgcacagaactagagagcagggaccatgtggtagctcattagccagggccctggctcctgttctcccggtggtgttatgaggcctggtaaatctttaacttttttgatttatttaaccatcaagcaaataaaaaatgtctgggtggtggatatggagagccagggaggagcgcagacatagacagttctcctaattgttctccagcggctcaaacacaggaccggcagagcatgtcccttcacagtggcctgactcattgtaaaatcattgcttcacagtcctcagcccttccctacatcccttgagtcagttcttgctcctgaggttgaaggcagaaatgcaagctgtgaggtttggatgaaggggtactttttaaaacggcagagtcttcatgcctttggatgggcatgtacttccagctggctatgttttcatttccctgccatgttaaatatccctatctgtcggacacctgtatacatataagtttgcagtccttttccagtagcagtgacattacttcctactggaggatttgtagactgtactaaagatttggggaatagcacttatgtcttcttggtggctcctggaccctctctgatgggataatgactgcagctctctgagaagtgacaactttgtctcccnnnnnnnnnnnnnnnnnnnnnnnnnnnnnnnnnnnnnnnnnnnnnnnnnnnnnnnnnnnnnnnnnnnnnnnnnnnnnnnnnnnnnnnnnnnnnnnnnnnnnnnnnnnnnnnnnnnnnnnnnnnnnnnnnnnnnnnnnnnnnnnnnnnnnnnnnnnnnnnnnnnnnnnnnnnnnnnnnnnnnnnnnnnnnnnnnnnnnnnnnnnnnnnnnnnnnnnnnnnnnnnnnnnnnnnnnnnnnnnnnnnnnnnnnnnnnnnnnnnnnnnnnnnnnnnnnnnnnnnnnnnnnnnnnnnnnnnnnnnnnnnnnnnnnnnnnnnnnnnnnnnnnnnnnnnnnnnnnnnnnnnnnnnnnnnnnnnnnnnnnnnnnnnnnnnnnnnnnnnnnnnnnnnnnnnnnnnnnnnnnnnnnnnnnnnnnnnnnnnnnnnnnnnnnnnnnnnnnnnnnnnnnnnnnnnnnnnnnnnnnnnnnnnnnnnnnnnnnnnnnnnnnnnnnnnnnnnnnnnnnnnnnnnnnnnnnnnnnnnnnnnnnnnnnnnnnnnnnnnnnnnnnnnnnnnnnnnnnnnnnnnnnnnnnnnnnnnnnnnnnnnnnnnnnnnnnnnnnnnnnnnnnnnnnnnnnnnnnnnnnnnnnnnnnnnnnnnnnnnnnnnnnnnnnnnnnnnnnnnnnnnnnnnnnnnnnnnnnnnnnnnnnnnnnnnnnnnnnnnnnnnnnnnnnnnnnnnnnnnnnnnnnnnnnnnnnnnnnnnnnnnnnnnnnnnnnnnnnnnnnnnnnnnnnnnnnnnnnnnnnnnnnnnnnnnnnnnnnnnnnnnnnnnnnnnnnnnnnnnnnnnnnnnnnnnnnnnnnnnnnnnnnnnnnnnnnnnnnnnnnnnnnnnnnnnnnnnnnnnnnnnnnnnnnnnnnnnnnnnnnnnnnnnnnnnnnnnnnnnnnnnnnnnnnnnnnnnnnnnnnnnnnnnnnnnnnnnnnnnnnnnnnnnnnnnnnnnnnnnnnnnnnnnnnnnnnnnnnnnnnnnnnnnnnnnnnnnnnnnnnnnnnnnnnnnnnnnnnnnnnnnnnnnnnnnnnnnnnnnnnnnnnnnnnnnnnnnnnnnnnnnnnnnnnnnnnnnnnnnnnnnnnnnnnnnnnnnnnnnnnnnnnnnnnnnnnnnnnnnnnnnnnnnnnnnnnnnnnnnnnnnnnnnnnnnnnnnnnnnnnnnnnnnnnnnnnnnnnnnnnnnnnnnnnnnnnnnnnnnnnnnnnnnnnnnnnnnnnnnnnnnnnnnnnnnnnnnnnnnnnnnnnnnnnnnnnnnnnnnnnnnnnnnnnnnnnnnnnnnnnnnnnnnnnnnnnnnnnnnnnnnnnnnnnnnnnnnnnnnnnnnnnnnnnnnnnnnnnnnnnnnnnnnnnnnnnnnnnnnnnnnnnnnnnnnnnnnnnnnnnnnnnnnnnnnnnnnnnnnnnnnnnnnnnnnnnnnnnnnnnnnnnnnnnnnnnnnnnnnnnnnnnnnnnnnnnnnnnnnnnnnnnnnnnnnnnnnnnnnnnnnnnnnnnnnnnnnnnnnnnnnnnnnnnnnnnnnnnnnnnnnnnnnnnnnnnnnnnnnnnnnnnnnnnnnnnnnnnnnnnnnnnnnnnnnnnnnnnnnnnnnnnnnnnnnnnnnnnnnnnnnnnnnnnnnnnnnnnnnnnnnnnnnnnnnnnnnnnnnnnnnnnnnnnnnnnnnnnnnnnnnnnnnnnnnnnnnnnnnnnnnnnnnnnnnnnnnnnnnnnnnnnnnnnnnnnnnnnnnnnnnnnnnnnnnnnnnnnnnnnnnnnnnnnnnnnnnnnnnnnnnnnnnnnnnnnnnnnnnnnnnnnnnnnnnnnnnnnnnnnnnnnnnnnnnnnnnnnnnnnnnnnnnnnnnnnnnnnnnnnnnnnnnnnnnnnnnnnnnnnnnnnnnnnnnnnnnnnnnnnnnnnnnnnnnnnnnnnnnnnnnnnnnnnnnnnnnnnnnnnnnnnnnnnnnnnnnnnnnnnnnnnnnnnnnnnnnnnnnnnnnnnnnnnnnnnnnnnnnnnnnnnnnnnnnnnnnnnnnnnnnnnnnnnnnnnnnnnnnnnnnnnnnnnnnnnnnnnnnnnnnnnnnnnnnnnnnnnnnnnnnnnnnnnnnnnnnnnnnnnnnnnnnnnnnnnnnnnnnnnnnnnnnnnnnnnnnnnnnnnnnnnnnnnnnnnnnnnnnnnnnnnnnnnnnnnnnnnnnnnnnnnnnnnnnnnnnnnnnnnnnnnnnnnnnnnnnnnnnnnnnnnnnnnnnnnnnnnnnnnnnnnnnnnnnnnnnnnnnnnnnnnnnnnnnnnnnnnnnnnnnnnnnnnnnnnnnnnnnnnnnnnnnnnnnnnnnnnnnnnnnnnnnnnnnnnnnnnnnnnnnnnnnnnnnnnnnnnnnnnnnnnnnnnnnnnnnnnnnnnnnnnnnnnnnnnnnnnnnnnnnnnnnnnnnnnnnnnnnnnnnnnnnnnnnnnnnnnnnnnnnnnnnnnnnnnnnnnnnnnnnnnnnnnnnnnnnnnnnnnnnnnnnnnnnnnnnnnnnnnnnnnnnnnnnnnnnnnnnnnnnnnnnnnnnnnnnnnnnnnnnnnnnnnnnnnnnnnnnnnnnnnnnnnnnnnnnnnnnnnnnnnnnnnnnnnnnnnnnnnnnnnnnnnnnnnnnnnnnnnnnnnnnnnnnnnnnnnnnnnnnnnnnnnnnnnnnnnnnnnnnnnnnnnnnnnnnnnnnnnnnnnnnnnnnnnnnnnnnnnnnnnnnnnnnnnnnnnnnnnnnnnnnnnnnnnnnnnnnnnnnnnnnnnnnnnnnnnnnnnnnnnnnnnnnnnnnnnnnnnnnnnnnnnnnnnnnnnnnnnnnnnnnnnnnnnnnnnnnnnnnnnnnnnnnnnnnnnnnnnnnnnnnnnnnnnnnnnnnnnnnnnnnnnnnnnnnnnnnnnnnnnnnnnnnnnnnnnnnnnnnnnnnnnnnnnnnnnnnnnnnnnnnnnnnnnnnnnnnnnnnnnnnnnnnnnnnnnnnnnnnnnnnnnnnnnnnnnnnnnnnnnnnnnnnnnnnnnnnnnnnnnnnnnnnnnnnnnnnnnnnnnnnnnnnnnnnnnnnnnnnnnnnnnnnnnnnnnnnnnnnnnnnnnnnnnnnnnnnnnnnnnnnnnnnnnnnnnnnnnnnnnnnnnnnnnnnnnnnnnnnnnnnnnnnnnnnnnnnnnnnnnnnnnnnnnnnnnnnnnnnnnnnnnnnnnnnnnnnnnnnnnnnnnnnnnnnnnnnnnnnnnnnnnnnnnnnnnnnnnnnnnnnnnnnnnnnnnnnnnnnnnnnnnnnnnnnnnnnnnnnnnnnnnnnnnnnnnnnnnnnnnnnnnnnnnnnnnnnnnnnnnnnnnnnnnnnnnnnnnnnnnnnnnnnnnnnnnnnnnnnnnnnnnnnnnnnnnnnnnnnnnnnnnnnnnnnnnnnnnnnnnnnnnnnnnnnnnnnnnnnnnnnnnnnnnnnnnnnnnnnnnnnnnnnnnnnnnnnnnnnnnnnnnnnnnnnnnnnnnnnnnnnnnnnnnnnnnnnnnnnnnnnnnnnnnnnnnnnnnnnnnnnnnnnnnnnnnnnnnnnnnnnnnnnnnnnnnnnnnnnnnnnnnnnnnnnnnnnnnnnnnnnnnnnnnnnnnnnnnnnnnnnnnnnnnnnnnnnnnnnnnnnnnnnnnnnnnnnnnnnnnnnnnnnnnnnnnnnnnnnnnnnnnnnnnnnnnnnnnnnnnnnnnnnnnnnnnnnnnnnnnnnnnnnnnnnnnnnnnnnnnnnnnnnnnnnnnnnnnnnnnnnnnnnnnnnnnnnnnnnnnnnnnnnnnnnnnnnnnnnnnnnnnnnnnnnnnnnnnnnnnnnnnnnnnnnnnnnnnnnnnnnnnnnnnnnnnnnnnnnnnnnnnnnnnnnnnnnnnnnnnnnnnnnnnnnnnnnnnnnnnnnnnnnnnnnnnnnnnnnnnnnnnnnnnnnnnnnnnnnnnnnnnnnnnnnnnnnnnnnnnnnnnnnnnnnnnnnnnnnnnnnnnnnnnnnnnnnnnnnnnnnnnnnnnnnnnnnnnnnnnnnnnnnnnnnnnnnnnnnnnnnnnnnnnnnnnnnnnnnnnnnnnnnnnnnnnnnnnnnnnnnnnnnnnnnnnnnnnnnnnnnnnnnnnnnnnnnnnnnnnnnnnnnnnnnnnnnnnnnnnnnnnnnnnnnnnnnnnnnnnnnnnnnnnnnnnnnnnnnnnnnnnnnnnnnnnnnnnnnnnnnnnnnnnnnnnnnnnnnnnnnnnnnnnnnnnnnnnnnnnnnnnnnnnnnnnnnnnnnnnnnnnnnnnnnnnnnnnnnnnnnnnnnnnnnnnnnnnnnnnnnnnnnnnnnnnnnnnnnnnnnnnnnnnnnnnnnnnnnnnnnnnnnnnnnnnnnnnnnnnnnnnnnnnnnnnnnnnnnnnnnnnnnnnnnnnnnnnnnnnnnnnnnnnnnnnnnnnnnnnnnnnnnnnnnnnnnnnnnnnnnnnnnnnnnnnnnnnnnnnnnnnnnnnnnnnnnnnnnnnnnnnnnnnnnnnnnnnnnnnnnnnnnnnnnnnnnnnnnnnnnnnnnnnnnnnnnnnnnnnnnnnnnnnnnnnnnnnnnnnnnnnnnnnnnnnnnnnnnnnnnnnnnnnnnnnnnnnnnnnnnnnnnnnnnnnnnnnnnnnnnnnnnnnnnnnnnnnnnnnnnnnnnnnnnnnnnnnnnnnnnnnnnnnnnnnnnnnnnnnnnnnnnnnnnnnnnnnnnnnnnnnnnnnnnnnnnnnnnnnnnnnnnnnnnnnnnnnnnnnnnnnnnnnnnnnnnnnnnnnnnnnnnnnnnnnnnnnnnnnnnnnnnnnnnnnnnnnnnnnnnnnnnnnnnnnnnnnnnnnnnnnnnnnnnnnnnnnnnnnnnnnnnnnnnnnnnnnnnnnnnnnnnnnnnnnnnnnnnnnnnnnnnnnnnnnnnnnnnnnnnnnnnnnnnnnnnnnnnnnnnnnnnnnnnnnnnnnnnnnnnnnnnnnnnnnnnnnnnnnnnnnnnnnnnnnnnnnnnnnnnnnnnnnnnnnnnnnnnnnnnnnnnnnnnnnnnnnnnnnnnnnnnnnnnnnnnnnnnnnnnnnnnnnnnnnnnnnnnnnnnnnnnnnnnnnnnnnnnnnnnnnnnnnnnnnnnnnnnnnnnnnnnnnnnnnnnnnnnnnnnnnnnnnnnnnnnnnnnnnnnnnnnnnnnnnnnnnnnnnnnnnnnnnnnnnnnnnnnnnnnnnnnnnnnnnnnnnnnnnnnnnnnnnnnnnnnnnnnnnnnnnnnnnnnnnnnnnnnnnnnnnnnnnnnnnnnnnnnnnnnnnnnnnnnnnnnnnnnnnnnnnnnnnnnnnnnnnnnnnnnnnnnnnnnnnnnnnnnnnnnnnnnnnnnnnnnnnnnnnnnnnnnnnnnnnnnnnnnnnnnnnnnnnnnnnnnnnnnnnnnnnnnnnnnnnnnnnnnnnnnnnnnnnnnnnnnnnnnnnnnnnnnnnnnnnnnnnnnnnnnnnnnnnnnnnnnnnnnnnnnnnnnnnnnnnnnnnnnnnnnnnnnnnnnnnnnnnnnnnnnnnnnnnnnnnnnnnnnnnnnnnnnnnnnnnnnnnnnnnnnnnnnnnnnnnnnnnnnnnnnnnnnnnnnnnnnnnnnnnnnnnnnnnnnnnnnnnnnnnnnnnnnnnnnnnnnnnnnnnncgaggttgaagtcccggcaggcagggaggaaggcgtgtgtccccccgtgcatgcggggaaggagcagtgggggaaggctgagttgggctttcaattaaaaaaaatgtgcatacacttagttttttgatgcaaaattgccaaaggcgtgtaccgtgaaaacctacctcgacacctgccccctgcctcctgttccctttccggaagcgcctgccttacaccggtgtgttcctctagagatggccaggacctgggtgaggcagcacacactcacaggaccttcccaacactcattatgaaacatatcacatggaaaactgcaagaattacaggcaatcgcctctcagcctttggctaagatcaagtgtagtgttcttatcactttaatatctgctatctgaggacagtatgttaaatggatttttggagcagggagatggaataggaccttgctctttccactccatgcatccacctggtattgcagtacctccaggaatagtgyaccccctttgggggaataaaaaaaaaggattgcaggtgagcccccatatccctgtcatctaggcactgcactgcccatccccctgtctgcctgccagtcagtcttgtcagtcttctgtgcatttcaaagtgagttgcagatacaacaacctctgtaaatagttaagcatgtgtataattatctagagttcagtacttgattatggttttttaagtttttttttttttttttttttttttttgagacggagtttcgctcctgttgcccaggctggartgcaatggcgccatctcagcttactgcaaccaccgcctcccgggttcaagtgattctcctgcctcagcctcccaagtagctgggattataagcgcatgccaccacacccagctaattttgtgtttttagtagagatggggtttctccatgttggtcaggctggtcttgaactcctgacctcaggtgatccacctgctttggcctcccacagtrccagaattacaggcatgagccactgtgccyggctgcttatggttatttttaaacgttaaaaatacagtgaaatgtacaaatcctaagtggagcactccatgagttctgactaatgaaacccaaatcccagtgaaggatattactattgcccagaaagttccttgtgccaatctctaacacactagaggcaaccactgttagaattttttttttttttgcaatagattaggttttcctgctctagaatttcatgtaaatggcatcatacaacatgacttgtttctttcacttagcttttgagctcctgaatgttgtgtgtatggatagtttattttttattgctgggtaaaatgccaccctgtggatccaccacatgtatccatttgcctgttgatggccacctaggctgttccctatttttcagctattatgaacattcttgtacaagtctttgtataggcatatattttcatcttgggtttcaatacccaggagtagaatagctgggtgtagggtaagtgtatgtctagttttatgggaaattgctacaccttttcctgatgtagttagtctattagtcacttcctaccccccttttaaacacaaatggtagcatacgctattgtttcttgctttctgtattcttccttgacagcatatcttggagattcttctaactcaacatataaagaatgtcctcctagttcctttccacagggaggagctgctgtaatttattcagccccctccgatgggcatttagatgtttctagccttattgagctgtgctttgaaggatgaacaggagcttgtcaggcagacagcaragggaacaaggcccacaggtttgacagacactgcagaacccttactgctggggcatgagcttttaagaggagaggcaccttctgttccatttccccatgaggctcaataatgtttgctgagtggaaaggagtgggtaatgtggccctagaagggattggggcaggggagtgaggtgggcactaccacttaggggcacacctggctctccagaaccaggcattggtaggtgctgaagctcaggttggggcttttgctgactctcggacagtgccacatgcccatcccctggccctcatcaggaatcygttgctcttccccaggccatggggctcagacccctcagaaatgagatgggaggctcatcccagccttcctgaggacttcatgctggcctggcttcagcaggagcaggctgggggcggggtatggggtagggcatcagcaggtccagggaggcagtggtaaagcagcaccatggatggagcggagtgccagttgaagcgggtgctgcccctgagccaagggcagcaaggggaagctccgggggtggggcctgtttccctagactcctcattccttgccccagctacgtccctagcagaagtacctgcaggcaggaccagcagccagacagggacttggagtaggaagtgagccttaggctttttgtcctggctcgggagctaagtgacttttggccacactctatttccctgggcctcagtttcttcacctgtaaaatggacggacttgtttcctcctgggcctctagtggggtgaagtgagagcacatgtaggaagtggctgggacagtgcctgccccaagggaaaaagcagagtaagccttacccccccatcactgtgcattagttccctgtgcatggggaggagccaggtggagagacgccagggcctgccatcttgaagcgtgcgtggctgctggaatgtgggctccgtttgctctcaggcaagaggggccacggccacaggtgcaaacgaatacctgaggcacgagagatggcctactgcttccctggggcagcaggttttctaacatatttatactggcaagcaccctgcctgcctcagcaattcacagcgcctggctggtctggagcctgaggccacgtgctgtgctcctgtccagggcctccctgagccctgaggccagcaggtgcagagggagcgcggggcagacctggctgcacatgtgtcctagcagtctsaaaacacagtgctgaggtgtggcttctgcaaggccaggcccacacctgtccatcaggtggtctcagaggaaccatcctgctctgacccaactccccttggaaatcagtttccaagacaaggtctaagactacaaggaaatactgaggctggagcccagctaaggagtaacgacctcccacagccctggtcaggcctgccctggggttgcccacccacctgcccctcaagttcctgaggaagcaccaggcccaggtggtggggacggcggcaggtttggggtgaggccctgtccaggactggggagagtggaaatgtggcctaccactgggggcttggtgtagaaacagaaagacttctagacacgttctaagggagcagccacaagcctgccactcccacccacacaacactgggtccttctggcttggctacaggtcgggtctgaggccagyctcacaaccaagttaagacttctccaatcaccagctgggtactggagctgaggctcaaagggcttcgagttatggggccctaggctcctgctagaaggttcccactcttccacggggtggcaggcgccctggctcagcggaggcctctgcattctcacrggacagccagtgcactctgcctcacgggcagagccctgcagcagctccacatgtggcccagcacccatatcactttatcacaaatgtgagcaccaggttgacatgaccatcagaagggaacttttccaggcaaaatgcctgagtgccccarccaagcctttgacacacayaaagctgcaaccaagctttgcgcctcactggcctttttgggaataaaatctaatttaaaatyaagagaacatgatcaagtaccttgtaaaaaactggctttatttgtcacttattcaccttatctcagttatgccattttggcgtccacagtgacagtcccctggaagctggggtcagcccccacccacccaccgtgaccatcacccacagggcgtgagtgtgggccttgcagggcccagccgatggttacaggctgcaggcgggactatggggctcctcctgaggcctggtgccttccagccccctgcccaccagcttgggtacmsctgcctgcctgccagaggccaagcattccyaagcgtgggctgggggaggccctgcccctctgtagcagcagagcagacagggcagtgggagaaccatgtgggtaggagggcatcaggtctcaagagcctctcccctgctcaggactgggtctagacaaggccacgtgtgatagggtggtaagccctgggccatatggaggagcctggggcccatcttggttctgctgctgagttgctgggtggctttaggcaagtcccttcttgtcccttggtcactctgtttcctggctagcactgccagcaaggtctccagagtgtgcccctctgccgggctgtggcggtggccctgtgctttgcaggctgccgtgtgcccactgtcagagtggggtctccccgacaggctgcacgcacccccaggcccccttcttaggatcagggcatcctgcaaaacatccttggtcccaccaatgtctaaagccagctcgaaacctcgagctcctcaggatcttagcacccaactctgctgcccttgctgctgggcagtgcctgtcctaagaggggactccctaaaggccagagagagrgtgctcatctccaggacctaggccacctgtcagcacaaacagaacttattccagacataaacatgagtcttcttatttcaaacactggagcaactgatcamcaccaccacagcccatgcaccccgaacctgacttcactaccaaccttgagcctgtgctgtcctctctctgctgacgacactggtgacgcagaaaggaagtcggtggtgtctgctcacttgcgtgcagtcctaagcacagtaagaaaattctgaacacagctgggtgatcttcagcccagaaggtgtaggggcttgtgagcactaagtcagtttctgtccatgtctgatagctaccacaatgtctccccttgctagggcagctgcgaggagacgtgtccagtgatgactggcagaatctggacaaacggacatcactgcaagggtctgtccacctagcttggccaggctcagcttggcagagctgatgacccaagtggactaaacacggagctagcagaaacaggcagactctaagcccaacsagaagagtcagctagaagagccaataggtgcacagacaaatccacagatggccaggagtgtcttctgggaaagccatccctctcttttggaagaagttctgtccttaaaaaaatcacttttaaaataagggaaaacaatggtgtcttagagagaaacagtcctaagccagatattcccacgcctgattgtgaaggagacatgccagcaaggtcccaygtctccgggaaatacatgatctgctcccagcttcacaccytactgccaaaatgaaacgtagacatttcagtgtttgtgcttccaaccagagtgagaaattccctttgtggggaaacaggtgagacggctgcagccgcatacagcactgagaaggtgcaaaggttaaaacaaaagttacatggacacttggggacaatcctataccattcccacttctctggcagtcggctgaataaaatttcactttcacagttytttttgccagtgccaggataaaaagcaaaattttaaattggaaaatgtctagcactttacacagtggaatgaaagaatacgaaattcaaaaacattattaaaagtccatatgccgcagcagcacgcgccatgatgagagctccccttccgaggcgcttctggagcagcttcctcaacctgtccgggagacgggctcagaagagcagggcccccatgctgccaacctcrctttgctccttaacgaagatctcaaagtactggtagatgattgtgactgcgagcaggatcccggttccagacccaatggcgcctaggaagtcagccaggaccgagagggccccgatgcacagcccaccaaaggccgcggctgtggggatgtacctgggggaggggacacagtcagctcctggacacccacagagctccccgtgagccaggcggccaacaggctcacctgagactttgggacctaatgcctcaaaggcccctctgctgtctcctagaaagtcatctactaacatgctagcgctctaggccaaggcgctgctgtccaggcagtggccacactggccacacgtggccaggggactgtgactagaccaaactgagatgtcacataagattttggagatttgaagacaaggatgtaaaatatttcatcatggtttttcttaacattaattataatgttgaaatgatactttggatatactaggttaaatatattaaaattaatttcacctgtttctttttacttttttaatgtgacttctagaaattttaaaaactacatgtgacttgaattctacttctactgcacagtgctgtaaatccagcagcttaatattaagagaatgaactaaattgcctaccatccctgctagggattagaaaatgatctgaagtttgcaattctggcttttcctgtggttgcttcctttaggtaaggcccataggacaacctggtctgcagctgactttgtagccagctttgtaggaacacggccatgctcatttgtctgttgtctgtctgtggctgcttctgagtgacgatggaagagatgagtagttgtactgaggactgtgcagactgaagagtgctgtggcagcatctaaggtcacctggactttgcccttccttacctaactgctccatctccaagggtacagctgtatctggcaccatcacctctggcccaaactctcaccacagcctggcaggtatgtggcctccccctctccctctctagcgtggtttcatgtattagcactgaccttcctaagagactgcaggctccatcccttctgccctgcttcagatgcacatcaaccccttccgtgcccagccactgccagcctctctagccttaatgccaccacaggccccaaaatgcgctcagatgccaggacctgcctgctctgagctcagagtgaccctcctccagggcgctctcttcagcaccccaccggcatgagccagggtgagggtcccgctgccagtcacagctgttgctctcaggacccttactgcactgtctcctayccgcctggccacatgcttccatctccttacccagtggctccctctggaggaaaggggctgtaagtgtttatttttacgtctccagtgtccagcacttagcaagtttataaatatataacatttaattctgtcctgtaacccaaggataagatttagtgacccagtaagtgctagggcctatcaggatgccctgcatggaaagaaacaacacatgtccacagacgggaggttggggacctggggccaccactcaccggttgagttcatggaccatggaggtctctcggtggcctctcatcaccatctgctgctccttcagctgctttgcaacctgyagggtgcccacaggggagaagttggaattggaggctgaaggggaaataggcattccaagtggtactgaacagttacagatcgcctcttcgagcactgacaatattcatacagagaactttaaaactgccgcaaggaagtcatatgamaaagtctaactttacagtgtggattcagattctcatacccacagctgatctactgctggactccatctgtcagcccttaaagcttctgaactgccccctaaaggacgacgatctatctgcacaygtcacagaccattatttatgatgaggtgacaagtccacaccccttataccagtcacactttcatcacccttccagaaagttttgcttctacttacatctttggcagaggaacctgagacctcaatccacgttttggagaagaatgcacaggagcccagcatgaacactatgtatacaactgcatggaccgggtcttctaacacggagccaaaagattctggaggggacaggtaatagcaaaggccaccaactggataagcacgtgctgggcccccagaagacgtgtcctggggaagaagaaaccaaacgcatgtgagtgctccttcattttactttagcatcaaggcaaaaatagttctgagcagatgaaagaatgcaattttactcggtgcccacagtacaatttttttactgaaaagataatttaatgtgctgaatttgtaaaaggcacaatggaaaatatctttggatgaaatatctgttcatgagcaagacactgatagaaaccactgcaacttagctgcattgctagctcatcttcaaagagcctacttaccgaccaggtgcccagcaggctgaccagcaagttgccactgaagcgagctgagagcatttgggagatgacataaaggttggacaccagggcagactgcaggatgatggggatgttggacgtatagaagagcttgatgggataggtgttgtactggccacggtagcgggccgacttgattggcaggtccactcggaagccctgagaagccaaacagaaccaaatccccttcactgcctcatttcagcctgctgcacagaaacacagcccggccggggactgtccagtgggccacaagggaggaaatcctgtgtgctggttctggggctcccagttccgagagcttgtgcccactccttacccaccactgcactcctgcacttggcacatccagaargggcccagaaaagctggtttaaaaatacactgaaggctaggcgtggtgacttacacctgtaatcccagcactttgggaggccgaggtgggagaattgcttgagcccagaagttcgataccagcctgggcaacacagtcagactccgtctctacaaaaaataaacaaaactggccgggtgtggtggtgcgcgcctgtagtcccagctactcaggaggctgaggtgggacaatcacttgagcctgggaggtctaggctgcagtgagccgagatcatgccactgcattccagcctaagcaacacaacgagaccctgtctcacacaaaacaaaacatggaagcaagcacggtggaatgatccccacccccactttttttttttccaaaagacagagcctatcacattacatccacatctgtgtggaatatggagaaaagcctggaggccacacacccaaatcccaagggcgcttctctctagctggtgatgtttcctaagcttttacactggctctgaggcagggccactacagcagtggcctcacaccttataatagttccttacagtgtttttaatcataaacagaaaagctaaacttttctaggaatacaacttctccctctgaaacccctggagactagaaagggtttatttttatgagctcccagtacctagaacagggctcggaatacagaggatttaaaaattaaatacttaaggccgggtgcggtggctcacgcctgtaatcccagcgctttgtaatgtggaggcgggcggatcacgaggtcaggagatcgagaccatcctggctaacacggtgaaaccctgtctatactaaaaataaaaaaaaattagccgggcgtggtgacaggcacctgtaatcccatctactcgggaggctgaggcaggagaatcgcttgaacctgggaggcggaggttgcagtgagtcgagtcgagatcgcgccactgcactccagcctgggcaacagascaagactccgtctcaaaaaaaaaaaaaaaaaaaaaattcttaatgatctgactgcaaattctggcaaagcccctaaagagatagctttttattaagcargaatgtggcttagtctcagcagaaggaatgggaaaagcatgtagctcgtataaatacctttcacaaacatcaaactgcctttcatctctgtcccttcttttaaataaacaccaaaatacaaagtggaccatcaaaaaatacaaagatcaatccaattacaggaaaacaatagcagttcaggtctcttactcagaagcaagtttaagagatggaatacttttaaaggtaagacagcttaagaagataggccrtttccgagatgcagaagttacctataaatatcatacaaactttctataagagagcaatgaggtttcagagctagagtactttttgcttctcttgaactaagaacttaaaaatgtatcttayctgtcgataggcccaacccagargaacatgatttcacttacgttagaactgccttaattttgtttcgttaatggcaggtcccatgactcaatgaacatgcttgtccagctcatctggaaacctgctgccttcaaataccatctcatcgtttcaacacaatatgatgacagtgcaccccacagagtgggggactgcacacaaggcattctgaaacttaaatccagaccatggaaactccctggggttggatctggacacacctggaaatagatgaccactgcaaagacaaagatggtggcgatgagattcatgaggttgggaagattctggcggtagaacgcctcccgaagggctcggaccttgtctgtgcgtgtggccagcagatggaaaagtgcgatgatagcaccttcaaattccattcctgttggcagaggaggagacaaatatgaaggaacgaacaggcaactcaatttgcttctagccttcttagcagacaaataaaaagaggaaaacaaacttaagttattagactcatggtgcccatagccacagggatacagcatgtattattctcatccctcccttctcttctgtagagaattcaaactacagaaacgggctattctggtttgtttttgattttttttagacagggtccctctctctcggctgcctaggctagagtgcagtggtgtggtcgcagctcactgcagcctcaaccttctcctcctgggctcaagtgatcctatctcagacttccgaatagctgggactataggcatgctaccacgcctggctaattttttattttttatttttgtacagttggggtctcactatgttacccagtctggtctcgaactcctgacctcaagcaatcctcccgcctcaccctcccaaagtgttgggattacaggtgtgagccacagcacccaaccactattccactttttaaaattaattggtctcatttcttaggcacatgagtcagtggccaccagaggtgtggaacgatgataatttataaaaataaaagcagactctgctgaactctagctgaaaggggtcatccactgaagagggggctcagagctggcaaatctactttcctggacaatcttgagaagtacaagtacccattcaacagctatgaagtgcaggctgcccttggctggtgagtggggaggctccagctctctgcttctcacaccaaggatacaagtacagaggatatgcttgcgtccaccatgtggtcccatccaaatgacaccctgccaggagatgctcctgagggaggcaggcctaggggtggagtgagcttactgagggactgagggatataggaaagggacccaatctaagaaccagacaacagagtaacaagtgagaggaaggcggggagtgtggtgcattattaaggcctaagttttagacatcagcaagaaatttacttacgttaaaaaactaaaaagcgaaagaaagaaacaagtgataacctctgccgttccaggacagcataaccatcccataatggaagcctggcaactcacgctgcttctactggcaggaagctggcattacttccagagacagggtctctgtgggcagtgtggggtcatggtatcggtactctgaggagcacttttaaaaaagtcaaataggagtcgggcgtggtggctcacgcctgtaatcccagcactttgggagactgaggcgggcggatcacaaggtcaggagttcaagaccagcctggccaagatggtgaaaccctgtctctactaataatacaaaaaaattagccgaacatggtggcgggcgcctgtaatcccatactcaggaggctgaggcagagaactgcttgaacccgggaggcggaggttgcagtgagccgagatggcgccaatgcactccagcctgggtgacagagcaagactccgtctcaacaacaacaaaaagtcaaatagggactgtatttgatggccactttggagtacaattaattttacatgacagattaaataggaaagctgaaactgaaggtcagactgtacttagaggacccatctagtactgtggaacttgtcaaatgtgtccattcccttgtgcctaacagtgaaatagagtgagatgtaagaaatgaagacaccctacaaaaaggaaagcttctattcaaccaaaataacttggtagctgagggaatgggaagagtaaccaaactgatggtatgtggggtttgccttttaaaagcacattaaataaaaacttgagaagggatcactttaacccaaaggtaataattctgtcctctggacccagatctggatggtgagcctagagaggtggcccaaatctgtagttcagctcaggagccatccagaccccaagtgcctgacattgagtttgggtgctgcaggtgtgacatctccagattgtgtctctggatgctgtcaggagtaggttctgctccctgattttcctttcatagaacaaatcttccaactttcacttttactcctcccatgactaaaaagcaagtgaatctaggaaaaggtgaaactaaagaactcaaaagcactgttcccaagtttctaacacgtgatagctaggaccacctgctacatcttcctggaccattccgagatgacatgtcaggcagaccatctaaccaatatgaccactgacctcctctgctgtggcttctgtgaaagagacaccatatcctaactggccatcatgtcctcatctcaccctgtggcggtctttcgtcaattcccatcctttccaccttttggtcctgtgtgacaaggctggcctgtttccccacggtttcaaatttgggactaattcccagttctgcattgttcctgctgcccagggaagcagcagtgattactgtctctgcctgtagaatctcattcaacagcctcccctgtcccaagccaagctgcaacatctccaggcacagctgcaaagctgccgtcccagctgtgccctctgtgtggctctccctgcccctccctaggctctccctctagcaccactcactgcccacatgcaggccatggggcacagcccttcctgaatgcatctcgtgtcagccaggtcccaaacatgagcaactgacatgtagacacactgacttcaaggccagacaaatccacctttgcttcttagttttcccccaccttgaaagtgcctctctggtcccctctctcaacttgcttcctccaaatgccctcacacagtgctctcctgtaggatggcttaattggggctggattactgctgcacgcacctagctgctctctctgcctttcagtgcagagcaaatcacttcttccaaactctggctcccattactcaatgccctgctgcagaatggaacatgagcctctggcggctactactgggctgctaagccaccaggggctcccctctgactttacttccttcccactcaggcactccccaaaagccagtcaccatgatggtcttgacaaatacctgaactcctacaatgccatccccctcttgccttttcacatcctgtcaaactttgccttctggacctgcttctcccaatttaccttggatttcctaaatttatacaaagtactcaaggaagcatcaaatgtgatcttgcccactcttctctatggctccctayctcaagctccactctcctttgtaacctgttaggcacatgcagccttcacttgtttggggaccagttttccatctcattaatgagataatatggtctctggaggccaaggactctgtttccaacattcaattaaaagaaaactctcaaatatgcatgattatttctcctggaatgctcctcagtgaagaagatatttagtgccaaaaaatgtttatttcctttccctaataagtcacactctctaaggcttcccttgtatgttttgaactttttattaaaaacatgctgttacaagatttccacggcacttggtggatgtagcacagcatgccaatgtttgatacacatctaccaggagccaggcatcatgtaatttcatgttgcttctcaytgcatcctggtaaccaagattcagtggtgcaggaatctgcccaaagccacgtatgtatgactaacaggaacagccaggatttgaacgcaggtgctaagctccaagttcaggcctttttcagaaagctgccccttgcaygaccaagtgctttggtttaggaatttcatttttagaaacttattcactgagagcagctgccaaaatatacaaagatgaacatatgaggacagtcatggtttcaatgttaacgataaaaaaacctggaaatgacttaacgttgctttatcgttgcaatataagcttatactgtgctaagaaaagtgaggcaggattgtgtattctgacgtgccaaacgtccaggagatatttttatatgaaaagtgcaagtgaggtatcatcataattacaagcctatttgtgtttttaaaactttgcagatggacccaaaaaccagaagagataaacctaaaactgacattatttttctgtggaatggggggatttttgtcttctgctttgcattgctcaattgtttttgctgaaagctgtcgccaccaggggagcacagggcccttacctcggccagtgttgacagtagtggggctgaatgccttccatacgatggtttcacagatgttagttgcaatgaagagagaaataccagagccaaggccatatcctttttgcaggagttcatccaaaagtaggacaattaagccagcaacaaagagctgtaaaaattcaaaaatacaagactatgtgttactgctccccatggacatggttccgtccttcagtaattgggttctctgatataaacgctgaagacggaatgagatcacatcctcagccccagagagcagtcagtaaagcctttctctgctgaattcagagggctaacccagagtcttaggcttctgcttcctttcagtaggagttccttttaggtgtgcttgagattcgttatgtgagaattgtaggtaagtgtgaggggctactcaaagggagatgttagcataataattacctgaatggtgattagcaggcaaattccagcacccatttcagaagggtccccatacatcccggtcatcacatacacgatagactggccgatagtaatgatcatgccaaatactagaattgaaagaaagaagtgttttccaagtgggtcactacacagaacaaaagaaacaattaagaaacaccaattcaacgccaggcacgggggagaacaaagatgaagagcagtgatactacctccaaggggctcggctgagaacgcgctaaaccatcacatcagcaaagtacatgatgaatcaaaagccttttaacaaaagcacacttcttctttagttttaccttttcctagattcacttgctttttagtcatgggaggagtaaaagtgaaacttggaaaatttgttctattcaaagaaaatcagggagtagaacctactcctgacagcatccggagacacaatctggagatgtcacacctgcagcacccaaactcaatgtcaggcacttggggtctcgatggctcaagagctgaactacagatttgggccacctctctaggctcaccatccaggtctgggtccagaggacagaattattagctctggggtaaagtgatcccttctcaagtttttatttaatgtgcttttaaaaggaaaaccccacgtaccattgatttggctgctcttcccattcccttaggtaccaagctattttggtctaatagaagctttccttttttttttttttgagacggagtctctgtcgcccaggctggagtacggtggcatgatcttggctcactgcaacctccacctcccaggttcaagcgattttcctgcctcagcctctggagtagctaggattacaggcacgtgccaccacagccagctaattttttgtatttttagtgtagacagggtttcactgtgttagccaggatggtctccaactcctgacctcgtgatccacccacctcagcctcccaaagtgctgggattacagacgtgagccacgcctggcaaaagctttcctttttgtagggtgtcttcatttcttacaactcactctatttcactgttaggcacaagggaatggacacatttgacaagttccacagtactagatgggtcctctaagtacagtctgaccttcagtttcagctttcctatttaatctgtcatgtaaaattaattttactccaaagtggccatcaaatacagtccctatttgactttttaaaaagtgctccacaacaattagttcttaatgcaggaaaacattcaaaacattgtgaagaccaaagagaaaaca

SEQ ID NO: 95935 - DNA, 58244 bp, Homo sapiens
aaaaagcactaaacattgaaagaaaatattggttaactatgttgaaaatactgacctagccaaagatgaagtcattgatatttggataaaaatttgactacaactgaaatttaactaaaaaattgtgatattctttgaaagaaatctgcctgtcttggccttgtaaagtgagctgtcgaaactttaattccagtcacaacaatatagtttgtgacttgggattgtcagcatttgtggccatccaaaaaaaaaaaaagatcaaaattcatcagatagccaacatgacacatattgctttgtcaaagatcacctcatagtttaattctcttattcaagctaagcaactactgctttcatattaatgtctttcaaaaataaaattttgcttacttaggcaaaattttaaatgtttttgttttttaatttactaataaagaatgtatatattactatatcacaaattttaaaaatattttgataactttatttcactatacctagctttccttgtaattcaacttatttcattttatgcatttgagaatattattctaaaaagggcccataggcttcactggattgtaaaaagagccattgcacagaaaacctaagtacctctgagctcaaaaggatgtgttatcgtagaaaacagtatggcctggccactcacagtttttctgaaaagcaagttggaatagcagtgaatctttgaaagtgacagcaatgtgcccttcaagtgttggaattatcatgggcaatctcatgagattgctgacaatctgagtttctcatcatagcaactggaaaaccacttgctgcttgttttataacagataacttcatcatcttattagcagtgatttaggttgggaagctgcctacattcttgtttgtgaccctgatgggaggtaacctcaaatatcaaattagtcatttctctaaggatcctggttcccgttagtggaaaataatattactatagtagtgagcattaagctgtgtcatggggtcacattgctcttgagctttttctttcttttttttttttctttttgagatggagtctcactctgttgcgcaggctggagtgcagtggcgcgatctcagctcactgcaacctctgcctccggggttcaaccaatacccttacctcagcctcccaaatagctgggattacaggcgcccaccaccatgcccagctagtttttgtatttttactagagatggggtttcaccatattggtcaggctggtctcaaactcctgacctcaggtgatccacccgcctcagcctctcaaagtgctgggattacaggcgtaagccaccgtgcccagccactcttgggctacttcaatggaagagctaaaccgtttttcttataaaggaagtagtttatattgatatttacaatctagctggagcaggtccatgctcctactaaaattcttaacttcctttgaactgagtatcttttactaatcctcttcctgaagaaagtaatatagttgtttatgcttttcccataatttaagttaaaaaaaatacaatatccatggaaatatcaattcttaatatagttgaaaacttttcctttaattcttcttggttttagaaggtagctaatttggtgggatctaacaaagtgatgtaatttaatcctttggactcaggatccagcaatatggaactacacaacagagtagaaggggattggaaagcaataatggtattttaaaagtcatctacccagggacagagaggatctgccccaggaaactcccaggtcctgctgcctatgggaaggaagcatcccacatggaggagagagactcagactccatgttgcttctgggaatctggtgggagggaggaagtccactgcgtgaagggaccaagktctaatggggaaggggagaaagattctgcttgtacttctgctgtgagcagctgagtagtagattgtgacagagaagccgcacattgaacctctgtcgtcccagagtgctggagaaagaggcatgtctgagcttagatgtcagagtcagtgactgtgcaagaggccagtttcctcatcccctgtgcattctatgtgcagcctctgaaaacatacattctgtgtcctggattgactcgaatctaaaccactcttattatttgtggcttattaaagaggccaatatagactgatggtcctcctatggccacaaagagatcacggcaaagttgcaagaaaggattctgagcttttgtagccttctcagaagtccccagaccaagaactactccttgggcataacaggtggcagacagcaagaggtaaaccttttgagtggacagagagcctttatgtgaaatagagttacaaatataaaaagacaaaaaaaaatcctgcccacttgtggaactttgagcaattaatttaacatgttgaagctccattttattacccataaaaggagaatgatattgcagcattatcacaatagtcaagctttggaatccacctaactgtccatcaatggatgaatggataaagcaaaaatgtggagagtagaatggtggttaccaggggctgcctgaagggttactggagaggctgatcaaagaatataaaatttcagctagataggaagaatagattcaagagatttactgtataatttggtgactatagttaataacaatgtattgcatacttgaaaatcactatgtgagtagattttaagcgttctcaccacagaaaaagtgggggtggggagcagataataatatttacccttcatgcttttgtgaagacttaacaatgtaacctgagtattggaattcaattgtgctcaaaacctgactgccacttacttggacatgaatgatcttaagcaaattattcagccaggttaaatatcacattaagttttcttaccaataagatgaaatattaatagtcatttaacagcataatccaaatgtgccaggatgcctatgacaaggtccctctgttttctttcttttttttcttttttgagacagagttttgctcttgttgcccaggctggagtgcaatggcgtgatctcagctcactgcaacctctgcctccaagggttcaagagattctcctgcctcagcctcccaagtagctaggactccaggcgcccgccaccacacctggctaattttgtgtatttttagtagacatggggtttcaccatattggccaggctggtttcaaactcctgacttcaggtcatccacccgcctcggcctcccgaagtgctgggattacaggtgtgagccaccgcgcctggccggtccctgttttcaccccgcattcacctaaaagcaggtctcagatttttaattcagcccacctaaataaatctatctcagcaaatttaaagaaaaattgatattttattaaagactttgtgataagatataaaataggttctcatcacaaaagaaacttaaatatatattatccattagatagctccagtggtgtgctggtaaatgttcaacaactgactcttaaagaaaaacgcatgcatttatatacatacatatttattataaatttttctgatataaaagattgttacacacaatttactatttgtaaattttactattggttcctacagactgctttcattgatttttgcagaacttttgcaatccatagccaacctatggttccggctgaactgatttgacaaatggagttatatacccatttattttctaataaatcaataacgtattgttattggatgtaatatgtaatctattattaaagtatttgtcaccctattatataatgagtgtagtacaggctatagtcattaaattaaaacctagttttagcactagatatattgttcatcaatgatgtgagtgagatttttcctgagtcagaaaatagttttctaatatgtactgaaataatattttctcaatttggggggctattcccaatgtaatggatattagcaccacacacttttaagtttattctgcattattttgacattttcttcattactttcttaagtctaatcaactgatgaaacaataaataaagccctgatttgtatgtaaatttttgcctgtatatttttctttcctcatggacttgggaaattttctatgatcctcatggctttgcagctacttactgtatgcaccctcaccttgtttgcagcattatcagctccaggacagccgaaatccttcttggttctttcatactatcgcccactgtgtctaaagtagattttaagttagtgttacttgaattgcaagtactactaccactgaagcagcaactctgtttccattgcttggggagaagaccaaaaacacacattaaacacctggagaaaaaaagtaaaaccacattaaagtgagattgtaggaactgaccagaaatttagaaaagagaaaaactcactgctgtgtgaagaagtcaaaggaacttcatgttgacttgaacaagaaattaaaggaaccccgggccttggcctaaggacagactggaaatggtggtttggagagaagaaatgaggacaaagggaatgtgtgaggaacagtggaaggtaaagttggctggataaaatgagacttcaaaatgccagtttgcgaagcttgaacttggtgcaataaacaatcaaaggccattttagatgtatatgaaaacaaatggcatggaaatgatattgaagcagaaatctggtagcatccccagaacaggaatttcagaaactattgcagtggcttaggtttaaaagacaagaaacaacaaatgatcagttccccagtgatcagtgataggtcatgttgataccgtgtacccacagataccaggcaatgagaaaggcacataatctctgtagcattcttcctaaacatccacagcttcagtccaatcatgagaaaacatcagacaaacccaaactgagggatagtatacagaaaccagtactgttcaaaagtgtcaaggtttttgaagacaactgactgagaaactgtcacagattagaggaggctaagaacacaggaaaactaactgcaatatggtatcctgaattgggtcctggaatagaaaacggacattagtggaacagttggtgaaattaaaataaaatcagtaacacagttaatagtttcgtatcactgttaagtttttagtttcattggttatataagctgttaacataaggcaatatgggtgatgggtatgtgggaactccctttattacctttgcaacttttctgtaagtctaaaatcattctttttttaagttaaaacagcaaaactaccagttcttttacctgcttctagcaggtgctcaaagagggacagagcaaaaccttgcaaagcatgacattagagggtgtcccagaagcaagggtcttctgtagccccaggcactgctgctcccaaactgcatggcctttcttggcaaatgatttacaatctccgaacctcaggtcaatgtcttaaaaacgggcacagaatgtcttttcaacaaatggtactaagaaaactggatatccacatgaaaaagagtaaatgtggactcataccacatatgaaaattaactcaaaatggattaaaggtctaagagtttaaattataaaactcttaggagaaaacatagaggaaaatcttcctaacattgtatttggctatgacttcactgcgacaccgaaagcacacgcgacaaaataaaaataaaataaaataaaataagaccagaaaagcaaagaagggcagcatcccttcccgtcctgatagctgccggattttaccccaatcgtgtttctgcttccaggagctgtccgcgcgtcgcctctgttttatcactaaggttttaattgtgaataaacgaggaactggattcgaatgatttcttagtttctgagatttttttgtctaagcatcgtagacttcgtgcgttctcaacccaacaggaagcgtcacatctcagtgagcttcggctctcacagcccgaaactgcaaggagctcctctgcccggcctctctttactcctcctctctgcccctcagctcgctcatctttcttcccgccccctctcttttccttctttggttctttgaartgatgagctagcgcaaccacaaaccatacattccttttgtagaaaaacccgtgcctcgaatgaggcgagactcagagaggacccasgcgcggggcggacccctccaattccttcctcgcgcccccgaaagagcggcgcaccagcagccgaactgccggcgcccaggctccctggtccggccgggatgcggccggtacccgctccccgccgggaacaacctctccactcttcctgcagggagctggtgccagccgacagccgcgccagggccgctccgggtaccagggtcggatcgggtgacgtcgcgaacttgcgcctggccgccaagccggcctccaggctgaagaaggacccgccccggccttgacccgggccccgcccctccagccggggcaccgagccccggccctagctgctcgcccctactcgccggcactcgcccggctcgcccgctttcgcacccagttcacgcgccacagctatgtgtccccgagccgcgcgggcgcccgcgacgctactcctcgccctgggcgcggtgctgtggcctgcggctggcgcctgggagcttacgattttgcacaccaacgacgtgcacagccggctggagcagaccagcgaggactccagcaagtgcgtcaacgccagccgctgcatgggtggcgtggctcggctcttcaccaaggttcagcagatccgccgcgccgaacccaacgtgctgctgctggacgccggcgaccagtaccagggcactatctggttcaccgtgtacaagggcgccgaggtggcgcacttcatgaacgccctgcgctacgatgccatggtaagacccgagyccgcgcccgggatagtagtcccggactgagagaggagccgggctggaaaagcagcggatggcagagtgtggcaagcctaggtccagggcgcggagagatgtggggataaagtgagactccggccagtgtgccagctggatgcatagaagtcccttggacgattcgtcttaaacggacgttattgcgcccccactatgagatgggagtatttagaggagcaggacccagtcctgcctgcgaggggcttaaggtggggtgcgtagaagcactgacagttatccagagctagggactgaatcggatccctcacgcagctctcatttactgctagatctttcaaagaatgctttatctcaatctagatctttcgaaaaatgctttatctcaatcttattgaaagggaaaccgcgtcgaagaagctgaataaattaacaggcaccatccccgcaaaaagggagacgtgataagaatggacaccagatctctttgacccyggagcttgagagtaattaagctcacagctttggggtagattctctgttcaattaccttctatgtgaccttgagcaagttatttactctttcttgcctcagttctatcctgtataaaaataaggattataattgtacatagtgcacatagtgtggtctctatattattaccagacacatagtgtggtgtctatatatgttgttattaccagacactataatatagggttaagaaaaggaaagaaagaaagaaagrgaaagaaagaaagaaacttcagagagagccaaaatgtggaaagacttgggtttcaaaggatttcaataaagtaggtttggcggcagagatttaggaagagtccaacttaagagataatgggctcttaaaacatgtgcaaaagtttagttcaaagtcccaaatgttaggttaaaggtaatgccttttctattgcactaaattctagaaagggagcagaggtggttgcacagtaataaataagtacaaccaagatgtatatatggtggttaaaaaaaaaataaaaccaccacccaaatttaaccctgtgtaaargccttgagtaaagggattcagcaagactgtggagaaacttgggagaagaaaaaagagctttggaagaggaagaactgagaaatctccagagaaacgtccagagaaatctgtgaagtccacaagtgtggaagggaaagggaagtgtgattaggctgggatacagaaggctaacagtacactttatatgagaagagcttagaggtcaggagagcacaatgctgaggggtttgtttggttttattttcccctctggaaacttggagaaaggaggacaggaaaagatgataagagggcaccattgtttggttttaaaggtccctccccaaccccccacaacaagaaagctcattttaatgagatgagagaaggggagaaagctccctccgttctgatgcttttgagcttatcagggacaccctgcagcagaaattccagctgatccttcagccttcagagttgatgaggtggggctcacacacatctggatttgaagaagaatcgtgggtttcaagaactctgtggtctcttaagcattggtattccacagctacacttccctgatactttgcactcagtaatgacaaaataaatatttgtagaattgagttgttgctaccctgtgtctccacttcctcccagaagggtagaataaacttacatgtgtttgttttattttgcatataaaccacgactttgtaaactttactttttgtgacactcttttctccacaattgtgtgaaccctttttagtggaaaaataagaatgaagaattcctagttttccctaataatatttccctcttgtaagtctagttgagctcctggtgttaatcatggtatcaaatgtttatgacaggacatctaggtgaggcctgagtaaactgctgtaagttacagcctatctcttctgtgtttgttcagaatcctttttgttggatgaaattactttctttcaaattttgctcaagaaaattgaattgggttctgaggaaaaataggctacttacgtaatgttggcagggggtaaagattgggagcggatcacatggcaaggttagatggctgtgtcctcaggacttactctgtgcagtttgggggtgtgtcaaacatgatttgacgtgcataaaatcccagttctgtagtgctaaagcatgtgctaaagctctgctgtactccagtattgcacagatgtttcactgtcaattgtttatattatactaaccctcagagaatttattgctgttgtggtataaacgttcctccactgtaaccactcaccgcatattgattcctaggacactggggattcaaatcagggtggaaaacagttgtggaggggcatctccagtttcctggagactggacctagttcaaaggagccacataaaaggactgaagcatatggaggacaaagaggaatttcctagaatccagctaaaacacaggagtcccctcgagcaggaacttccaaggaggtgtacactttctagacctactggagtaatcctgattgctgtagaggacccagggcaatcctggagaccccctggaaccactactaggcagaaaactgggaagaggatggcaaaactctccagttagtgtagctgtctcagtggaaggactgttgtcccctgaggcacgaggaagacagcatggaagcactgacagtatgcgcttggcctggttactttctctgagcttcatgttccttagctgtaaaacaggagtgataacccccatcttgcagaggttttgtgaggaatacatgagataatccctgctggtgctcactgaaagtgagtttcatgtgccctgggtggggaggaggggaattgtgaggaagggaaggtttgggttgtgcatcagattatctgattctcacagcctggcacagtctaccacctgcctgccctctaccatcttacctaagtaccattgmctaaactatttttgytatagttactcattgagcagacttatgaaatctccccacagcacaaaactgaaggtatccacctccagaggtgagattctcaccaagacaggctgtggggaaggtagctttgagcaggtctctagggtcccctagaaaggtgccttttctctgcttggctgctgcttctgaggccctggctgctgagcccacttcctgcccataaggctgcagccttagccctagccaattgctcctaaatgggggaggcagcagccagggtgggaaccatggcccccgcctttaactcacccaggggacaggttagtcagatagatggtcctttgttcgccaccctccacctcccacatagacaacattctaatgtgtttgatggactgcatatagttttgtttctacatgcactttcaaaacctttgtgtgcttatattttataatggcatacccagtcctgttatttagccctttctgtttcttacttttgtcctgaacttattgtttttatgatttgtccatgttgccctagatgcccttatacctatacatcactgtgaattgtgctctgtgtattttacccatctccacgtattttacccatctgctccctggctgatgggtttggagatggcgtctaacaccctgcctccacaaataatgctgctccagatatcttcctggatggtctcaccagatgatttctacccaggagcagaattgctggccacagggcatactttgagtactacaagactggtttcctcaatgactgacatcctccattctcttccacctactcccatccccaaacaggacatgtaaatttctatattttacctatatatcatggcagtatccagctttattgtaggtgtaaaatacacattgctgctttatcatgtacttttctaataactagtgagtttggacattttttgatatgtttgttaactttttaagcttcctcttctctaattgcttattcatattctttggtattttttaaattgggttagctttatattttttgactttcaggagttataggttttgatctgtgatcaattttagacattgcaaatatattatgatgatattaggtctattaattttgtccatggtatctttcattgaacagaaattcttcatttcttgtaattgaattaatctttttttccttgtggcttgtgcttttgaaagtttgcctaatagtttgctaatttaaagcttatcacctttaacactcctcactggaaattcagagatcaccacggttctctctgccttttaagagataaatctacaatctgtggctatgcaattcacttctcagcatcaccagttcctcatctataaaatagaagtttgaaccagcttacctctgaggtcccatacatatttgaacaactggagccctacagtgaaatgttttgattcagtgaagggacaggaggatggggcaaaggtgtagaggcaggaatctacacaatggaccaggttggaccagagtgaggtagcaggaatcatggcagaagaggttgtgtaaactctaaaggccacctgagaagtttgagttatgttgccatgggcagccatgtggtttctgcgtagaagaccactgtggtataataaaaaataaatatttggtccttgtccccagtacctgtcacagagttcctaaaaccctagaaatttcctaagtaatagaaatgtcctttgtgattcataataaaccccatgataatacctgggtttatgctcctgcagacttagggtgagatccctagatagcttcaagatggaaccagtcaccagcaagtccaagagattaggggatcaaagagttggaactttcggtaccacccaccaaagtccaggaaaggagggtgggactggagattcagctctacaaaaactcttgaacaagatgtgaggagctttttagttgctgagcatttggaggttcctggagggtgcacacccaggtagggcatgaaagctccgcattgcccccatatcttggcctatccattcttcacttggctgttcatctatatcctttgtatagcctttataataaaccaatgagtgagttctgtaagctgtcctagcaagttaattgaagccaaggaggaagtaatggaaacccctgatttatagccattcagccagaagcacaacctcaggcttgtgatcagcctgaagtcagggcagtcttgtaggattgagcccttaacctatgggatctgacaatgtcttgagatagtatcagaattgaattcaattataggacactcagtttgtgttttctggagwactgtttggtgtctgggggaaatcccacacacatctggtcacagaagtattctgtgttcagtgtgacagtagaaaaagcagtttgtgtgtrtgtgtgtgtttgtgcttttgtatgctaatgagatgatctatggctgggggcccttagatagcttcgggaagggggctggtcgccagaaagactaatttatgactagagggttagaactttcagccctacctctcccacttctagagggtagatgggctacagattgagttyggtctccaacagccagtgaattaatcaatcatgccttcacgataaaccttcatgaagacccctaaacaaccagattcagagagcttccaagttggtgaacatattgaggtgctgggaaggtggtgcacatggagtgggcatggaagctttgcccatccactcccatgccttgccctgtgcatctcttcacttgcttgttccctagtcgtatgctttataataagccagtaaagtgctttccaagttctgtgactcgttctagccaattatcaatcccaaggatagggtcatgggaacctccaatttataactagttggttgggaatacaggtggcccaggactctcgactggtgtctgaagtgggggcagtcttgtgcatttgagccttctcacttgtgggatctgatgctaagtccaggtagagaatgtcagaatgcatctgaattgttggacaccaagttggtgtccacacagaattggggaattggttgatgtgaggaaaaaccctcccagctacatagggaaatcacggttttggaagatgagcagaaaagggtgggagggagaagacaagagagaagagggtgaggaaagaggccaggcagcagtccaagtgtgagatgataacacctgaactctggtaattgaggagaccaaatccacgggaaccagctgcaaaaggcattctgtctggtaggtatagggctaagggagtaaacgtgggggtgagactgggatcaagtccccttcctaccacttagaatctgtggactgggagcaggttatttaatctcatgaaacctccatttccacatgtgtgaggtatgtgattgttgtctccacccctagggtgctgtggggtttacaagagatagtagtgcacataatgtgcttagcacagggccagcccctagtaagtgccggctgtacttgccttctctttgcaggggtggctcaggagagggtgtaatcaaaagatgattatgagggttcaagcaccaggcaatgggagagtcagcaggttttaatgcttccacacagaggctggattcttctacttccgcttaccgctgacagctgaggcctgctacctcaagccctgaaatgcagtctgaagacttttcctggacttactgggcaccattggactgtacagggctgtggcagacaggagcagtggaaagagatttggatgggacgtcagaacacccagattttacttcttggctcttccacttaytagctgtgtgaatttggcagtggtttccttatctataaaatgggggaattggagagggtggtctactgcatgttacttctcagcacctcagctcctccccacccctctctcttgcttctaatctgcctacatcacttggtttgtctctggacaagtctaagtttgcatgacaactctctaatttctccttcacagttatttatttattttttggcagctatttccttgtggagagatagcgtaggtctttcaggtgcttccatttggccactgtttgcaggtgaagaggtttccaggatgctcgcgggatgttactctggtagtaacagaaatgatggcctggggaatgggaagagtatgagcccagttttgagcctgagtctttggggctcatttattcattcaatctgcaaatcttcattcagcattactacatgccaggctctctgctaagtgctgaggatagcgatcaggacctgctagggtgaaaattactcttcagaagatagcagagtggataatggccattcgagttcctcttaactacacagagggactgggtaagatctataaaggagagaggttaaacagcaaagcaaaagtgactgaaattctaacacccatgcatggggattcttgagctaaagatctggtctgtagaagaagacacatcagaccctcatatttagcatctaagccgaaatcagcagtaagcatgtttcttctcccataaaaacttgtccctaagaagagagacaagtgcttacaaggactcttatgttaaaggaaactgtcacaattactttatcttcagtcatgaagcctttcttgaggaaagaaaaattagcaatactagtttgggaarcttgaaagagagattctgtttgcaatgacacttttaaaaaggcaacaacaaccaaaaaagtaattattcctaaagctcaggtgtcagaagttgtgaatgtctagggggttgtggatccccaacctcagagacaggaacagcaccactcccatcctggggctgtggcctcaggcctctgcttcctctttttcagtctaaattccagagcagagaggtgctggatgaccagcttcaggcaggggagggaggaagtaaaggtagtttctcagctcatcttgtcctcgtactattaatagcatctgttgttttcttaactgaaaattggagagaaccaaacaaatcaacatcatattggcggctttctgcacatcactcacaaatacatctgaatgctctgtactctccagtgtttattttcctcagccacataatcggaatttgaacattcttttgacacttcttttccctcacttgaataattagttctatatataatccaaatattagctggagccctctagcccctcagagatatagttgaaccttcctggacctcaattagttgggcagttaattctgaatgttgatgtgcctattttgcacgtatggagagtttgtacgtcccccctccccaaacaagtagaatgctgtctatttggtacttgctcattcatacattctttcaacaaccaaacccagttgcagctgggttgaaccccagggtgtttcctgctattcagtgtgatgccacattcacctgctgtggccaacattccttggcccaggactgcagggatggaagccaacccaacatcagaagtgggcaacaatgccagaaacctatcaaccaaaacaaatgtaatttgtaatcctccctggatgatgttgagtgattggcaactgagccccgtcatatagtaaatcaggctgtctctctttaaaaaagagagacagagagagagagagtctcccaatgttgcctaggctggtctcaaactcctgggctcaagcaatcatcccttcttgcctcccaaaatgctgggattacaggcatgagccaccatgcccagcctaggctgtctctttagctcttcaattatagggcttcctgcaacctcagcccttaacgaatgagctagcgtgtaagtgactagctaaataaatgtgctgcaaacctctgacaaatggctttttgacattattaaaatttatttatgtggaacaaaaaaattcttttcttctgcatcatgcatcctacactgcttttaaagaaactctgctatcctttgttttaccgtctaacatttctttgtttcccttctgacatgtttcagcctcttgtcatcacttggaacatttttactgcctcatccctctagtttccatttcctagcctagcccagcccagtatttttgaaacccaaatacctggaattttgcctgatgtttaaagccaaaaccaaatgaaaatgtgaagaaccaaaggagattttattcttctgtgactcaaaatcctgttgttattgttaaatgaaccctgtgggatacagtctggtatttttaacaccttctgggggtatttgtcaatatttacatttgatgtggatagcttataaaagtccagtggctttgggtaaaccctgttcactaagaataagacccagaaggtcatatgaatcaacgatcaaagaatgaagatattctgaatccaagtttcttgttttgattattaaaaataccttgcaattagttaggcatgagagaaagcttgtgtataaagtttggcttgtaattcacatgaattctctatacaggccaaaaactaccttccctttgggaatatacaatgaccttatttggaaattacttcaggtaattatgaagtaataatatctctattcatatgctaaaaagaattcaaaataacattcaattatcatctcttagaaactaaattaaacgggtactcacccaagttgaaatgcaaacaaatgcatgatatcattatgtgaccctcccctagcccttaccctgtccatggcagatgctaagaaaaacttgtccctaagaagagagaagtcaattgatttagtcagcctttcccactgtgtttggactgagcctcagaaccctccttatccccatactgcaaggagttactgtcaatcaactagagatggcgctcaagataaaattattttccatcctgtactaatataataataagcatggaatctatttattggttttttcacaacaataaaatatatctttagcaagtaacaaatggtagaggtaatacttttagataaagagggaagaatccttctgacttttctctttatcacattttacccacacacaatgtggatggaatctgcaactgaatttagcagtcacactgaaactctgctgcatgaccacactgtcctgaggccatgtgccaacttctatgtttttttttcccaaagctcttccaaggaagagctgccacttctccatttactcttttcacctgtaaatgaatgctgccgttggtattgagaaaatgggtgaatgaaagaaatcatgagaacactcctggggtgagagcaagaggaatgaaaacacgtggtgtgagagcaggtcagagatggtggttaacacaggaaccaggatggaggcctcagacttgaccctggcctgcaggacgttggcctgcattgtctgcaggaggaaacacagaggtcagtggatatcctgcggtcttccattaaggcctcttactattctggaacattttatttttatagagaaatctcccacttcctgatctccccagttagaattgattgatcaaagcagtccctctccctgttattaaataattaaataatatgcattagttgatccctataaccacttaaaatgtatctaacacaggagaaatctttggtaaatatttactgaatgaatgaacaaataaataattggagggagggagaaagagacagagttaaatcctgaggctggagtttttggtccttcagccccttatcccattgcccctggcagccccatccatgtgaccttgaattctgtccaagtctcatcactttctatgtgtgttgtaatggaaaaaaggttacaaaacacagtctttctggcctggagtaccaaaatagtaaagacttctgttttgaaagcctctgacaaatgaacacaacagccacagtgataactttagcaggaaattgaaccacaaaaagcaagcgagccacaaagccctgaaggctaaaaatgcctcacaggccaagaggcagttaggttgcacctgagacagaggctgctttcttaactgggaaatgggtgtctccagatatataaagctgtgaggagatcaccatggcccagctctgacgagccactggtacagcattgttggttagtttgcctcaacctgcagcagagtttttattccaagagttaacagttagttaggctttttccaaaggttgagatgacaccccaactcccacacccatttccgtcctgccccagcttgaaaccaggcaaagtgagttaagacattgggagatgggaggggacaggaggggtagaggcctggcacccctctctcttctgtttcaagagacactttgtggagttgtctagagagactgggggtaactgctccttctgcccccaatctccccttagctccccactcctccctatcctgccaggccaaccaccagcagagaagggcgcttagctccagtgacgctgtgagtgaggtacttgtgaggatgcatatggttcctgttggaaatgcacggaggagcagtgaaacaccagaagccccatcctctctcctgcccgtgccctcatgcccagccagctgaatattcctgtggcttccactcctgcactgtcccctcagtgtcacctccccaccacattcccacagccccacttgctgtgtcacctctcccctgagggagaggtgtcttcctgccagtctcttcaccaccaggctcacacaactcccatccrttcactgcaggctgccagactgagctttccaagcacccccggactgcctccagccctactttctcttcaaggcttcccacttccctcaaaatgaaagccctgactccttggacaccatacagaccctccctgatctcccagcgatgctcttagcagcatcatttttttttctgccagattttcaggtgccctcagttccaggagcaccaaatcacctggatgccatgagctgcttatgacacagttcaaggtgtgacatctttgaggtctctccataacacctctactgcagacgtctgtctctggtgtatcagctgtaccttgcacacatgtctctaaccatctgtccactgtgtctgtctgttcacacatcagattgaccctatgttctctgtgacaccaggtgagctctggcaccagtgcccagcagatgattactgaatgattaataaaactactcmctccacctgctgcttttaaatgggctccattttggtatgatttggtgygtgaaccattaaaacttttcagaagtcaggatttgaaacaaacttggtaaaaagtagttaagcaatgtcttcgttgtaaagtgagaaaccaagttgcttggaaacaggtgaaaagcttagccagcagcttcacaattcacagcctggcactccagtagccctctctggacaattgcccaggttttcttgttttcatttctgtgttttaatttacaagttacctttatatttctactaataccttactggcacttgtttgtgaatgaaacaatttttttgagagtttgttaattgttctgtgtgagtgtggaaagtttctttcatataagatcatcaattctttttttaaaaatagtgttttaggttttctcctacataaagaaagtggtgggggtgaggagctgggggtggaccagatgctcacattgtatttctatgattttgctgttggagatactgaagatcattttgctgggctttgctctcttaaattacagaaaagtgcatttggtgaagtttagtgtttttagtaaacatatacaagatgtcatagggatagaattagtgaaggaatagggttcgtgaatgaatgagctcaatcttagtaatgaaatgtttggaaagcaacagaacaagagagaaagagcatcagaacatgatttaggtaccccatacatttatacaaataaaaaaaagatctgatttagggtcatagaaatcacatacctaaactgatggttaaacaataagtggcaagtaacagtttagctacaaaaaatgtacaggaacacataaggaaagttacatgggaactttcagagaggaccaaaaaaggtggaataagattatctgctctgttatgatcccctgtatttctctgctctatgttcttctcttgggcagtcttttcctgagatgttttcatgttattaatcaaaaataatagaaacgaataaactagatcaatgcatttacaagattttttgagtgcctgcagtatgcctcggtgtggtgggaacttggtgtactgaggtgagtagcatgatcctgaagagcttaggaatcactgagttctcgtaagtgcaatagaagaaaaactggtagaaggaagtcaaatgaaaatacaagtttctaaagaaaataagtatttacaaaggaatttgtctgcattaatttctgtggaaaagttagctatgtatagaagaaagaaacttgttagtaattctttcattcattcatttattcattcaacagtgaatccctgccatggtagtactaactacttgcactgtggtagtgcaagggatacatttgctgtgcaagtagttaggaattttttttttttttttttttttttttagtgctttgtgtatgctaggctttatgcaaatatacagccaagcacagaggttaagaactttggaatcaaaccgaagtggttctagtcccagctcccccttacaaattgtgtgatcttcaacagttcatttaacttctctagatctcagattttctcatcagtaaaatgagtgcagtaagagtaccaccctcacagcatgaaatcagattttctgtactctttactaactcaytttccatgacgctggcatgtggcaagtgctgactcaatactggctcatttccttaactgcttttattttattcattcactgccattccagaggaaactgcggttctgagatgtgccctgggtcactgctgaggagcggacggagcctgggagggagctacccctgccttgtttcctcacactttatggggtgggtgtcaggaatgaggctggaggggaaggcaaaaccagatccctaagagccccctggaccctgcttagggtgtttacttctatcataaaggctgtgcttctgtagagacctaaggcagagagtgccaaggtcaggtttgcatttgagaaaagtttttctggcagcaatataaagaatagtttagcaaaagaaatgagaatagctggaaacccarttaggaggctgtggtagtccaggagcacactaaggcagcaacaataggtggatggaaactggagcatttaggtaagggagagggatgccagaggacgtgatggtgagggagagggaagagggtgggactccaccgcaccagggcttctggctttattgactgggtatatggtggcatcctgggccaagacagtgagtcacagggaagaggctttgagcctggtaagcttgggacacttttgagacattgggaggaaatgacacatggcagttgacatacagatctagacgtcaggagaaaagtcagggctggagattttcggtttacagttgaaggtatgagtaggaatgagatcatttactcagtccatcccaccacattgagcaccatgaatmaggggctcctctccccatggggcaagagaggtgaaaagacagtcaaagtcactactttcaggaggattaggctcaagttaggatggggaggtggagaaggcatcaaacaaataaatgaaaactataacttcagttattgccaagtgctaggaatataatgttgctgttaaactgcaaggtggctaacaagttggatagtctttcttgaagaactgtagaaacattcattaaaaacaaaataattttatagttaagcaagaaagtgattgtactataacaagggagacttatttcaccataggaaaaaaatcataacattctaagaatagaaggaaaaaataacaattacccaagcctgcaacaacctgtaagaccagatcagcttttaagaggaaagttaattagataacaggaagaggtaaaaatgagatcatcagagatgggggaaaaggcaaatttagaaattctgaatttaataggggagacaagtatgtaggaatataaacacattgtgctttctctgcacaaacacattcacatgaggatgtatacacaacccttgcaggcacaggtactcagtgaatgcctgcgtgccaaggagggggacagcactgagcaggagaggtggcagggcctggtggcccaggagcactcatatagtcaggagactgatataaaagaaagatcctgctaacatgccattacagagtatggaatgagcaaggaaggaagagggtgaggctgtaagagagtgcacaggccctcatttaaatggacgggtcaccagccagtacttcatgcctgttcctagatgacccacaaagtgaaacgaaactggatgtggtatttagcaagtctgagatttgctggtttaagtactaagttagcaaaccagccttggcagccagagcaggtagggtagggggcccaaggagatgggtgtatccaggaggccaatggaggaaggagaggaaggttttctgggaagccagctgacatgtcatgctttgtcagtggggcctctgcatggattccctccactcccccccagcccccaactcactacggggagctgcaaaatgacagacaatgggtggttttgtacccagcrgccactcctcaaccagtgaggaatgggagagagataagaaggtgggaaacaaggattgcttgtcaccatccctgctcctcctgaagccctgcgctgggagcaggtacagaacccgctgaaggtcacctaatcatttcaccatggagttcttccccagatgtgaaactgctgggactggagcaaagggtgcccagagctgactggaggaggaagccagagccacactggaacatatggagatgctagctcctgcctgctattgaggaacttcattttcccagaagaattagaggaccacaggagtgcttgggaagaagcaattgtggcaacctaggtgaatgatgacctaggaggtgaaatgaggaaggaggcctttggtctctgccaaccatacatttcaggttgccttttgctaaagtcctgctgatgttaatcattctctccagcagatcgcggcttgaatcatggggtctgaaatgtgggtttatgagagaaaaacaacatggaaaaattgggcagaggctggtaaatgtgaacattcaaacctgcccccaatctgagatggtgggacagtggacccctggccagctctccaggtgttgcgtatgcacattggcaaaccacctttattaggtggtgtgacacctgggtagcaattctcaagcaatgtgatgatctgaatgtccctgggcctgacccaggtgaggaggacacaaaatcatgcaatatgtctcatagagcttagtcagttttgagaaatactggactaatgttatgtttttaaagcacctaattctttttctctttyctgttttatctaggcrctgggaaatcatgaatttgataatggtgtggaaggactgatcgagccactcctcaaagaggccaaatttccaattctgagtgcaaacattaaagcaaaggggccactagcatctcaaatatcaggactttatttgccatataaagttcttcctgttggtgatgaagttgtgggaatcgttggatacacttccaaagaaaccccttttctctcaaatccaggtattttctacttttatagcactcaatgcttgaaaatagatgccctaaatcayagcttggcattatatttatggactgtagataaaagtaggaacaactgggtaaatagtgcactagaataacactgataaaagcaatctggtaaattctatgctgttgttccaaggtacttcttaaagagatgtcctcttctgctcagtgaacttctttgttgacaaaaacagtatctttgtctaattcagtgctttcaaaatgggaagaggagacaatgtatagccagtgctaaacagtacagtttcatttactagagaatgagagcctcaaaactcactgcccttctcctgtggagccatgagcacagagccagagttttacctcaatttaccttattgctccttttctaggatgattattacatgtccagctaactcacctttctcgcttttcattattcatctcgttttaatgacattcttgtatctgactttctgggaaatatatatagtggtcttatgatatatatggatatatataagtgtatgtatatacatttatagacatatatacacatatgtatatataatatatataatcttaagacacacacatacatatatgacacatatacatacatacatataagacacacacacatatataatcttaagacccttcaagaaactattttgaggcacttttataagaaaactttttggaatattttggcaatgagaacaaaaatgacattttctttaaattatccaaattaaatgtgtttccatatttgaagaaaaaaagggaaaataggagccagggttatctagaaacatgagttttcattaagaactaactgataaaggacatataattgacaattcaaaaatatatatttactgttgttgttgttataaaataaataagtccaggccattggaaacaacaacagaaaagtcagctgtgtttgctgagagcagcaagcgggtcctgcagctggcatagaggcagagctggaggcagggtggagcggctggggctggagtggtcagtgagaagagtgagagaacttgctaaagaaccccccaaccccaccctggggtcaggtttacttgctgaagaacctccttggtccccttgagagctgtgtaaaacatccctggggcacaggacattccagaagtgaggtcagagtcacaagctaggatgcaggctccatgaggacagaaacctctgctgtctcactattgcccaatgactgtgcacagtgcctggcatatgataagtcctcaggaagcattgctgggatgaatacatgagagcaggaagktataggggccacagtcacagaacagcagatagttccatttcctggagcatgggttctgactaggaaaagctagaaagttggatcagggctagattgtagggctgagaagttcaggtgtgatttggaggaaagcattgtctcttctttaaaaggcacccataaggaggtaggaggtgcaggtcttggtggaaaggcacagcagctccagaaatcaaactgccccagctgggactctgaccagccctttaccaggctgtaacagagaggggatcaaaagtgacactgctgtttccagcagctgctggaagagagggctgcattttgcagggcccagtgtkgggggaaagggatggggtggaatagaatgtttccaggagcactgcttcttccaagactacaggcccagcggcctggtgtgggttcttcctacagttctttgaccctaatcaagcccagttctcccagtcctagtggcctgggcacccacagggttataacctgtatttctagcacatttaatctaatttattttagctagatcattaaatacctgaaatacaactctcctcatgacatcttgaaatataagccatgctttgtatatatgggatgcctggtcctgtgaggtttctgatataatagaggaatacattcctttgtcctcagaggcatttctctgaattttttttccttcttggcagccataccttaagcaaaagatggtagcatactctcgacatttagtcattcccctgggtacctgtctgtgtgccaggcactgttttaggcaccagggatactgaccaaaaaaaaaaaagttgcccactggagcttacatattcagtgggggaatcaataaatgagtaaatggtttggtatgtcagaaggtgctaaggctgtggagaagaattaagcaggaggggaatggcaagtgcagcaggggggaaggtataccttgttgtttcaaagagatgctcaaggaaaggctcacatagaaggcaacatagcactgagggtcaacggggagccctgggcttcttggggcaaccaacaggaagcagattgtccttgatgttctcatratagacaacagtggcaaaactacaactcttgatttttcaacattgcctatgagttacagacagccttgcctgtccaacacatctgtgagctgctaattattaggttgtcattctggggcctccctggctatgatgtcagccatgaattatcttccatggtaatttgcacttgtggagttggctaatgttaaggattcaggagttcccctgctgaagcacacagacattcctaaacctcacagtggaacaagggatgcatttctaataatcttgttactctttggattagtacttttcaaactggagtttgcagactcctgcattttgaaagcttttaatgaaatgtcattctcccaccctccttcccttgtttagtgttagttcttagaaatcagtgtaagaacgtctggatctactggaggactccctagtcacagagtaccagacatgacttcagggcagcatgtctgtatttgcagtcatcttcatgccagtgatagccataaaacctcaaagcttcctcaaatgtggctaacagagccagttggaggaaccagttgccttgctgcacacagagaacctgggttgcacagtgagagccatgcttgactactgataacaaaaggctatcgtttgttaccactatgtgcagtaataagcacccagggaagaatgtacacaatcccagtgccagcaacatttagatgaggccctcatgattaacacagagctcaataatgctctaatgctggcattatttatatatttatatattttttgaggcagagtcttgctcttgttgcccaggctggagtgcagtggtatggtctcggctcattgcagcctccgcctggcaggttcaagacattctcctgcctcagccttccaagtacctggcatgtgcctccacgcctgaataatttttgtatttttagtagagacagggtttcgccattttgcctgggctggtctcaaactcctggcatcaagtgatctgcctgctgcagcctcccaaagtactgagattacaagcgtgagccactgtgcctggcctgctggcattaaagagaacatgacaaagttatcaactgccatattaaaataggcattcaaggactacttgctgacagttttaagtttgaacactgattatcccaagtttccaacgaacgtcttggagttgctaatactcttttgtgtatcatgcttacgtgcttaggcattttctgcattggtattgtggaagttgagatgtacaaatatataaaacaatatctgaagcctcctcacagtttgcaaccaagttcaagcaaaacaatatccacmaccttaaactaatacaacataaagtgaaygtaatgaggatattgatttgaatttttatttacttcttaggggttttgtatttaatgaataaatatgttttggttttactgactcttgagctttagtaaattaaggtgtttaacctttgcatgttaatatgtatattaagtaatataataaaaattgttaataartatccattttatttattttgttccttagggacaaatttagtgtttgaagatgaaatcactgcattacaacctgaagtagataagttaaaaactctaaatgtgaacaaaattattgcactgggacattcgggttttgaaatggataaactcatcgctcagaaagtgaggggtgtggacgtcgtggtgggaggacactccaacacatttctttacacaggtaattgtttcaaaaggattgcatgggccaggatgtccagataagcactgtgtctcttttgcctttgtaactgttattactctttttactgctatttaatatgtaatgtatattatatgatctataatatatatgtaatatacattaaatgggaacatgtgcaaatcttacaaacattactaagaatttattgatttcatgattataagtcaattccatatatttatgtatataataaatatataagacataaaatatgtataaaacatatatataccatacatatgaaaaacaaaaagactattgagccccaaccaagtcatttatgatagattcttatcaaaaagcaacatgtcatataaaaactttaagcataaacaaaataatgtaaataaggacctttataactcaaggtggatttgatttgtaggttgcacaggtagcagaggctggacctcgagtgtgagtcctaactctgctgcagactaggaatataagtatcctggaagccacatgaccctgggtcctcaggagagcatgcactcttcctacccactacctgactacccccaccactctctttttttctctctcaaattggtgttaagtagttttcatcagaataactcttttatgatttttccactttaaacctataatgtcccaaaacttttgaatctggttccacctttcccacttcccccaccttgcactgcatagatctttgaagtattcccaaggaaaggaagaagaggctggtaaacagttcttctatcagcattcgcaargaaggctttggcgtgggaacagccctccccttgaagaggctcctgcttctaccatccttatgtgggctgtcaaagaccatgctattttgataaaagcgaaactcaaaataccccaaacaataagtaggaaatacccaaaaacattaaaagggattatcactaagaaagtaatttttattttctttctagtactttggagtattttcaaataatgaatgcatgttacttttgcaatcggaaagcaaaatataaattataaaaaggaaagaaacacaatattgggtcaaaagtccccattcctaattcacttgaatgactttgagcaggtcacttagcacctctgaatctgctagcttagcttcaaaataggggatgatcatgctcaaagttccacgttactgtgaaaattatatgagatgtaaaaatatgtgaaagcagtttataaactataaatagctatattctggtatgcagcgtcatggaggttgcctgcttataaaaatatgtcagtcaaaatcataactcacaaactaaagttggccttcacttaagaaaataccagtatgaatgtgtgctaattaaattccttcacagatattttacttcttggtaaacacaggctaaggaataatttcaaactgagttaaactgacaggttgtgaaatcaatttatgggttatgaccagtagtagggcttttttttttgacagataagactaaaatagattaggcacttacattactcataagaatgataaatattgttccatgggaaaagatgtatataagatgtcaagaacagccccaggcacatagcagacaatccataaatgtgatgaggatgacgactagcactggacattgttagcatggataacattgcaatcaaagagtttcaacaactccatgagggttaaatgaactaagagagccaagacgaggaaataattggagcaggtcactgggaagcactgggtaggggtgaagactcaacaaagtccttctgactctaccactaatggtggggtcctttcaatgcctgattaccctcatctgtggaatgaaggtgataacaacagtacctattataaggggtcactgtgatttaatatgtgtaatgaatgtataggtaaatggccttagcacagggcctagtatgttagctgttcttattttagttatgtgctggctcactggataagacctgtgaaaacccaaaccttagcttttcactgaggcagtgtcagcacccttggacacacagtgggagctagatatgtctcctcccccttcttcctttagaataatggtttcaaaaagtttaaactatgacccgtagtaagaagaacattttagacagggagccaaaacacacaaacatatatgtgtgtgtgcgttcacatacgaacatgcaaaagcacttgtatgtgcaaacacatacaagtgaaagaaaactttcacaaagcacatggaatgcaccccaacttttctgttttactgttttattcacttaatgccagctaccactcattgaattgattttcttgtactgtagttaatccatgtttctaaaaactcagctttaaatgggacgtgaccaaaataatgcatgaacactcaaaggagtttcatcccttcattcagatgtgaacattcctgtgttccccttgacttgtctttacaccatcttaatcaatgctgtcttacagcaacaattagtcattcatagcctgtggtttgtgtccatcagtgagtgtgccctgatagacctgaaaagattgggagaccatgcccagcttcccattatttctgtagcctgtcctttgttcccataacagtacagtcatgccttagtatctgtgggggattggttctagaactccctgtggataccaaaatccatggatgctcaagtcccttatataaatggtgtagcatttgcatatgacctgtgcacatcctcgcatatattttaagtcatctctagattacttataatacttgatacaatgtaaatgatatgtaaatagttgttatactgtattgtttagggagcaaagacaagaaaaaatatatgttcagtacagataaaaccatccttttttagaaaataactttttgttcatggctggctgaatccaacaatgcaaaacccacagttagagacagccaactgtatgtgcctttgctaagtagataaatttagttaatgatgaaggactggatgaaagaaagatttgaggataaaaattagagtttgcttatctgtaaatcctgaagtaaataattacagtctctgagaaaactgagataactaatacttagtcatttacttcacatttcatgattgcttaccaagattaaacttgttctgatgaaaatcttcacttttcatactcatcgttttgatgagtgaacttaacaattaaaggtggctgggcacagcagctcatgcctataatcccagaattttgggaggctgaggcagaagaattgcttgagcccaggagttcgagaccggcctgggcaagatagggagacccccatatctacaaaaaaaatttttaaaaattagccaagtgtaggggcatatgcctgtagtcccacctactcaggaggctgaggtgggagaattgcttgaatcggggaggttgaggatgcagtgagctatgatcactccactgaactccagtctgagtgacagagtgaaaaccctgtctcaacaacagcaacaacagcaaaaacattaaaggtaattccaggacacaatagggatgaggcatattgcctgtttaaataaactttcctggccttaagaaaacaactctgctgaataattttatggaattagaatgacattaaaataatgaatctgataaatatgattagttaataaaaatacagttaaaataatacatcccttggaattttaaatcttactgagaaccatttctgcacacacagtatccaatatacaaacacacatggaagaaaacctttccaaagctcktggattgcaccctcatattttctgttctgttatttgagtttttaaatgctggttaccacccattatattaattttattgtattgtagcttgctcatatttttttaaaactcagcttcaaataaggcatgactaaaacagtgcatgaatggatcccttccaaatgttgaaagttattccagtttctttcctttccaagtaccatgcatatgcagctaaccctagcattggctgaccagtctaacatcagagtgaagagaagggaacttccctctacaaggcttacaaaatgataaagttacaaagataagagctaaaatgcaaacgctttctctaaagaagttaaatcctagagtcacgaactggtccatgttgcttcctttagagaaaaaagtagtaaaatsagtgcaggttgaaacctgcagcaggtacaacaggggactctattctctgtgctgtccttgaagggactccaaagatgctgtttctctgtttgcctcccagtattttaagtgagttttggattctgcaaatcaatctggctagctatggccttgggtgaatataagcaccagtttctatagccgcaagttaaagggatttgaattgttaattctgtcatccctcccattctaacatcctgttacctagaaaatcatccatacatagagcctgaaagcttacttttcaggatttggggaaataaaaaaaaatttggtagaatacctcatactttcattaggctactgatatgaacttaattattcctctaactcctttgaggctcagaccttctgtcccctgtcttatcactctcatctaatcacctccaagcaatgtcccacgtcactgagaatttagtatccaatttcctatcttctgctccactccagctcctgccttcacctggcagagtgtccatgtgggtagttgatccaataccccaagttcagagtcccttgatctcctcaatccagtgactgacacctccactccatttcagcaacttcacttctggggccacaggctgagacttgattatctccagaatttctccatgtccaaaactgaaatgggatagttcccttgaccccttcgtgggactcatgaaggggttgtcttgtttactcatcctgcagctctcaactcctcatgggagggagagcacataggtgagtgggtgcagagggtgggacaagtgcttctgggtgctggcaggagtagaactctgtgcggccccgcagcagcatctaggtgagtatctgtgacccctggagccgcagagggcatgtgttacagtgtgctcttttagctttgctgtccatggacagcttaagtgttttaacagctcagtgtgacagccctctgtatcctgaactcttgttcagcaaccaggaaggatcagcttgcacgaacaaattgaagatggtgaatgtggagaactttattgctgatgaaaatggctctcagtgggatggggagctggaaaggggatggagtgggaaggtgtctccccctggagttaggccatccccrgctgaactcttctccgaggtcctaccgtcaagccatccctctgaagtcaagctgcttttcaccagtgtcaagcttcttctcttctctccttctctgccattccactgccagtggatcctggggtttttatggggacaggatggggggcagggcgggccagggtgattttggaaaaggcaacattcaggcagcaaaatggggatataaagttctcactttgggccacgggtccaggcttgagggtggagccattgccagggaccccacccttttctacctagtatttccctgcctccactctccaactctcttatcacaggcctcctatccataaatctttctcactcccttattttttttagagctcaccttcagacttatgaaagctcaagtcttttgaattcctctttccctcccagtccagcaggcttcacttctctccttgctagcctggaagtgtccattacacccttgactgtgtcgcggctgacacatggaaggcaggtgtctggtattgttaaatgaacgttaacaagtgcaacttctttaaaaagtaagatttctttatttgattgatcagttttttttttaattaagtatctaatttccattgcttctggatttaggcacacatattgaatataaaattcaaaacttttcatgtatctaaagaaataattttaatgaccacagaattttgctcttaaaacaaatggagcttgcaatataattataactaagacagactacaagcacctgctgtgttttcttcatgctgccatcaggctggtgcatagtctgatgggatggatgcatccctgctgtaataggaataagtaaagagggtgggagactgttgttggtgtttacaatcattattcatctctccattaattttcatccttgcagttgagataatcttgccttttagaacgagaaaacaatcttattacttacaacattcacaagacagggaaacactcctcaacaaagaaccatttcctttgggcatttgataagaactgctgacatctgtgtttattaagtgatgtgggagaatcagccaaggggcagaggtgtgggtggtagcttcaaaggtaatttcctgactgagtgtggttgggcatgttggcaatcccagtgtttgcaattccagtgctttgggaggctgaggcaggagcatcacttgagcccaggagtttgaggctgcagtgagctatgattacgccactgcactccagccagtgtgacagagagagaccttgtctcaaaaaaaaaaaaaaaaaagkattttgctttcctggtctgtttgaatgtggtaagcacaagaacttatttgtactggtggtcacccacttgggtcctttcagtaaacttctggccatggcccagcctgagcacctgcttcctttacagagcaaagccagagccttctggtttgtaatttttgcagccacataacactgatccattttagctgtctcatgaaactgctttccaagatgaagtgagactatccgaaaccaaaatctaaaaagaatgactacagaacgaatggcagtccaaggtcatttggcagggtagaattataaggaaaggtgatggccagctactgtgaagtcttaagcccactcataggtacgaatctcttaccaggactgaagtttgtgtttccttaactttgctgcttgatggtcttctgcaaaggatctcatttctccagctttcactgggaagtggcatggggttttcgaaagtgctttaaactctaagaactggtttcctctcaggcttagccaccactagctgtctgactttggacaagttactcaaccactctgagcatcagctttctttttttaaaatggtgacagtgatatggctaccttagagagttgtggagattaagtgagataatatatgaacaaaatatataaatatgtctatattagacatatatgatctgttaaatatatttatatatatatatagaaagaatattagagaactgacatatttatcttagacctactatgttctagggcccagttctgctcatgtattatctctctatatatatagtattgagagagagaaagagagagagagctagagaaatagaaaccagtaggatatatcctatctgaagaactctaatacaggtatttcactgaacaaaatggcttctccttaaaatgtattccaacaccaatttcccctccttgcttctcatacatattaattcacagaaattatattggtcataaggcggtaggactatgaataatttttttcttctgcatttgccaaatattctgtaatgctagttttatttttataacaaatttttaaagtccctgtaaaccctataaaattaactactaatcctaaacttgaactgtaatacatatttttgttaaataaaaaaaaagatatcctaaatttgagaatctaagctaaattcacaaaatgactaaatgtatcttcttactcttaaacgataagaaaccaggaatgcagtggtttaacccaaacagcctaggtattcttcactcatttctcttgtcctcagtatatgtttcccccaggccaagaaacatttatggctaggaattcatgactgctcatctgtaagacactctccaagtactctgtcatgatttggaaccagagctttggccttccattccagatgacctccaggttctaagctttatctgaagtactccacactacattgcacaccagcatgatgggaaggaatgactcaagggaactgggcattcagaccactcaccaactacacacagcctttcacacagcagtagacaacctttgtaggaagacctctggccaaatatttatatatcaggagtatatcaatgtatggtcacagttacctcctttttaatctcaagaaataaagtcattacttctgaaaagaacaccagtaatggaactacacgggcatgccaagatgaaaattagtctctctctctctctccaccccattcttttggccactgcattttaaacaggccatagygatagaaccagaaggtagctgtgtttcgattatttttgttttcttatttttaaacattgctttatagaagcctgttctataatgtaagaagtgaataggaatcctagtatctggaatgatgctgagccatggagatggccagattccatgtgaagagaagaggctggcagaaagctaagtatttgctcgctttccctaccctgtattcatggagcagccattacaaaagatgacgcaccagaccatgggcctggtcttgctaggtggtggagatccaaaatgctgggcactcactggagctccgtgaagatctgttgaatgagtgactaaatgtgtggtgaactgtccctacctacagggttccctgctttgcccagcctatcaggcttgggtacaagcagatagcctggattggatttcatgagggctttgtgcccactctgtatactaccggaagatgcataatctctttagacttcctgggtcatcactgaaaggccagaggcaagaatttgagcagtaaattgaagcatgtgcagagtgacatagtctgggcatagataacagtacctgacccctcaaattccctaaagttgacatgacagcttgtgcatcatggtttggtacagagatgactgaagagacagtggttgctcctctggttgctggacaccttttgaatgggctgtgatgactggagagcgtgctctgtcctggtcacctgaaggtgctcctagactagcagaagcagagacagcagccaggcctgactggagagctggagggactgggtgcaggggacttctaggccagcagtttctgtgctgtgctcggaggggctctggtggcaggaacctagtcctgggttccagctctaccagggtgcagcctgaggaactcagctttcctatttattggcttgccttgccacaaaggatttcttgtgtgttaaagatactaatagcttaaacaaacaaacaaacaaacaaacaaactattgatttaaaccactaatcaaatctttggttttacaaatttagaaaataaaattaggccccagggactaaatgtctctcctatggtccagaaaccagactgaaactgacctagtagcaaaacccattctcctgtatcccaactcccagttcaggttcctcttcattagctcccacccagctgcatagttgaggacactgaattgaggggacctggggtaaagggctggcactcaggcatcgctggcttctacatgattccaccacatggaaagcatcataatcatgtatgatccctagaaaagtgtttgctaaactccttaagttgtcattcaacaaacatttatctagcacctaccacatgctaggcaaattctagagacacagctgcccctgccctcatggaactaaatgtcttgaaagagatactggccctgatcagattttttaaaaatacataattatgcaaataaatcatattatatataattacaaagcatggtatgaaaggaaaagtacaagatgctgtgaaagcgtataaaaggaggacttggccaagtctagaggatcatcagtgagtgttccctgatggactaacattagggccaagatcagaaagatgtccaggagttaacatggtcaataatcactgttaatctttattaagcatttcccttgagtcgagtcaggcttcacttgctgcattaacttctttaatctccacaataactctgtaaggtaggtgcttttgctttttttccactttacagatgaataaacaagaagtaaaaagatgtaactaattcacatgtagccctctggcttcagaagctctttactccataaggttcctgggcacgtgggtgtggtctaggaatgggaagaggctaagaatgctgaagggcagactgaatgttccagatgaagctggcgtgataagaaagggccacatcatgtgggtcttataggttatgatattcatgttaaaactgttaatgtttttgaaatatctaaaaccaggaagtgcatgatcatatttatgttttagaaagatcactcaggctgctgtgtggagactggagtagaaagaagcatagaagagacctacagagactaggaagctgtcacagtaacctaggcacaagatagtagtggtcaagactagcttgcttgaggaagtgtagagaagtagacagataaaaggagcatccaaggagtgtacacttctaagtaatttaaaagaaagagtcaaatcccttagaagcaatcatttgaaataacctaattaccaatcctttttatccagtcctcttatgttgtcccaattcaggaattcttaaaccagttcttgtgttaaaatcatagcatggactgccttacaacattctatacttcagtccattgaaaaccacatcaggccaggtgcgtggctcatgcctataagcccagcacttttggaggccaaggcgagaggactgcttgagcccaggaattggagaccactgaactctagcctgggcaacagaatgagaccctgttgaaagagagaaaaggaagaaagaaagaaaaaagaggaaggaaggagggaaaaaaggaaaaaagggagggagggaaggtggaagaaagaaaaaaaaagaaagagaaagaaaaggctgcttcctggcacttctattaccatgtgacacgagaagggcaattgtccagacccacacttaggttcaccacagtccttggttcccagracagagtcctttgaggttccttcaagcacccacaccatgctggaaaatgcaggctttataaactccagatgtcagtccacaactccacagccccattgggtttggttcctggatgaattctcggctagatgactggaatagagttctggtgaacatcttccttcctgccaagatgacaagtcaggtttctaaagacagatgtgtagctctttgtggaaaaaatattctgggcacgaacatcttcggctgaacggcatggaatggtgtggaaaatgtgaagccctggactggtttctgtgtcagtggtttcctgggactgccgagttgaaggggagcagaaagggctcagctgtggaggaggcrgagattagccaaactagaccagctatcgccccagctgcatggatagcatcttccttcttgttcctgattaagctcatttaatatgccaatgacaaaaggatcatgaaggtctttccaaatgaatgaatgttttctggagctgagattgctggctcctatttgcatagtagtgcatactgaggcatctgaccggattactggattcctaacttttacattctttttaagctcagatatttctacggaaggcagaaagataaaggccaaaaaaagatcaggcttgcctagctcttgggtttccaggaaactgacagactcctgatatctgcaactagtgctttctctccctgggcggggcgttctccgccaccttgtggacatttggggaactgcaccgccccagcatctatgatcagaggaactgacagaggctgccataactacctggtcccctgaaataaaaaccaggcaccaggtttgcccaaaggaggaccaacacatagcagaatgaggctgagtaggatgttaaccttccatgctggtcttccattatcacgttatctgccactgtcacagacaacatctgcatccgctacagatggagatggaacaaaggctttcactggatctcaagttggatgcttctgtaaaagtaaagttccaagacctttttcttttttttccccagtgacagcaagaaaattggatgttactattggcaacaactatttcctgcttgtgaagcgttggtatttgcagtgcttctgccctgtggttattgagctgaaaggggggctgctcttgacataggagcatggcaggattggattcttcataacatgctacccagcttgtcttatgtgaaaagagaagcccagaaagagcttgggacacaaagatgcaaatcctgggtttgcatttgatttgttaagtgtcctttcacaaccagcttgcagactttaggggaaaaaaaatacatggtaggcttgtgggtagtggagaaaacataagctccagtacctcacagcctgggttttcagtctgcctcctcccaaccctcatcacataccagctgtgtgaccgtgggtactctgtctatgacaatcaattttcttgtctgcagagtacagataatagaggacctgccccatgggaagcttggaggactaaatgagattaagcccagggcctggctcatggccgattctcgtaacaggtccatgtgtgtaatcaacatgtgctgaagttctctggaccctctgtaaatatctaataggaacgactagccatgggtgtgatgagggagatgctagaaacagtaatggggtcaaatgaatctgtcccatagtctctaatttgaaacagctgaactgtgccattgtctccttggaggtaagatataagccacagagtgcctgaagcaggtctacagttaaggaacttaaatgtgctaagtgattaaaggctgggctgcctactccctgtatggcgacactctccaccctcctgcatactctccactactccaggcagtggtgggcctcctagcctctgggtgatgagcagctcccacatctcccctttgagacagaggcctgcagaacctgaccagtgtgagggctggctggggtcaggagtgtgcctgctggttggccctcaaggtgaatgtggctcttctaaaagacacctgaagggatgcagaatttagcagcaaacgccaagaacagctctttgtcatctctgcatcttctactaaagattttaagctccgaagtatatgtctggggtttctagagattgctattcccttataagggaaaaaatacacccttattgtatatttattgagcacctacaatgtgccaggcaccccagctagggagtttagatatttaatcctctcagctgccctgtaaaatagggattgtttaaaatggatttcgcccaccttataggcaaggaaactgaactacagtatggtaaagtggcttggctaatccacctggctagtgagaatggagccacagtgaacctggaggatactcttcacggcgttccatctttgtgtgccccacagcacaagcacaatgcccgggtcttaggaagagcttggtaaatgactgctgagttgagaatggtaggattcatgtaccaaaagggcatttggaaatgggcaaatgcccagatagggctctgaaagactagctatgtagagcaacagatggcaaatcatcaatttaaaactctgtcatccagccagtagcccgctggcctacagccagccatgtatgtacaagggctgacttgatcagctgtggctcttttatttcaggcaatccaccttccaaagaggtgcctgctgggaagtacccattcatagtcacttctgatgatgggcggaaggttcctgtagtccaggcctatgcttttggcaaatacctaggctatctgaagatcgagtttgatgaaagaggaaaygtcatctcttcccatggaaatcccattcttctaaacagcagcattcctgaaggtaagtgaagttcaggggaatgttccaccaatctaaaatttagatggctggatattttgctccttcccatttttttcctttaatgtttcaggaaaagactataatactgttgaagaatttagtttcttccttgagtttgccctcttcrtggatagatttaaaacacacccaaatgccaaaagccccacttgcttcttcaagtcttctcagcatcagattccatacatcactgcttcctctgccttttaaaatcttgatcctgacatgccaaagccactctcagcttgtgtttacaggagagataactgaactaaaggggttctaattgggcagagcggggctcaagtcctggccccccaactagaggcagtgtgccttaggcaagttgcccaatctcatgggcctcagtttctttatcaaatgagggagtaccttatttatatgtctgagtctattgcgggatctggccagcagcccgcaatgcaatggggctctctctttgttcctaggcagattggcaggttgagaaataatagacacacacaagatagtgaaagctgggtccaggggggtcactgccttctggtcctgcggtgccaacaatgcactggatataccagcatttattattaagtttagtgagggcrggggtacgttagtgagggatttagggtcatttgattatgaggtgagatggtcacatggggatgaagtaattctttaacataacatttgtatgtagaagtacagtacatttgtatgtagaagtacagtatgagataagaatttacaatatagtgtgtgcgtcagtaatttctaacagagccttagaacagaaacacagtctttccataacctatgattagcaagatattaatcagcagtaacaattgcaacaaaaactggttacaaataatccatggaaacaggacatgaagctagataaccagttagaccagaaattctcagaggggagtacgccttaaccctaaagaggcctagaagagcggcggcaagatgagcgtgtttatagccctatcttatccatatggacaggccccccccatgcgtccgtttataggctccccacaagggtcacattccattcccagagctatgaacatctgcttttctgggataggaatcttggtgatgggaaacctccctgactgcacgtccatttgtaggctctctgcagggggaagcacatcacgtgctgttggctcattgtggcagtccaacctggcattgtctttacacaatcctgcatgcaattttgtatttacaataatcaggagcatttcatcttttattccgtagcaatagtttcagggcgtctccctacatgagtctcagagtaaaaatacatttttatatcattgattttcatatgtgtacagaacacactcctgtgcttgtctctcactttcccttttctgttgactatgatcatgtcaggaagatgaggtgcacagcacccaggtgagcctgtagtcacaacacagccctctcagtagccagatgggaaaggggcccaggaccacactgacagcgatagcccagctgtacctcagcaggccttttataactgcccctgggcctttcagagctcctaccgccaccactaatgctgtcccaggtgggccaatgggtagctcatacagatgtgatgagctggtagatgttcagaatattcttaaattaagatgcattccaggtcttattaccaggaaacaaaatagaagttcctaaggaaatttcatggtcaaaaccaaaatgcacacaaatatggtaaacaaatatgttctcacagcaagtaagatagatgatgtttcattcsttttccagaatttagcccagtgtgagatttaattgtagggtaccttcttttctttcttctagatccaagcataaaagcagacattaacaaatggaggataaaattggataattattctacccaggaattagggaaaacaattgtctatctggatggctcctctcaatcatgccgctttagagaatgcaacatgggcaacctgatttgtgatgcaatggtaagtcatcagcaggagtggacatatgctagggaggaaggaaaggaagagggaagaggaaggaaggatgcgagaagggatagatcgatagctacagaatgagggatttcaaaacatttttagccagggtggtggcatgtgcctatagtcccagctactcgggaggcttaggtgggaagatggcttgagcccaggaggctgcagtgagctataattgcaccagtgcactccagcctgggcaaaagagcgagactctgtctctaaaattaaataaatatgaaaaataaataaaacattagtgcctaaacaaaagcctgatgtagcttcatactcagtaccttcttaaggtgctggaaggagatcaggtaaccaccaacatactgctttacaagaactaaaacctttattttaaggtgttcttagatgtctgaattttggatgttgctttccttttgtaagatgatgcaaatgcacaaactctgctaccctggagatatcaacataatagataaaagcatatctgtttggccagactgtttttcactcatctgttcacttgactccagagaaccctggccttgtgtgacaggaacctctttcacaggcacagaaagacaacacacagttttaatggtaataacaagtcctatggctgagcaagaccaggtatgaagaacaagcccgtctacttgtcaccaggcggaatggccatggtagctctctgggggccttactgagccaaggtctcctatgtcggactactacttccatgggctcacagcctgcacccagggaagtcatttctgtcagtgcttggcatgcattgcccagtgcccaggatacaactgcactcgataaatgtttgccgtgtaaatgacaacaatcatgctcatgccaagaccagactcatgatgtctcctcagcatcatgcagtcaatgccagagaagtagttaaggagaagctggtatataaatgttaagagaagtctggagggaaacaacccaggctgttggcagtgcttatccactctgttaaagaggctaggacaaaggagagcttttgctttttatttatttatttatttaattaattaatttatttatttattgagactgagtcttgctctgtcgcccaggctggagtgcagtggcatgatctcagctcactgcaacctccgtcccttgggttcaagcgattctcctgcttcagcctcccaagtagctgggattagaggtgtccactaccacacccagctaatttttgtatctttagtagagacggggtttcaccatgttggctagactggtctcgaactcctgaccttaggtgatccacctgccacagcctcccaaagtgctgggatttacaggtgtgagccactatgcctggccttttttttttttttttttcggctttttgtctcctaaatgagaatatattcattttatttcttataactaaacatatattttgtaaaataaaagtaagaatggatgtgattctccccagcttcaaaaggctgtctctgtctttccaaaattgccaacttgggaatcagctgcagacatagacgtggaggccaggttctctttggcatgaggtctggtgttgagcaggctctagggccaagccctcagaatcaggcagagggcatggcctgccctggagaagcctgtgcaggagtgactctgcaggccaccttgcatgggaggcccagtcccgacaccagggctacaaccgagagaccattttgctaaggccacctggcctgacagtatgggagttttaggagggggaaataagagtttgacatggactggtaacagtatatttttacttctgggagcataaaattagttctaattatagttgagagatccctgggaacacagcagcaggtgaaaagcagctttatttcctcactagagctaaccagattcctggagctgatcytaaggaagaagagccagagtaactagtgtaaatctgtgctactgttgcagattaacaacaacctgagacacrcggatgaaaygttctggaaccacgtatccatgtgcattttaaatggaggtggtatccggtcgcccattgatgaacgcaacaatggtatgctcccasgcccagctcctcagtgtgtcatgttctctctctgatctccttttctgttatggttcttgccctgaacacacccatgtgcagcctcagttcatctctgctgccagccatgtaccagaatgtcagtcctttaaattagggttagccattattaaagtctaaaacctagcctgaaggacacacacaagcttgtgtgttcttatatgtattcacacacagaagctgcaggtaaggttagtggaactcaaacttggtctgaatttctgacttacaaagctatactagttgtttctgatttatgcaaaataacaacagtcaccaccttggcatctgaaaagagacaaaatcaccaatcttctgtcctgaaaaagacataccactggattaaaatgttaccttagtatatttacagatatccaagattatatcatatggcaaaacaaatcaactacacaaatactcaagacactcttgtagccctccctgatttactgtgaaaaccaatcagtatcagtataaggccccaaacgcatcccattgtcagacaacagggacaggttgcaggggcacattgtttgtctggaggaacggaacaatgcaaaacaaactactggagatccagccccaagctagcagatctaagactgagcatggtgaacttctgaggcacagccatttgtgagctcccgccatcttgcccagtggtggagtgcagggccagaggcctcctaaactcattcccttcctcagtgtcaggaaccacttagacatagctaatgatgctctataagcttcccatgtccccctcatttcttcccccagcgctgagggaaactggtcatggtgtaagcattttctcaagctattttccttcttgcctcatctgtgactaccctcaggcacaattacctgggagaacctggctgctgtattgccctttggaggcacatttgacctagtccagttaaaaggttccaccctgaagaaggcctttgagcatagcgtgcaccgctacggccagtccactggagagttcctgcaggtgggcggtaagtcacccatcctgtagggctggcccatccaaagtgacatggcatttcctgctggttggctcagcttccccttcaccaaaattcctgtggtcaaactggtttggatttttcccgacccaacaccaataccttaccctttaatggctgtggactctcagagccactaagattaggttggggtcaaagccccaaagccccaaagccctggcaataagcagtatttgccaagtctgatttggacatcagatgggccctctaagcaggtcacctgctttgaggtctagtttctaataaaatcttatttaagcattcaattattttttttttaaatcctctcctctgttctactcatcgttgcctggaaccatgccaagatttaaaggaatgctgtccaatctgtattaaccaggatgattcctggaaggagcagcctactgcacagacatacctgaacacctggttctagtcccactgtgacctggggcaagttctcaacccctctgggcacagggagaaaacctttcctgtttatctcatggactgcagtgaaagttgaatggaaataaatgcttcctaaattgccaagggcttctgaaacacttttgttaataattccacagtccagtgaattaatcctttaaaagcaatcttattttacctggaaatcataatctggcctcatttttttaaccttaggttgtggtcccgcttgacagatagaattgctttcctgagttttcctctgcagaacacattgctgttgagactgaagggctacagaaggcagtggggccctgtcctaatgcctatggggcaacccaaacatcctccattttcccagaagggagttgagggaaaagcagttttctgatgctctagcaaagcactgcatagctctatgccttgtggaagtcaccaaatcccaaatgattaccatttaatggtcttcaaaattgtaaaatgctctctgcctctgatctgtttctcactttctaaggccattgaatcaatttagtagaccaattcagcattttaagggaaaaacagaaaaagatgtggttttgtccatgtagagtcaccctttgcctattctggtccagagctggttttccttccagtggttctcatatgtcctgtaaggactcaaggataaagggtggctgcaatgtcacaattctcttgacaaaatttcactcaggtttaaaccaaaggaaaaaccacagccccatgccccaattgtagagtttggccaaaattccttaggaaacagaaatctccctttggatctggtgaaaacagattcatttcttttctaggaatccatgtggtgtatgatctttcccgaaaacctggagacagagtagtcaaattagatgttctttgcaccaagtgtcgagtgcccagttatgaccctctcaaaatggacgaggtatataaggtgatcctcccaaacttcctggccaatggtggagatgggttccagatgataaaagatgaattattaagacatgactctggtaagcatgactgtctcttcctttctctaaagaacaacaaaattgggccaagaaggggagctactagtggtgccaggagggcaaagtgactccctgtattgctgactccctcctgctttgcttgttggaaagcagcagcacagcacagcagagaggaatatgtaccctgtcaatccccgagcacacacatgccttcatccaaccccagagacaaaacatttgtaaatcaaaaatgttttaaaattcttttaactacatctaagcagctatttaaattgtgaaatataagtgagttttgcattaacagaaatatcacacctctggaattttaggatatggaaaaccatcacattaaatcatttaaattttctttcttgaagaagtttctgtgtgaatcagtcaggtagaagtggatggggtgagcgccgccctttcagcacagtgggttggtggtacaaatcataggaataaccatacttgatgtcagttggtacttctggcagcattgagggacattatatgccagcctcacttttagaaattctgttgagagtcacattatgtgcatacagaccactgacataggacacacttccccttcctcttcctagggcagagaccagcatgcttacaagacacacaagcagcttcttggcatctctgggtagttccaccaggatcttcctcagtcttatcatgctggacctgtcattttagctacttattccaaggagcgtggagggcaggaccagaccaaaggaggcagcccttcctgggaggaaaggtgctggcttcttctgtcccttccgtgacagaagatggaagggcaggcgtaaaagccccatgagacaaagaggctgatagccatcagctgtccaccactcaagcctagactgaaggatgttagagagaggagctcatgcagaaggctaaggaagccctggacctaagcgttctcaacactggttatacattagaatcacttcaggagcattttaaattaaataccaatggctcggccgcagctcttaagagattctaagttaactggattggggctaaactctttttcagtgattctagtgtacacccagaggtgaaaaccactgaagagagaagggttcttaagtactggagtgatatttttaaaataaaattctgttgggttcccaacagaacatgggttcccaacaaacatgggtttgttgtagctataggcaattagcatttatcctctcctctctttggtaaaggaaatcccccaagtcccatcatcaattacatgaaaataattattgggcaggcaaacaaaaggaagccagttttatctctcaactaattgctcttgacccagttccctaatgcccttgttctggagtggttcaaaggctatgatgtcaatgacctctttctagagtcatcacagagctgaggcaactctacttcccccaattacccaatattgaacaacagacacattttacatctggagcatgaaaaagcaatcaaattctttgtacttaygatcactagcgttcttgtcttctgtgacactttacccctgcttatgaaattgcttcccttttataattacaaaggactaccttactgttgattgataattaccttttctgtagttaaaataatgtatatgtttttctaggtgaccaagatatcaacgtggtttctrcatatatctccaaaatgaaagtaatttatccagcagttgaaggtcggatcaagttttccacaggaagtcactgccatggaagcttttctttaatatttctttcactttgggcagtgatctttgttttataccaatagccaaaaattctccttgcctttaatgtgtgaaactgcattttttcaagtgagattcaaatctgccttttaggacctggctttgtgacagcaaaaaccatctttacaggctcctagaagctgaaggttagagcattataaaatgaagagacagacatgattactcagggtcagcaacctagtgagttagaaaaaaaattaacatagggccctataaggagaaagccaactatgttaagtttacgtgtccaaattttaatgaaattttactaacaattttaaaccatatttttcttcttcatatccatttctaatccatcaaacagcttatgtttacataaaattttatcattcacaaggaagttttaagcacactgtctcatttgatatccacaacttatttttggtaggaaagagagatgtttttcccacctgtcagatgaaaaaactgaagctcaaaaagggttgacttgaccatacagctaatgctgacagatccaagacctagacctaggtcttttgaactcaagtccagcattctcaactatatcaagttactgttcagaatacttaatatctcctctcttcataattatcaatagccccaagctcatggatgacaaatctctgctttatttcttgtctctattttttcactttatagctcctgttataatagcaagtttaatggtataaacacaggataccatcctctcttgcaacacccatgtgcctttgatgagtcaggtagcaagctgtagtagataatgagaaaggccagaggctgcaaaagacagtcaaaggacacgagagaaaggaaggggaagaacaggactccaggactgttttatattatagaaaagcaagagctaaagagcatttacacatgttaaacagatacttgttaagcatagtgcctgacacacggcattagctgttattttatgagattccatcagctctgcctctgtcctctttcttctaacatgaaggtatcatgagaagagaaccttctaacataagctgtaattctaaacctgcacttgtccctctccagcaagaggctagcactgaattcattctactcatactacacacccagttatggaatgtccagagttctcgaagaaaataaatgactttaggaagaggtatacattttttaagtcgctctgcctccaaatctgaacagtcactgtaaatcattcttaagcccagatatgagaacttctgctggaaagtgggaccctctgagtgggtggtcagaaaatacccatgctgatgaaatgacctatgcccaaagaacaaatacttaacgtgggagtggaaccacatgagcctgctcagctctgcataagtaattcaagaaatgggaggcttcaccttaaaaacagtgtgcaaatggcagctagaggttttgataggaagtatgtttgtttcttagtgtttacaaatattaagtactcttgatacaaaatatacttttaaacttcataacctttttataaaagttgttgcagcaaaataatagcctcggttctatgcatatatggattagctataaaaaatgtcaataagattgtacaaggaaaattagagaaagkcacatttagggtttattttttacacttggccagtaaaatagggtaaatcctattagaattttttaaagaactttttttaagtttcctaaatctgtgtgtgtattgtgaagtggtataagaaatgactttgaaccactttgcaattgtagattcccaacaataaaattgaagataagctctttggtctttgatagttatttcttctctcattcaaacacctgccaactaaagacaatatgactgaaggaaaactctgacagattttcactggtatcatttctcttgatcataagccacttaccatctgataaccctccatagcccctcacacccctaaaatgagaagaaaaatgcatccaatttttaagtaggagagaaaagtgagtggtattttaaggaagactactaaatttggtggctttgatatacagaatctgatataaaaatggttttgaggccagtactgattcctacaaataaacacttccaagttaatgttgaggattttaatttgcctgtactggctgtgtgcctaagatcttcctcaagtacactaataacacaatgagttggtttcgttatacctcaatcagtcagacacgttaaaccacgttagctgtctttgtttgggctatgtattagtcagttctcatgctgctaataaagacatacccgagactgggtgatttataaagaaaaagaggtttaatggactttcagttccacatggctggggaagcctcacaatcatggcagaaggcggagaaggagcaaaggcacatcttacatggaggcaggcaacagaatgcatggagggtaactgccctttatgaaaccatctcatgagacttattcactatcaaaagaacggcatggggaagacctgtccccatgattcaattacctcccaccaggtccctcccatgacacgtggggattatgggagctacaattcaagatgagatttgggtggggacacagccaaaccatatcattctgtccctggcccctcccacatatcatgtcctcacatttcaaaaccaatcatgccttcccaacagtaccccaaagtcttaactcattccagcattaactcaaaagcccacattccaaagtctcatctgagacaaggcaaatcccttccacctatgagcttgtaaaatcaaaagcaagctagttacttcctagatacaacgggagtacaggcattgggtaaacacagccattccaaatgggagaaattggccaaaacaaaggggctacaggccccatgcaagtccaaaatccagcagggcagtcaaatcttaaagctacaaaatgatcttctttgactccacgtctcacatccaggtcatgctgatgcaagaggtgggttcccacagtcttgagcagctacgtcactgtggcttttcagggtatagacgcccccaccccgcccctggcctcctggttgctttcatgagctggcgttgactgcctgtggcttttccaggcacatggtacaagctgttggtgaatctaccattctcacagcccccttctaacagctcctcttctcatggctccattaggcagtgccccagtgggccctcttctcatagctccattaggtagtgccccagtgggaactgtgtatgtgggatccaaccccacatttccattcaacactgccctagcagaggctctccatgagggccctgccaccacagtaaacttctgcctggacatccaggcatttccatacatcctctgaaatctaggaggtggttcccaaatcttgattcttgatttctgtgcacctgcaggctcaacaccacatggaagctgccaaggcttggggtttgcaccctctgaaggcatagcccaagctgcaacttggccccctttagccacggttggagctaaagcagctgggatgcagggcaccaagtccctaggctggacacagcagggggtgcctggaccttgcccagggagctatttttcccttctaggcctctgggcctatgatgggaggggctgccatgaaggtctctgacatgccctggagacattttccccattgtcttgatgatcagcatttggcttctccttacctatgtgcatttcagcagcaggcctgaacttctccccgcaaaaatgggtttttcttttctattgcatcgtcaggctacaaatctttcaattttttttttttgtatatgtgccactgaagtgagcacaaatcttccaaacttttatgttctgcttcttcttgaatgctttaccatctagaaatttcttttgccagatatcgtaaatcatctctctcaagtccaaagttccacagatctttagggcaggggcaaaatgccaccagtctctttgctaaagcatagctagaatcacctttgctctggttcccagtaagttcctcatctctatctgagacctcctcagcctggactttttggtgaaaaccattcaacaagtctctagaaagctccaaactttcccacatcttcctgtcttcttctgagccctccagactgttccaacctctgcctgttacccagttccaaagtcacttccacattttcaggtatcttaatagcagtaacccactctactggtaccaatttactgtattagtccattctcacggtgctaataaagacatacccaagactgggtaatttgtaaagaaaaagaggtttaatggactcacagttccatgtggctgagaaggcctatcatggcaggaggtgaaggaggggccaaggcacatcttacataacagcagagaagagagcatatgcaggggaactgccctttatttaaccgtgaggtctcatgagactttcactatcacaagaacagcatgggaaaaacccacccccatgattcaattacctcccaccggatccctcccaagacacatggggattatgggagctacaattcaagatgagatttgggtggggatacagccaaacgatatcaggctgctatagcaaaatacaatagaatgggtagcttataaataacagaaattttatttctcacagttgtggaggctggggaatccaaaagcaaggcactagcaggtgtctggtgagggcctgcctcctgattcatagacggcaccaactgactgtgtcatcagaagatggaagaggccaggtgactttggggcctcatttataggaagcactaaccccattcagcaccctcatgattcaatcacctcccaaaggcccaaactccaacatcatcacattcatgatcaggtttcaacatacagagtttgggggaaaataaacattcaggctatataagtagctgccttcagcagtctgacacaagagtaggctgggtttcttagaggaaagtttaggctgctaataggtgtccttcagaagaagttgctacctctgtgagtatgtagtcctatggatgtttggtttggcaagaagccataactgcttgccaagattaggtaaatgttcctgtattcgtttcctggggccaccacaataaagtaccacaaactggttggcttaaatgacagaaatgtataatctaacagttctggaggctagaagtctgtggtcaagctggcagtgttggtttcttctgagggcagtgacagagaaactcttccatgcctctttcctagcaccaggtagcctctagcctaaggcatccttggcttatatatggtattctctccatgtctttacatcctctttttttacatgattatatttgtgtccaaatctcccttttataaggccatcaataatacaggattagtgcccgctctataatgacttcatcttaattgtctgcaaaaacctctttccagataaggtcacattcttagttactggggggttaggatggaagtccccccgacaggacttcaagatctctttggaggacacaattcaactgattaccagtcctcagtacaactccataatcagctgcagcagccctggggcaacctgcagctctgtgtcctatatactttgtaaatgagaggttataattcatggtgttgttttttttttgttttttgctgataaaatagaagacattttaagctcctttagctcctatacagcaaaaggaaccagttttgttatccaatgcaatcaaagaaggagctttggagttttataataaattgggaggatctcaaatttctagtgagtagtgcctctgaggcctctaagaacctaaattaaatacatcatgaaagacattgttaacaaataagctagctagaatctaaaaataattaactctaatccatgacaaggatggctggcatattagttacaacagtgaaaattatactaggctcattattcattaggatacttggttggaaaaaaatatattctgtaaacagagacattatcagaagggtattagcttgctccccaaatcaagcaacttggaaagctatcccagaaaatggacagcaaggtaagtgaggcatggctaaaatcccaccacaagaacagtcttagtacacagccctgttgctgcaggtcccagactaaggctggagagctgctgggttcacagctaaaacccaggacattagactattcttgtgccttggtttgttgcctacatagagatgggaacatctaaattgctgagcctggttcaagtccaaatttataaagatagaaggctgactgaggaatgaactccagccttttggtttctgatacagtttggatatgtgtccccacccaaatctcatgttgaattataatcctgagcattggaggtggggcctagtaggaggtcactagattatggaggtagatttctcataaatggtttagtaccatccccttggtactgttctagtgacagtaagttctcataaaaactggtcttttcaaagtgtgtggcaactccctgctctctctctcttgctcctgctctggccatgtgatgtgtctgctccccctttgccttcagtcatgattataagtttcttgagacctccccagaagcaaagcagatgccatcaccatacttcctgaaccgtctgcataatcatgagccaactaaaccccttttctttataaattacccaaaaacggcccctatgaaaatgaatatgaattcatgtacaaaaacatgtaaaaaaataacgttaaaaacaaaaaaaagtaccttctaagtctttcttaaaaactacactttaaccttccccctccaataatgtatattcacttgtgagatatccagacttccatgaaagtcaaaaatgccagagaagtaaacaaaataacctttttttcggtaagacaaatcattaaataatctgtaagcatgtgagtaatgaaatcagcccctaaaatatttcaaagtattattttatagcaataaataaatatgactaatcaaatttttaactgagcttgatgttcttaattggatgttgattctttgttcagctctaaactccacagatgaagtaaggaaggctatacatttgaaggataaacatatgttttattttactggtaaaatcacaatgcacagactttatattattagcattaatacaaacagtgctcctgaaaatttcaataactcatcacattgtgaaactgtgattatgtgatcacaaattttgtgtcacactaagaaatacaaatagcatcattcctgctcatttacaacatagatgtaccattaatctgcttaagtcttcttcatctagccttgccttattcctcaatgaaaatctatctctgaggccaggcagggtggctcatgcctataatcccagcactttgggaggccgagatgagcagatcacaaggtcaggagtttgagaccatcctgaccaacatggtgaatccctgtctctactaaaaatacaaaaattacccatgggtggtagcgggtgcctgtagtcccagctactcagagggctgaggcaggagaatcgcttgaacccaggaggcagaggctgcagtgagccgagatcatgccactgcactccagcctgagcaacagagtgagactgtctcaaaagaaaaaaaaaaagaaaaatctatctctaggtaaaactatctctttgtgaaagagatcccatctactactggagaatagaagtgataaggaacaaactagtaatgtaacttcagtaactgc

SEQ ID NO: 95936 - DNA, 40411 bp, Homo sapiens
  misc_feature (1)...(40411): n = A,T,C or G
tgtgagcaacactgtgccctcttcagacaataactattcttttgacttactactgggctacttgagataaaagcaagtgaaaaaaacctgttcaaaagggttccatgaaggctgcagacagacaccatcagaaccttctcaggttctgagaggggatggatggcatgtaaggagttatatgtgaacgctcaagttcacaggcaatgtatgtttgatttaataaggaatgttttagaggtccctgtgttgtggtctgccaactcatctggcctactcaattcactatgcaggtgtcctcagctcttagcctaacacataatagaccagtaaggaatgaaaagcaaagaacatacttgacgatatgcttcatttacttcagcaaactttaaaaagacactgtaacttttataaatgagcacattttccaaataaccatttaagaatataataaacagaatatccagattcttaagttacaagcaatagagactgattctgatttccgacaacaaaagggaagatgctgggtcattcaaaggaaatgccaaacagctgagcattcagtaggtcagaaatgagggtggcactagaggtttaagcagcaagagctcacagccatctctccaggaggctgccagaggacaacttgattcctatcactttctcttcccaaatcacacagggaaggggcagtttcccaaaataagctgtgtgtgtagggggagggggttggggaatgacggacttttattatgtgctcatatcaggctgtgcaaacaaccagcagactcctatacatacaaagttgagttttgaattatacatgtactttttttttctataaaacctacacgtccccataatactatctgcattagttttcctgataggaaaaaaagtattgcagaatgctcaaattagacttatttataaaaaagtaggttctgaaaaatctcagaaatagctccagaagcagtagagttcataacctagaatttattgccttttctttacacccatctttctgtagctacttttgctcatgtaatcaggaaaaacacctctataaggtaggttgatggcacatattgattcatttggatggagttacatctgttgaaggcctaaaacttgtaaatgcgaattatacttattgatagctttgtggagactgtgggggaaaaagattcctatactttgttgtttttagtgctggcaaacattaagaagtgattccttggcaatgtaagtcctatttcttccctttgcatataggcaaagtgtcaggctccagcctgagttccagcacaaccaaggctaggatggaaacatgaatggcaagctggaggacctggcggggcaggcctacagcgagccatgggttgaagatctgagttgtgccctgagaggacactcattgtgacctaagaagaaagaggcagtacaaagtggacccagttctaacacctccttgggatagggcctcctgctccatcatgtcctctctgtagcccaaggacacgtctgcatccacggcacagagggtaaaaccagatggtagtttcatcagaagttctgtaggctccccagcacaagcagcactgtctgacatctaacaggatgtgttcctaaatcccagcaccaagctttggcatcttgagaggacccagtaggagaatggaatgcctcccgggaaagggcagcagtagctgaccacagaaacacggaaagctgcagaggctgctcaagacatctcttagcacatgagactcgcagaaatacttggggagggatggagacctggtaatgaaaaggcttggcaagagctacttaaatagcggtttttaatcattaaaataaactctcattttgaaaagcctggtgaagcctgtggagcttggaattttcagaggagatggcagtaacatcatcggactgtagaattagattttttttttcccaataaggtaatgatgcagatatccacactggtcccctcaacagtctcttgccctttatagtaatgcatactggcacacaggcaaaggttggattgaaacaggcgaatactttgtagacaaggaaccatgtgtttatcttttctggataagaattaaactaatactggtatcaggattgctagtatcatgaactgatataaacagccagaacacatagcattgtgtgtcatcttttaactcgtgggacttcatgtctatgagtcctttgccactgctattaggatctagttttactaaaacactcgaaataggagtttaaagtaagaaatgaagtaaacgggctgggcgcggtggctcacacctgtaatcccagcactttggaaggccgaggcaggcagatcacgaggttaagagattgagaccatcctagccaacatgatgaaaccctgtctctactaaaaatataacaattagctgggcgtggtggcgcacgcctgtagtcccagctacttgggaggctgaggcaggagaatcgcttgaacctgggaagctgaggatgcagtgagccgagatcgcaccgtctcaaaaaaggaagtaaacatgtccttcctgttctcattttaaacttgatttagatttccaataatgaaagacaagtgggtgtgtcacatgtgtgctagcaatgtgaaacaaatgctattcatatttctcaattcataattgcagtttgatttttgatgttagttatgggctttggattcctcttcaatcaaatcagcttcacaagttaaatggattgtttttattaatttacaatgaaatagtttttgaatgacttcacacaaaaacctasagataacatcacaattgcaatgttataaagtttaaaggcctattcatttcactgtcagttgaaattcgttaccaggtgaaaattctggagctgggttttgcactgaggatgctacacagccactagcctttttaatttggtcttattaacagaaatactgacttagtgaaattacaggcataggcctcttaatcgctttttatgagtctgaacttttgctttcaataccaaatagtatctgaaaaacatgctcacttttgtgcttcttgagaaattctaagaattggcccagattcatgtgatagtcattccttaatccatagtcaccatgagcctcaaggagtaactcttcaaaagaatggaaaaggcgcaggtcctcaccatttccttctgtctccacgctttcagcatgcttacaggaaatgtgcttccaattggggtacctaattgtgtgccagaactcctcacagtgctctttgaaaccctccacacagattataccaggctttcctgtcatgcaaaatccagtcacatctaaccttttcccaacatccaaaatctttttccttaggtcctgctgatatatatggtgactgtagatccacattcggaggaatgtgttcttgactggctttgcttgtgtagatggttcatatacaagctttctgttcaggaaataagatgcactgttgtcctgtagccactggattgctgcacatacacagagctcacctggatcaaaagtccctatgtaagaagtgagacctttgttgagaagtagctgctgatgtctgtcaagttcagatgaccgtccaaacagctgcaatgctacataggggtagctgtgaggcatggtcacttgcaaatcaattttcaccttaaaatgaaaatcaaatagatttaaataccataacatcacataagctagtttatcaatagcaactgcatgattttgagaaatgttattgctactattaaatgtaccaggtactttacatacatgattgcttccttttatgcattatttcaatatttattgaacaactacgtgtgccaggtgcccttgtgctgggataaaaaagtgaataaaccagacactatttttgcccttcatgaagtccagggcctagtgaaggagacacacattaaacaaataattacatatagcaagtatttaatttcaattgtgaaaagcattaccatggaaaagtggagggttccattgaagtgtgtaaccagcgggacagaatccagtctggagaaccagaaagtctcctctgagggaataacaactgaaggatgagtaggaaatagctacaacrgtggttctcaaatgcccagtccacgtattacctatgctatgctaatgttgctggagataaatggatcagaagatggaggkaaattcatttttagtctttagatttttccatccatatttgctttctgtgttatggtgccatcaaaaaatccactcattcactccttaaaagacagttatgttacaggagatatttagatttatgaaaatcatgatacatgtgaaaggtagtccaactggatgggtgaacaaaataataatggcataagactgcaagatagcgtcaataaaaactccaggtatatttgttaaaaaggtgtatatgtttacataaaattaaagatatttactgaagacaatttatagagcattccgtatctttcaaacaaggaaatatgcacctggaatatttctatctttccttgacagaaagctcatgttctagatgtttcaattaaaaactgggcacctggcaaacacttaaatcagggtacctaccttgggctcttcaatctggagtgtaattacaaattcgatttttggtggcagcgcctcccttgtgccttccaaatacctctttatattcgtcagggcatttacatcttcaagttttacttctccttggttaggaaacatagaaaacagcatttccatctccagtagctgaagctgaaggctttctttcaccgaagcagacatgttgcctcgcaatcagcctgcctggaaacctcacaaggctcagggacgctgggtttgtcaatgccagccggtatccagcgaaatttcccgaaggtccctttacgtggaagcaattctgcaggaacgctttgcaccgagagctaggggcacaaaccagacacttgcactcttctttatttcctgactccaaaatctagtatgcacaacatcctctaaaacactccgtaaaaacccatattctgcgtacccgggctccgggttcccgcctcccgcaccccgcactagataggggaatctgcactttcaacaggtgtttggaactgtcccgctgcaggtggcaggcagacacctgcagacgctctgcaagcctgaattctgggaaaggctggggcccggcttccaatcccacccggggctcgggcttgggcggagccagacgctgcggcgagagaggccgcagtgccagcaggatgggctccgagttccccagcgccagtcgccacccctcggtcctggactcgcggaccgcccccccccaacaccgsggtggccttttcgcttgggccgcattccagggctccggacgtttacgattcactggcctctgccccgagggacccaggataagggtagggggtgtctcagaggtcattaaataaaagatgtttacagtgagctgggggaagggggtacccggggagacggcagccggagaaggcttcccagattcaaaggtttgggagatgacctcgacgtcggagagggggatgcgggccgccggcggcgctcactgtgggcgaggtcgccctgtccgaggcccagcgacggggctgattccccacccccgcccctagccaagaccactaggaaccccggcttcccaggaacgcagggcctgccgcccccagaggcccggatttggaggcggaggctgtgcctccgcggccgcagtgctctgagggcccgcgaccctcggccccaacccccgggccaccgcgggggcctcaccctttctggtcactcaatggtaacagccccasaccccgctcggaaccgcagccgcagttcctcaggcgccagctgcgcgcgacctgcggcgaggcgggggcggggctggcggatagtcctctgccgtgattggccaggggscgtggcgacgagccggaagccacgcagggccacgtctgcggttctgaggactgggtttgggtgcagacgttgttgcttgggcgcttctccgctgcgtgtaggtgaagggggcttcctgaccgaggtaagccgggccccgaggctcggagttgagaagggagactaccggtcggcaagggctcggtgggagcgggacaggtcagattctcggcccgacggaggggctagtggtctggcgggcgactgaccgagcggcggagcgcgcgggacacacctacaggcccctgcgccccgcgggcgggctggtcgggacgggccgcgggtctcctgccggggctctggtacgtggacctaggcggggacctcagggtggagtgccgggaatcacccttgtgcggtgattcgagggtaggcgggagagaggcaccaaggagatttgaagattgaatggagagtagggggatactcttaactttttgcgtggacgctggatttggcaaatatgctttcaataaaggcattcgcagaggcattgaaagtagttgtagggcctaaaacgcatgaaaggatgaactcatattatctggacctttttttttttaatggctttttggagttaacaggactggtttacactcttatgaataatcatgacacataactgactgctcagtttttacaaatatgtattcatccttaggaaagagatctgatcactgtcttgaactaaattagtttactgaatgccagctttttccaactggacaaaagcaagtatttttcaccatttcttgcaagttctgttcattgaagcaatgaaggacaataaagaaaacaaaattatgaggctagcagctggcggactgctcctcatctctgggctaattgggaattaattgacccaggaaatgtagtatatggactactgaaggaaaactactgactgaggttggaaaccccaagttccacttaatgggagtatcccagagaaaacagtattagtgggctaagggccgattttttgttgttgtttgttttgagacggagtctcaccctgtcgcccagcctggagtgcagtggcgcgatctcggctcactgcgacctccacccgcgggttcaagcgattctcctgcctcagcctcctgagtagctgggactacaggcgcgcaccaccacgccaggctactttttgtatttttagtagagacaagggtctcaccatgttggtcaggctggtcttgaattcctgacctcgtgatccgcccgccttggcctcccaaaatgccgggattacaggcgtgagccacctcacctggcctgttttttttttttttttttttttttgagaccgagtctccctttgtcacccaggctggagtgcagtggcgcgatctcggctcactgcaacctctgcctcccgagtagctgggattacaggcgccagctaacacgcccgactaatttttttgtatttttaatagagaggcggtttcgccatgttggccaggctggtttcaaactcctgacctcaggtgatccgcctgccttggcctctcaaagtgctaagattactggcgtgagccaccgctcccggccgatgttttatttttaaaagtaaaggaaaaaggtggcattctttcagaagaagatattgctagttttagagcaacatcttagaagggtgtcctgattgtttttagcaaatggaaaaagatctgggtagtcttggagaagaaactgttgccttttgcttttcctttaagaatatgtctctgtagtttgggagaaatagcaaaagaaccacaaagatttctcagatatttggggatatgtagtttcagtccactcaagaatctgactttaggcctcaatccgtcaccagctatctatgttaatttaggttagtttccctttttgtaaaatgaaatgatctttgagctcattggagtctctgaataggtgtaaaatcttcattttagttgagagtggaccaatttaagtgtgcccggcgtccaggatagtcctggagctaaaatgggaggagagtggggacaatctgctatctgccctgagtctgcccaggagtggacataccaagttggacaacatcttgtaggtaattctaacccacaggacttactctcctgcccattgctctgtcaaacatagggttctttgaggaggttcaggatgagacagacctattcgtttggggtggcagtttttgaarcaaatggttcttaagaaattacttgttatgcccgaaacaatatttcttaattttgtagacatggatttaggtgctattacaaaatactcagcattacacgccaagcccaatggactgatccttcaatacgggactgctggatttcgaacgaaggcagaacatcttgatcatgtcatgtttcgcatgggattattagctgtcctgaggtcaaaacagacaaaatccactataggagtcatggtaacagcgtcccacaatcctgaggtaatgggtttagtgccctgataaagcagaccattatttacaagaccaagccttagtgtctgagcaaattgacctaaagtacaaattctaattctaggaatgtgccttctcatttatatgtgctttggatgtgaaacaactttttttttttaagagcatgatcattaagctcatgattcctaagggtgtggaaagaatgaaaagatactgtcattttttggagtgtccatattagagaaataacaatgtccttccaaatttattgatttaagacattttcagtaattgaaaattgtttcctttgttaacttagcagtgattaaagatattggggttgggtggggaagggtaaagatttgaaaagaaacattttgaacattttcagacaggtttttatagctcggcaataatttcttgttctgaatgaacaaacaggtgagctttggcagaatattgatgacgcctgatagttctagtctttgtgacagttagattttaatcaaagtattctttttgacacaattattttttcagctttattgaggtataagtgataaataaaaattgtataattcaagtcatacaacaccatgttttgatatatgtatacattgtgaaatgattaccactatcaggctaattaacatatccattagctcacatagttaccttgttttgtggtgrgaatacttaagacgtacgctcaacacattttcaatatatattattatgaactatagtcaccacgctgtacgttagtcttccagaacttattcatcttataactgcaagtttatgcccattggccagcatctccccatttcccttaccctctagccgccaccatactactctgtgtttctgtgagtttcacttttttacataacacatgtatgttatgagcctgcagtatttgtcttcatgtgtctggcttatttaacttcgcataatgtcttccagattcaaccatgatgcaaatggcagtatttcttttttaaggctgaataatattctattgtgtatatataccacattttcttcatccatttatctgtttatgagcacttttgttgtttctatatcttagccaacctcttgacacaatgtagttattctttattagctataggccattaatacagggtttgaataatatgcttctatttgattgctggggctgtgggatttttgcctttgtagctaaatcagcagcaagttaaagtggtgtaggtctgtgaaggattgtaacctcctcttcccccaaacaagggcattgcttgtccaaatatgtgatcattataaatgtgtatatgtctaaatatgtaagtcaccataattgattgactgattgacttctaggaagaccctcacatttattgctagttccagaggcacttctcaaaatgattctcttttctttcaggtgacattcactgtgaactacactttctttccacgaatttgagcagaacagtgttgggaggcagttttcagtgtctgtcctacccgctggttgacaagctggctagtgtgttcttggagttccgagtcatagtgagaaggatctctgtgtgcccttattctgctccacttgtgccctagtcagtttatggatagtggatgcacagatcacagccttttacaaaggctagtgtggcatagtgtttttaggcgagtaagatagacttgctgttttaatatcagtactgacatttgttagctgtatgatcataagcaaattacctaacctctctgaagctcagttttctcgaagattgaaattaaaataggattattagtttaattgattatgtgtgtcatgaggatttaatgaggtaatatatatacataaaatacctaatccagggtccagtattaatatttggtgtttattgttgaagctgctcagccatcactgtctttggttgaagggaaacagcttttgagttctgttctcaactcagcctcatgagtatgcacagattgcttattgtttgtttttcttttaaggaagacaatggtgtaaaattggttgatcctttgggtgaaatgttggcaccatcctgggaggaacatgccacctgtttagcaaatgctgaggaacaagatatgcagagagtgcttattgacatcagcgagaaagaagctgtgaatctgcaacaagatgcctttgtagttattggtagagataccaggtgatgataagagttactggtaaaaaaaaaaacctttgggaacgtgatataaacgattgtatcagttttaatccaagacaaatggaaagaagtaaagtggaactaccctgagttgcatgtctacctgcctggcctttctagtaggatgtagtagctaagtcactactgcagcttggggtttggagtctgactctggtttaaaaccctactccaaaacccaagctgcagaataatgtatgtaaaatacttcctgacacaagagaagcactcaataaatgtctcccaccccctctgtaggtttatttttttttccctacagagtcaacacatgatttgaactcattatttttaaagatttactttgtaatctgtgttattattgtttcaaatatttatatcattttcccatgctggagctcactgtaaactacaatattattttccacatagttctgttttgcagcttttgcctttcttaacaaaaatgtctttttgtaaaatattagatgaaaagtatactttgcaacagtagcatttccttttgcataagatctggttttaacctgagattatttcaaaaggaaatttctactcaatctccaatacctggactggtttttttaccctctgttgtattaccagagggttttccagataccgacgatggtagcagagtaacttatgttctgaagtaaattatcccaccacagtaaagtcatcccacatgtatttggttcttaactattaactaatgtaagtgatgaaacrttttttcctacaaggcagtttttttattatttttyatttttttgatacggagtctcgctctgtcaccaggctggagtgcagtggcacagtcttggctcattgcaccctctgactcccagggtcaagtgattctcctgcctcagcctcccgagtagctgggactacagctgtgtgccaccacgcccagctaatttttgtatttttagtagagacgtggtttcaccgtgttggccaggatggtctcaatcttgtgatccacccacctcggcctcccaaagtgctgggattacaggtgtgagccactgtgcctggccaaggcagttttgtaatctgttttattttcagatagataatttgttctgactttacaaaatggaaaacaggttctatatccttggcagcttaatacaagtactgtcttatacacactgtgtatattcagtgtttattgttactgttcttagagttcagacatgttgctgtagtcgaacttgaaaaggtatttgggtatgctgtggttagagtgtcctttatatctattttataaattcatttaaaagccagaatttttcctagaactagattgtgaaaggctactggaaaatgcttataatttaccagttatcttgagagttcatagctttcagttcagataccaggaacttactattttgaaatttgtagcatgtaatttttgcatttgcttgcagaaccagcaaccctgccagtttcaggatgggatatattattttcttccttttctttcctaggcccagcagtgagaaactttcmcaatctgtaatagatggtgtgactgttctaggaggtcaattccatggtatgtagttatcctgagttggaaattaaactaatatttaaaaaactttaatttacaaaagtaatgtatrtttatttagaaaagtttgaaaatwcagatgaacaaaaaatgtttaaaaaatgaactcctagatacaaaatactaactttaaaaatcatcttccaggtcgtttctgggcaggcatgttttgtcttacctatggtagtactataggagattatagctgggaaattctgaactaatacaacttcctttactttggtaaggctgaatttcctcaaataaaaacctttttaagtacttgaagatgatcattctggggagcttttatcaatattattaggtcttccctaatagctggttccctgtgaaatcagctgttacctgtcaagtagtgatgggaaatatttttgacaggtagttctttatgttatatcaaatgacagagaattaagtgaaacaaaacagactaggatccccttctcacactgtgtctgttgtgaaggcactgcctccaccatgttttgaggtgaatattttcctggtgtgagatctttctcattaaaacaaacgtccactcttgacctttgaaacctcctctcgagttccgactgtgttcccttcctgcacggtcagtctggcctctgctgagggctagctctgcttaccttctctgtttcctcctcttctgtcattcttcagctttctgcaggtgagtctgtatccttacctctccttgaaataaatgtctccccagcccacccctgacatccatctgcattgttattgccaaatctggtgggtattgtaaagtagggattattaaccagggacctctgtggcatgtctgggaaagctgcagaggacctgtggacctcatgatacgatgtacagagtgttgccggcacaagcactttcccagggagtgcatgcgtacctctcctcagatactcagagggggctgtgatctaaaaataattttaataatttatgctttaaagatcttacagttgaagtctttgtagctttccataatgttaaagctctttctttgagcttctacttgcttggccactattccatattggtcttctctgttggctcctcttctgtctctttcagggagggcattcctcgggaccctctttcattctgcatgatttctgaatgattatctctactgccatagcttgagctaccttttttcatttatttatttatttatttacttatttatttatttattgtttgagatggagtctcactttgtcgccaggctggagtgcagaggctcgatcttggctcactgcaacttctgactccctggttcaagcgattctcctgcctcagcctcccgagtagctgggattacaggcacatgccaccacacctggataatttttgtattagtagagatggcgtttcatcatgttggccagactggtctcaatctcctgacctcgtgatccgcctgcctcggcctcccaaagtgctgggattacaggcatgagccactgcgcccggcctcattcatttgttaattcatcaaacatgttttactacctgctgtgtacatccctctagtagtctatttctgtttcactgtgtatcacaacccatagtaagaaacccattatgtgtcatgacatgtcaatgtgtgcttgtgtgtataactgaaataatagtttcaataaacaatgctcatccagcctacatgacatgcagtcatctgtttaaaatgcacaaatgctggttgtgtctcactaagtaaattccatggcccattggcaggctgtggcctgcagtttgtaaagcattggtctgagtggtgtcttcccttaggtggcctgcttctgtctcatgttcaccctgccccaaactgtattctttctgtcatccccagaatggttgtctttttcagcattttcattctgtcgctagaaccatcactcttctagtgttttagtctagaaaaagttgagagtaatttttttaacctttccttcatttctctcttcagcttagtgtatttcagtaaatgaaaaaaggttaatgtagctgcaacatagggagaagaggggctaggagaagagagtagggaggtaaggtgggactaattcatacaaatcttggaggtcatggcaagaacttgggctctattccagatgcaatgggactccattgaaggattttatgcaagagagtgatatgatcacattttcatttaagccagtccctctgtttgtcacagagagaagggaaaggaaagttgttaagaaagggaaacagaccagctaggccgctcttgaaaaattggtattgcattcaaaggattttgtgatatrtggggagaacagaactgtgaagaacacattccaggtttctgagttgatgagttggatagataatgcttttcactgggtatatatactagtcatttagtaaatgtttatttggtaattttgataktggtcacaaaattattttgtttcttactttagcatgtcttttagaataatgggttcctctagtaaacacttccattaaactaatctaagctcttatttgtattttttgagcttctccatctcctcccatctcatcattataccagagctaaggttgccttcataaggtaccatttctgttaaataacttcagggctcaagaatttaaagtgactcctttttgcctgcagtcaaattcttgtgtttgaggttcaggtccaactgacaggtgtagtcactgagtatttacttattggttactggtccatctttgcgatccatttttctttgttttttgctcatggtgcttttcttatatgttagctatgtttaactgtaagctggttttctttctttttgtttttgaaaattatgggacgtttttgaggtttacaatgaaagtatagtcctttggtaaagtttagtctggcttctgctgggtacctggggcactggctgggttcactttaaattgattcatgacaggccgggtgtggtggctcatgcctgtaatcccagcattttgggagtatgaggtgggtggatcatttgaggtcaggagtttgagaccagtctggccaacatgatgaaaccctgtctctactaaaaatacaaaaattagccgggcgtggtggtgggtgcctgtaatctcagctacttggcaggagaatcacttgaggctgggaggtggaggttgtagtgagctgagattgcgccattgcactccagcctgagcgatacggtgaaactcygtctcaaaaaaaaaaaattcatgacaaagttcctttggactcctgtggttatgtatgttgggcaggaagtccatgcaagggcctgtgcttggtaacagctcttcaagaatgggttttcccgtcttccctgctcagtgttaagataactgtcctgggaatggtgacatggggtgattaatttctgactcatcctcggactgaagatatagttctttgggatttcaacttcatgagagtctggtcttctactgggttctgcatcttagatcagcatgggctttttttgctctgaaaaccgtagctcaatttctagtttagaggaataacttcagaacaaaactggcttccgaactagcttagatcttggagttcttgccttcgggtatgttttggcctgataattctgtcacttttcagcactgtagttctttttaaaaggaggtttttgtcttttatctagcatgttggttgtttccaggaggatgattcatctgaattatgtagtttgcaatgttactggaaacagaactcaattattacttgtctgtattgctttatatttacattgttacctgtttatatgtaatgattggttttttggcttcttatagtcatttatatttctttttaagatcatttttatgttttctaagatgtctgagatgacacaaaaggatttgtcaccctgaaattcctacacatgaatgcatttaaacttttttctctttgttaagaaatgcggtgaattgctttttgtatttctatgacagattatggcttgttaacaacaccccagctgcactacatggtgtattgtcgaaacacgggtggccgatatggaaaggcaactatagaaggttactaccaraaactctctaaggcttttgtggaactcaccaaacaggtgaaaagtttattgaacatggttaaagttaaacaaatgaataaagtaacatggtctactgaacaaattatcttgtttgtcatgcctcctctttccttttccaaagatgctgcatatctccttttttgtttttctctagggctacacaaggttctggtctatgtatcctgctaacttacattggcgtttacttggcaaattatgtagtacattctgagatactttggggaagcaaacatggtgggggtcttgacgatggtatcataagtattcattcagatgaatttgatcttagttaatgtaggtgctgttggcttaatacctgaggcatgtactattgagattttcttctaggtatattggcttgttaaatgtagagagatttgagaagtataattcgtttgatcaacaaatattgagtatatgtccttaccaggcacaattaactaaaagcccttgctctcatagaacttataatttggggtgaggatagctgggagaggagacaattagaaaaaaaacaaatctgcctgatgatgatgtcacatactataaaaagaatgacatgtcattactgcccatttgtctgtgtgcttattcttgcatttgaatggctcccttgtaatattacttttaagagaccctgttaattgagactaaattctaataaagctctatgctataagttgttcaatcagcaaaactattctgttgttccaggtgtttttaaattttactttagtgttttataattttaaaaattgaaaaatgaacacaattataattgataaaatttaaaaattaaaatgagttaactaaatatttacatatgcacatatgtatatatgctttatatttcacatttatttttataacttgaaatttttcttccatgtgtctttttcctttgtaggcttcttgcagtggagatgaatacagatcacttaaggttgactgtgcaaatggcataggggccctgaagctaagggaaatggaacactacttctcacagggcctgtcagttcagctgtttaatgatgggtccaagggcaaactcaatcatttatgtggagctgactttgtgaaaagtcatcagaaacctccacagggtatgtcgtactagcactgcaaaaatttgtttttaatgctctttgaagccaatctcacttataaactaaggtggtaaagtgagttaagaatcttgcagctattcctggctctgccacatttagacattgagaagtcttcccactctcagagccattgaaacatggtctgctctctctgcctgtaaatcacaccattcctcatagtctacaggaaatcaggtggggaaagcaaagtcaggaaatggcattctagagcagtggttctcaaactggcatgtgtcagaatcactttgagggcttgttagcacacagattcctgggctccacttctgagtttctggaggtctggcataggatttgcatatgatagaaatttgcatttctatcaagtttgcaggctttgttcccagtgcttgtctggggatccctttttgagaatcacagatctacaggggagcatagtaagtattattagataccttatctgaattaaatacactatggaaagcaaatgtaactctgcttatacagttgttagcaatcagtgttttccactcagtgcagaataggaggaagacttttcttcagattttagttgtagtaagaggtgttctggatttatctgcattatagaccctaaattatttgcttaggccaaacctgacttgcagatatgttttgtttggctggctgcatttgtgtgtttgtctgtgtgccactgtttaaaaattccgtgacttctcttatatattggaatctctagcatctctttaccaaaatcagaaaatgttcacacatggcattagtccactrcagtcagatagatgctgctcccctaaaataggacatgcattctggaactctacagacttcatccagttgcctcattcattcatgttattatgctttacttagtaagcatttaaaatgtcagtgtagtcaaccaatttgagctccttttcattgaattgcttgttttgacatttacttgacagttcagttctgccacttatttatccatttcttaaatactgagctcttactctctaygctctaggctttgggactacagtatgaacaaaaccatagtccttgctttcctgaagcttgcatcatgtcctttcatcaatcttatgatcccattcctgacaaaagccttttacttcttagttgtctcatgttgaatttgtcactctgctgctgtcatggctaaggaatagccaaattttctaataaatttgatgtgacaattgctgagatttcagcaactttatgtaaatttcacaggccagttatctctcaaagttataattctttgctcttaattatcagtgtttctttttattggtggtatgaacaaataaaaatcatttctgttagaattaaagcacatacatcatctagtgctgattattttttctatgtaaaggagatcacggtcctaggtaaattacattcagaaatacatgtagctttcaaaaaacctttatgggacacctgtctagccaaaccaacctgcttataaagtggaattttatggtagtattatagcaaatatcagcatagattttgaatgctccttttttcactttgcagtgaaagaatttgacctgtaaaaaccactaataaactatgtactatttaaagattatacactatttaagattaagacattgatttttaggtggataattttaagagaaaattctaaaactctttataataaattcttagactgaaatgcatgttaaattatcctgtgtgctaggaatggaaattaagtccaatgaaagatgctgttcttttgatggagatgcagacagaattgtttattactaccatgatgcagatggccactttcatctcatagatggagacaagatagcaacgttaattagcagtttccttaaagagctcctggtggaggtatggtggggggattggctaccctctaaaacaagacttagtagtgaaatagttccatattttacaatcatttgtcagaagggcacaatttatgacaaattctttacattagtgggcagaaaattaaaaaaagagcagtggtaatacccagtcatttgaacatttgaggcattggctttggaacctgaaggtactcttttcctccttatactggctgagttttgtgatttgaagctttaggaagttttgcttccatcataattgaaactttgatgacagttctgtggtcactccataaaagccctaaattctaataggaaatctcatcatctgatatattaactgattatgataagcttagtaatgtgagatttgtttcattttgctattttagaaataaatctcaggctagctttaagtacacaatgtaattggaaattattataatctggaaacagcatactttaagaatttaatagattttttttttttttttttttgagacagtgttgctctgttgcccaggctggagtgcaggggcgtgatctcggctcattgcaacctctgcctccctgggctcaagcaattcttctgcctcagcctcccaagtagctgggattacagatgcatgccaccacacctggctaatttttgtacttttagtagagatggggtttcaccatgttggccaggctggtctcgaacttttgacctcaggtgatccacccaccttggcctcccagagtgctgggattayaggcgtgagccaccgtgcctggccagatacttttatttaaaaaattaaagaggtgaagatcaggagatacaggcttcttaaaagaggaattctcatagaattgttttaaatagtgttcaaatgtattttaggcttttttcctggcatacatgtaaattttcagtcagacatttttggcataaactaaggcacaactgaactggctgataattttggtagcctttagaactctcattatatttgtttttgtagaccatacttttgatggcaagttaagtatcattgtttttgtctagattggagaaagtttgaatattggtgttgtacaaactgcatatgcaaatggaagttcaacacggtatcttgaagaagttatgaaggtattgaaccatttttgttttctggtagtttcttaattaagatcatgtttctgtgagaaagatactgccctcataaaagtgattatgttgtagtgcatgaagctgagctgctgttcatgtaaaggtaaagagaaataaataagaaaaaatttagttgtccttgatgaataaaggaaaacttctttccttccttttcttggagttttcctttagaaaacttggaattctttctctgtgcctttgtaatgaatgtaagtctttctaaaggcctaataagccagttttatagctcaggaatacttttctttaagggcctagagtcaccaatttcaaatataaacatcaaggaagatagctcacctatctcccagtctcaggagagtttaacttaggtgtttgcgtccaatttgtaactatctacctgtcacagaggtatgaaaagttttattactcctttagagaagggcagttaacacaggtggccatccctrttaccaagtaagtttaggataaactatgtgtgtgacaaatggtggtttcaagttttcctatttgaggactagtgttaaagaaaaaataattcatgacacttgttaaaatggtaaggcagacttgattcaggactgttgtgataggtacagggactaatgtgatggagttttgcagtggtaggagaaagattgggctcaactccaaatatagtaaggaaaagtagggctttatagccaaggagcagggtgtgtggggggtggtcagtggatgaaaaattactgagaggaaacatgagggtaagtgggtggtattttggctaaactgatctaacaggacttttgctgaaggtaggccagggcggtcacatattacctgggggatggtagagaatgagaactcagatcrgatgtcaagagtggtcatgtatcaggatgagggattctcgctaagctcacttagcatgactcttattaaaatcgggctattggaagacatgcctaaggacaaggcctagtcaggcccacctaaacctaactaaagtttggtcaaggagagaatttttgtcattagccatcttttatcttagcaaattgtattggaatgtgtccgcttggctatattaaagggtgagcgtttatctttgctatctcttagcaaattagcctgtgattgaacatcagtttggcttaatacttattcagtaataaaactgtttcttacccttcttttttttttggagaggttttctggggtggtgggagattctgtttctaattatttccccggtgtccaccaggtgaccacccttggcaccacactacttgctcggagagttaccagggttcatggacaaaactggaagtctgtttgcctatactttctcattatcgagaagttttccaacttttttgtacctcattttgtacctcgttctggcatttatactagttttagttacctttccattctctagaaagcaggaattacaaagtcagattcctgcaggatttggacaggtaaagtgaatgagggcagcagggggctaaaaacaggtcagtatgtgccagctgatgtcaactgtagtcacactcttcaagagaagcaggaaatctgaattttcatgtgatgttcctatttgtttaaaaagaaacagtggctgggcaaaacgaaatatatcttgaggctgctagtttatgacctgattttaatatatggttataataagctcattcaagggattccatctggggcccatttgcctgcctttcacagggattgggttatttcacagtacttgggttattgttttaggattttcattttctgtcttaaaaatttattacagataaaataacctagtttaagaaactgttacttctcaactcactgtcttccagatgaaatatttttagcccttgccattcctgaggtctcctacatccaatctaatgctgatctttcttttgcagtttttctactatcaatctttccttaaccattcttaaagctctctcagatccatccatccatgactttccctattcactattgctgatccagccactatttcttactgggattagtcctagaagcctcctcattccatttcttaaccttctaattgaacttgctgctatttgcaaacaaagttttattggaatagagctatgttgatttgtttatgtatggtctgtggctgcttttgcactgtaatggcagagtaattgtgacagagaccatatggcctgcaaagcctaaaatatttactgtctggcctgttacagaaaaagcttgcaattctgctctaagctattctccacactgtagctaaacagctttctaaaacagttaggtcatgtcacgcccccacttgtaatctttcgtgtcttataaggagaccctcatctctctcaccgtgctttacccttggctgcgtgcttccagagtgtgttcatgcttccattgtatacgtaccattttgtattttaatgcttaatcgtcttcctcactggactcggccccagtattttgttcccctttgtatctctgggatactaggtatgcaagaaacatttgacatctgagtaattgctgtatttctttaaatgcatgtgttataggtrcctgtctattgcactaagactggtgtaaaacatttgcaccacaaggctcaagwgtttgacattggagtttattttgaagcaaatgggcatggcactgtaagttctcttaattatagttggccttagctggcacttttctttatgatgagacttctatatctgggaggtaataataggtaatattgtactttgttgaaataattggatgtgacaaaaagatcctttggttatcttatatattgatgtattatgaaactgtgattctcttttacatggtaatgattcttctttgaatgtgaagagatatactaaggtgttttgaatagttttttaaaatttacagttcttaatttttttataagtatgttgtctatgcattttccggctggccataggagaggaaaagaaaaattcagtcgctatggtgaattgcaaagtgttggaaagttgataattaataagaaatgaaaatgaatttaaggtaactagtgataggcataaaatgtttcaatttacattttacataaaattacattttaaagtgtataatttagttttttgtagattcataatgttcagaatatttttaaaatgtttttatactcacctcatttaatgaatacacttgaggtggctatcagaacatttgaatcaaagccaaataattttcctcattaatttaaaattggcttttggagggcataaatataaaaaggggaaaaataagttcctacaaaatgcaattaagatataactttagtgatcgaatggagaagttggtaaattattttctaaagggtagagagtaaatatttttggattttcaggccataaggtctcttacagttgtttaactctgctgatctagcttaaatgaatctgtgtggttgtgttccagtaaaactttacaaaaacaggtgactagcctgtgccttattttatcaagaaaaatgtatttcatcaagtagttgagcatagtatgctaatcttgctcagtattaggcctctagaaggcagtaaaaaagatgagtatttccaaatgrgataagactcttgaggagcatgatgaattatatattgtaatgactatccatgacattatttgccatattttgatgaatactatgaactcttaattttgcctagctcatccccttaagttttagaataaaactatactagctgcaatgaattatatccttcaaagtaaaaaggatacagacaggctctaagtaacctggttgcacagaaatgatttagctggttaaagggaaaacatgaacttactgtgtgtgcttgcctcttgtcaaggtggtgttttctttgtaatcagatgtttaaatttttataaccagttatataatccgcaaataaaatttttcccctagtactatcctctgggttttaatgtgatcttacattaatttcatacattttaaggctgccactatttttcccctcagtttctccagattgactaggagggaaaagtgggttagctagaataataktacttatgactaggttttggatagtgttttgagactgattttatattcttttgctgcaggcactgtttagtacagctgttgaaatgaagataaaacaatcagcagaacaactggaagataagaaaagaaaagctgctaagatgcttgaaaacattattgacttgtttaaccaggtcagaactgatggggcagtggactcttggttacctttacattattcagaagatggacagaacagagtgtgggtgcatacaaaattaaagtggagacgtcctggcctggtggcttccttctaatagtggtatattcagttgagatttataatgaaatggaatgacagaacattttttaatatgcttcccttcccctacctcttatgatggaaattttcaagtatattgggtagcttctacctaggatcacagattcagctactcagtgtatacatatatattattaatttttttttaaccaaacctcgatgaaattaagtaaaaataactggttgtcaggccaggcacggtggctcatgcctgtaatcccagccctttgggaggccaaggagggcggatcacgaggtcaggagatcgagaccctcctggctaacagggtgaaacctcgtctctactaaaaatacaaaaaattagccgggcatggtggygggcacctgtagtcccagctactcgggaggctgaggcaggagcatggtgtgaacccgggaggcagagcttgcagtgagccaagatcacgccactgcactccagcctgggtgacagagcgagactctgtctcaaaaacaaacacaaataactggttgtctcattgacaaaggacatacatgtgggttagttggggttggagtgtcgtttggctatggaaaagcagtactcagggtagaggaaagcgattcaattatttgagtgtcttgcacacactggacactttatataccttgctgtgtaatccttacagtaacacagggagaggtgttactgtaatttccattttataagtgaagaaacagagatttatcttcagttatatcttataccaaagctcatatttctccattttaccttgatgctttctatcaatcattgtggggtaatatctcaaaagggatctatttataaaaagaaaaatgagtgatggaatgttaggctgagccttagagttatccagtctaatttcattttataaataaggagtactaaaggcaagtttctcaagagctagtttcagtattctttgttatacctttcattgtcttccacagagatcttcacctcattgttcgtattttatccatccacaaaaacacttcatttaatcatgctgcatgtgagaaagcacatgatataggctgagtatcccttatccaaaatgcatgggactagaagtgttttgggttccagattcactggattttgggatatttgcatatatataatgtgacatcttgggtatggcactcaagtcggaaacactaaattcttttgtttcatgtatgttacataagattaaaggtggttttatagaatactgtaaatttagtgcatgaaacaaagtttgtgtctactgaaccatcagaaagcaaaggtgtcactctgtcagccacccgttggacaatctgtggttgtctggcatcaccatcattcctaaaactctgaatttatatgctatcaatcaataagcaatcaatcatttttttacacttattcacacacaagtattttaatagtaaaaaatatgatacatatctggcatgcatggaaacgatgtatcatagctgaaggaggctgagagggtctttttcccttggggatgctgaatgaactgcgggcctgcctttagtgggttttttttgttgttgttgttgttttgttttgagatggagtctcgctctgttgcccacgctggagtgcagtggcgcaatcttggctcactgcaacctctgcctcccgggctcaagcaattctcctgcctcagcctcccgagtagatgggattacaggcgcccactaccacacctagctaatttttgtatttttagtatagatggcgttttaccatgttggccaggctggtttcaaattcctgacagtgaggtcaggagtgcatttgttttttattaagagacaaggtcttgctatgttgcccaggctggagtgcattggctgttcacaggcattatcacagcacactgcagcctcaaactcctagcttcaagtaatcatcccatctcagcctctcctgagtagctgggactgtaggtgtatgccaccacacctggcagttgtatacccacattttgacctgtcacaggaggccaggtgtggaatttttcacttgtgattattttggcactcagcatgtttcagattcaggttgttcaacctgtactgtgattggttttctaagaaaaaacatccatttccaagatttgcttgtgttaagtggtttcttccatttgtttccccatttgcaggcagctggtgatgctatttctgacatgctggtgattgargcaatcttggctctgaagggcttgactgtacaacagtgggatgctctctatacagatcttccaaacagacaacttaaagttcaggtgtgagagaaactttaaagtaacttttttgaatattagctaagtaaaacctattatcccaattctcattatatctcactgacatatgtttcctatttcattctgtacatacacatatgatacatagaaaataaggccttatgggccaagcgcagtagctcgtggctcatgcctttaatcccagcactttgggaggccaaagcgggcggatcatgaggtcaagggattgagaccagcctggccaacatggtaaaaccctgtctactaaaaatacaaaaattagctgggcgtggtggcacacacctgtagtcccagctacttgggaggctgaggcaggagaatcacttgaacctgggaggcagaggttgcagtgagccgagatyatgccattgcactctggcctggcgacagagcgagactccgtctcaaaacaaaaaaagaaggccttatgatacctaattgtattctcttacagctgaaaaaaaaattatagaataactaagttcatttacttaacattctattgtctgtgaagtatttggtttccaactttatgatataataaataatatgaatgacgcatcacttttttaaagagattttattatggaaaattaaaaatagatataaaaaaattaaaaatagatataaatgtagagaaacaacataatgaacttttgtgtacccagcttcaacagatttcaattattgccctatacattcttcataccccctcccaatactcttttgtatattttatttagagacgagatctcactatgttgcctaggctggtcttgaactcctgagctcaggtgatccttctcccttggcctcccaaagtgctaggattacaggtgtgagctactgcacctggccccaacattattttgaagcaaaactcagatgccctgtcatttcaagtgaaagtacttactctgcattatgtttagttcacagagtacttcctgagggagagaattcagataaattgctaattgatttctgtacatgtttatgccagtttacacattcaccaacagaatttgtgaaagacaattggaggtactaaagccacagttcacagaaatggctgattgttcagattatttttggcatatttaagaaattcttatcggtcttcttatataatgggctaccacttatcctgtttttgtgtgtgatatgggacttagtcatatcgtatttactggccattatcttagtggtaactctaagcatttgtggaaatattttttgccaaaggtaattctttatagactgaagaaaaagagaaaagttgcacaaatgttgaaattaattaccctgaccttggagaaagaagttttaatgtaattttatatttagtctggcacttttcntagaatgtatgtttaacaggttaagcttctgaaaggaagtgtaatagagtaacaaatatgaaatgcttgcacttaggttgcagacaggagagttattagcactaccratgctgaaagacaagcagttacacccccaggattacaggaggcaatcaatgacctggtgaagaagtayaagctttctcgagcttttgtccggccctctggtacagaagatgtcgtccgagtatatgcagaagcagactcacaagtaagctgggatagttctrttgaaaaagagcctaatattaggtgatgggcaggcaaactattttaatggtttttagaatctcactatgatgattaaggctttattttgttgagccttttaggttcacattaagactacaaaattattttcaccagcagtaattatacaatttaacaaaattagacccacttagtttatttccccaaatatttttgacttattctagacttcctgaaagtgtcatatttttaaccatggcaggaataactaataaatacttagtttatgcactataaggtagatgatccttttctcttcttttaaaaatatactcttgtgacatgaaaacaaccagctttgtagttcatttctaagtcaactgatagcattctggactcttgatttgtttttcaaaatatttcctttaaatgacagccttactctgtgcctgtttccctgacaggggtcaagacttgtggtctggatttttattatttggcctcttcacatactccttaaagtgtgtgcaaagccagggcaaagtacagtgagtgcgctgaatagggaatcaggaggagacatttggcagctttcctgcagaagcttaagccatctcagagtctaatgaatatccatgatggatgaggagatggcaacagaggcattagtacttacttactgttaggccaattgtggattaaagttttattgaattttttcagttgtggaatgatagctatttttataatctgaattgattaaaaacttaccttatttagaagaatttggtctgttttccgtttatttaagggctttggaatttgttactgaaagatgaaaaaaggttttcattagaatttgttagtgaaacaaaatcaagaatcacccctctcttccccagagttccaagtaacatggtcttgcccatgttagacacatgctatgtctttctcatctaatctcttttaatgtaatttgcaggaaagtgcagatcaccttgcacatgaagtgagcttggcagtatttcagctggctggaggaattggagaaaggccccaaccaggtttctgaagataattttcatattcctgagaaactggactttttacaagtctttacaaaactgtcaataataatggcagtactaagagatttataatcataatgtttacaatgcagcctactggattgtctctagatctgtttttcttaaacactaacagaataattctttataaataggtaagccttacacttgttaaagaaatttacctctaatttcagtctcactaatgtaaaatactgggacttaagtatacaattcagtcactaactgtacagttttatgtggggaacaattcatgcaggctactggaaaattaaatcttattaccaactccttgtgatatctttgccatyaccatcacatgagcaagatgatgttttgcagcattccccattgctgatacaaatggagagggcagagaagactttatacaaccagtttttccattgcagagtcttaagaaagattattagatgacttacctatatgactaatgccatcaggaactcagaggtatgaatagggggttgtccatccctcttccatactgaggtggagatgctcatgcaatacttttaaggatgcatggtccagccttcagttattcttcactgctcttggtgaaggtatgtgggagaaaaactaattataatacgtttcccagcctctgatggagaaggaacaccattctgataccagaacatggttaataaggaaaagagaaaaatccccaaccaatcttaattgaaccaagtctgaaaccaatggaaaaaaaaaatgggtagtgtatattttgcaggtttaagacaactcaggacaataaaaacaatggactttacatgtgtatatatatagctctcttaggcaccataatcagtatgagccaacaatatttaaacttgattcaggccacattcagacatttgctcttatatacaartatttaaattaaatacaatctgaaatgtgttctgttacatacaaaaaaggaaaaactatacaacgcagagcagtgtgtgtgttttaaataattacatttacatgtaagctaaatggaaccagcaatggtgctcaagtttttatcatcccttccagaaaatctttttctaccatctcttctattttttgcctggctttgctggaacatggtttgtggttctccagtttcatgtccttattagggaaggcatttgagtagaggataggactccctgagtgtcctccacatcggcttgtgactttgctgttgaagacttgactgagcacattgaagaacggcaggagctgctccatactgcgcacggtgcagatggtgagcagcaagtgccctggctcccaacccaatgttctccctgagttgtcttcctctggatttttctgcagaaaacaaaaagtgaactggtattaatacaacagacaatgtggtatgttagaaaaattaaaaatatataaactttggcarttggtcaagaaatgaatacaaatgacattaagtttctaactcctgacctgatcaaaacccttggtgcttctgagaccttttactgccatttattagttttacatggagcagtctaacattgtagtaatagttcccaactagaatgcgcagataagcttagttaacagaaatagctttgaacaggaatagagtcaaacataaaagttttatgttgtgctttgtatttactcaaaaagctcccaggtttctgaaccctcactactgtaaccaaggactaggtcacaaaattactacagaaaaaaggaacaaagtgctttatacatttcataatatatccccttttattataattagttaattcccttttatctaaatggcctaaatttgccatgatggtagcagtgtccaaagtgaataattactgtcagtactgcatcacagagaaaggaagggatccctcaggagacactgctgtctccttctgggttgtgctaaacaacatagggaggaaagctggacctggagtcaaaggaattgagttagtgtgctggctctgccatacttacggcacccttgggcaggatatacaaaggttcctcacttataaaatgggacagtctaaaactaccttttagtagagaagtcaaatgagaaggtatgtgaaaactctgtcaactaaatataaagactaataatttgggtattaagaggctagtttgagaagccacctgaattacacaaacacagctacagacatcattctgtctagagaaagataagagagaacaggttggttgaacttgggcagaatcacagatacaattccacactaaagaatgaaaataagcaatgaactagacagaaggaagaaatcatgaagacttaggaagcagaattacaatctgtcatattaacaaatggagtttgccttctaagatcagatgttgctcagaaactttcattgtttacctaataatttaatatcactagtttcctagtgggtcaagcagatgcaaaatccagcttattttcttctatgtgctctcaagcttattgcttattttaaagtaaaatcctgaaaaaggaaaatattaggttggtgcaaacgtaattgcggtttttgcattgttgaaatttgccgttttatattggagtacattcttaaataaatgtggttatgttatacatcattttaagcatatttctcactttttttttgctaatgacttattgctgtttatatttattttagactatggaaatgatgttagacaaaaatcaaatttagcgattttctgagttcaaaataggttataaagcagcagagacaacacacaacatcaacaatgcatttggcccaggaactgctaatgaacatacagtgccgtgatggctcaagaagttttgcaaaggagactagagccttgaagatgaggagtgcagtggccagtcatcggaaattgataatgaccaattgagaacatcatcgaagctgatcctcttacaactataagagagctgcccaagaactcaatgttgaccattttatggtcgttcggcatttgaagcaaattgaaaaggtgaaaaagctcaataaatgggtgcctcatgagctgagtgaaaaataaaaaaattcgttgttttgaagtgtcattttctctattctatgcaacaataatgaatcatttctctatcggattgtgatgtgtgccaaaaggtggattttatacgacaactggcgatgaccagctcagtggctggactgaaagaagctccaaagcacttcccaaagccaaacttgctccaaaaaatggtcatggtcattgtttggtggtttgctgccagtctgatccactacagctttctgaatccaggtgaaaccattacatctgataagtatgctcagcaaatcaatgagatgcaccaaaaactgcaatgcctgcagccggcattggccaccagaaagggcccaattcttttcacgacaacactgggccgcacgttgcacaaccaacgcttcgaaaattgaactaattgggctatgaagttttgcctcatctgccatattcacctgacctcttgccaacaaactaccacttctttaggcatctcagcaacgttttgcagggaaattgcttccacaactagcaggacacagaaaatgctttccaagagttcgtcaaatttggaagcatggatttttrtgctacaggagtaaacaaacttatttctcattggcaaaaatgtgttgattgtaatggttcctattttaattaataaagatttgtgtgaacctagttataatgacttaaaattcatggtcccaaacagcaattacttttgcaccaaactaaaaatataagttaaaatggaagagtctaggagcaaaccaagaaaagatcacctacttcatcatctctggtcaaaaacaaaccaaaaaacttaacagctatcacttaagtttgcttcctagcaattatttagcttccagtctagattacaggatatataaaactttctttctttctttcttaactatgacactggcaccaatgrgagtcctgtgactgactttcacatttccaccattactcaattactggtaccataccacctctaatcccctaaatcaaactgcaattcaacaataaagggcgtacagagatgactttgtcctgaaggaaaatgaatatccttgtaccctctatatagctaacttccaaatgtaagagaactatggggtaaccttttgtttctattcctatcaagatgagcctttaagagagggacttttattaagctcttgaccaagaagaatacacttgattcagagtttctgatgctcttaatcagaactatatgtattgtctcaatattaaataaagtcaaatgtttccatacaaatgatttctcctttgacttcaccagtccacacttgaaaaaagacttccttcctgtttacctcccttgtacttgttgacattcagacctgggtttgtgtctcaatatttggcaacttttgctgccatatcataagcatgaaacagccaccctcacctgatgcttggccatctccaatccctccaaaatcactgtcttaaagtcctcctccttgtcctgtggaaggaaagaggagaactcacagcctttgttccagtgaaaagtatgcttggccatgaagaccttgtttaaggtgatttggatgggaagatgcctttcaatcaaaatagttttcttattctgtgggacaaattttgggcaaaagactgtcatatttattatttagataaaggaggggggtcttataaaaattctcattactaatgaaaggcaggcataacagaaaaggacatgtgcctggggtcatatttgcttctggatttgtcatgattacttgcccaaactctgagatatcaaattgaaagtaccaaagtcctaccctgaactcaggacccagcatacatcctcatctctgtccttttattaagcccctacagaagcaactaggaatttaagtcaagttttctcatgtaaattccttccagcaaaatctctttaatcactttcttcattccatttttatagttatggaattcagtttaagagctgctgcctgattaggaggactccagaagactggaaaatttctgagcactcaaagcacacactgcatactagatctcaccagacaacctagatcactcccaaattgtacaatttgattttgaaatttgttgaatgtaaaagaaaatttgacaaaaggttaataacaaaggcccaatggtgagcataccagtttcattgctggtaggttcttgggcaaagatctgtaataaattagcatgatgcatactgaaagataaaaagtatataagacaatattttacaaattttattttcctacactttttaatggtatatgttttaagtaaattcccacttttccccttaaataatttctctaagaagatgctttatattaaagagtcataaagccagtttaactctgagcactgttttaaaaactgcaggttgtgggggtcttgcaatctgtactcagcatcatcactgtgaactacaaaaaggaaaatatctcatgttaagggcaagaactgttttgtgaaactttagattcggttatatagctgtactggatcaggataaggaacacatttctgaatgtaggttataatcagaaagtgaaaaatacttagaaaatgaattttagcatatatattttatttcatatagataaacagaatgaatgctaatgattatttcctttattctgatcgaggtctagctcattcaatttcaatgaaatctgactcatattttacaaatttaaaatgtataatcttcttacccattgattagttctgttgaaacaactctgacaggttctaaaaatcccttttgtactgtatttttttcaatcaactcatacttttgtttgtcatcatggcattaagatgaacattatattacattctcaagtttttgacacgaagagtgttcaggactacagtcttaaatactcacatgtatggttccaaggtttttattttcttttttgaggggaaaacattttaaggtagatgttattaatgtacaaaagccttcctttttcttctttaaaaaaatgaataaccgcatattcctttaaaatacatacgatatgttttctaatgtctggaaatatgaggcttatggacattaactctcaaaactggggacttgttttcaaaatagctcaacttgataacgttctcagtttcccaggaagtatttaataaatacctcactaatgcaacatgtagtgatgtaaaacaaaacaatcacaaaagaatgcgatacctttgctcttttccgaagaagttttgctagtcgtaccacgtaaggtttaaattctcgttgatgtataccctgccttctgacttccaaacctgaatcatctgaggcttctggaataaaggcccatcggtacctatgtatagaataatgacatcagcatcagtaagacagactttgtgccatctaagattaggccacataatgtagtagaaagatcatgaccccactgcttataaaaattcaaatgccagatgtgccactcgtagccttgtcactttgggtatgtttcttaacctctctgagccttcatcagtaaataaagatactattaactacctcataaggttgtaaggaataaatatgaaaacttgtaaagtactcatcattacttttttcatgagtccaaagcaagtactcaacaaatgtttcttttctcattagcgaacaggcataaggttcttaaaaggaagatgttttcatttagcttatctctttgtactgcaacataacagtctgacaaagacttgatttttcaacatataactggccaaatgttccctagttgcatagtaaaggagtaaaaaattgaacgaatttaagaaaactaagggctttttttgcacttctcttgtatttttgtttgtaattttgtctttcataagtaagtaaaagtaatatccgaccatgggaaaaattcaaacagtataaatgggcataccaaagaaaggcagtctcccctccccgcataggattcatcaatgttgtcagcttcgtaagtccgtccagagagtttatgcccaaaagagtatatattcacacaaccaaccctctcttttaaaaaaacatgattgctgcctgttttaattatacatgtaggatatatatttttgatataatttatttgatataaattacatatcttggagacaattctgcatcatataaaacttcattctttttaacagcaacatagtagtacaccacagccaatgtcctagattgtccaacttcttgcacttacaaagtaccacagtggatactcttaagtaatgcttatttatttttgtgcacatctgagaatatagagacaggataaatccttggatgtagcagaattataggcttaaagatatatattttaaattttggtaaatataacctctgaacaattggacaatatcagtgtatacttccaacaagaataagaatgcttctgttactaaaagtaaaaggaaagcaactttcagatctttaccattctgatggttatctataattttaatcggaaactcaggagaacaactgagcagtttttcctatgtttagaaaccatcctataaattattaactgtcttgctcattggctcatttttctaccaggttatttttatacattatgcattttagacttttgtcatatacatcgaaaatatcttttaccaattcattgctatctttcgaactttatagtaccttttagttacatggatacttttaaatttatatacagtaaacttatcaagtattttgaactttccaaatatggatcatgctaagatattactctttcaagataattaaaatctttacactttctactttatagatttttatttttagaaagatgtaagtttttaaaaaactaattaatataacggcatgtttccttcccttttgtagtaactaacatcttgacaaagaggataaactgattttggttcttgtcatggaagataaaaagtcagtatcatgagcatactatttcatgtccctccaaaagcaccacagaatagttatcacttttgtgaaggtaagtgtcttggttaatattggccacattcctacgattctgtttagtattcttttctggacttccttaggagtaacatctgtgtaacagatacccaacaactgaaattcatcaaaaagtagatatatatatatatatggttttcaagtagaagagaaaattaaaggaactagaatgactctaaaagtaatttctagttcttaccattaagtttaatgaaaagtaagcttgtaaaatagcaaattttggagcatgtccaaataaaaaagagaaaaagctcagtagcatactctttatcctattatttctgttccagaagaaaaataagacacaatataataaattaatacatatttgatcttgtggataaattctcatattaccttaactacattttgataaaacaatcttacatagcttgcccattatttttaaaatttatatatgcttttatcaacttttcccctattcttttcagttcaattcattatcatctaagataaaactgcctccttcattctaggcttgcccagctccagtccattctccacactacatagccaaaataagcattctaaaattcaagcctaataatatcacttctttccttagctgtccaagttctctaacacagcttacaaggtcttacatggtttaatccctttccagcttcttcttaacattctgctccagcaataccaatctctccacacttcagacgtatcatgtctgcagctgcctctatcttcactctcccagctgtcattcttcaccacctcaggttaagactgccctcagggcctgctctgaccttcagagctagtagggatctctgctatgtggcctcagtgtgtcttgtgcatgagccaccatagtatgagtatgtctccttccctggacttgaagcatgtgagttatgtaccccattgtctcacatctggaggtactcaatctgttgactgaatagtctgttaatatatccacattgaccatttacttccgataactctgctgtgccaaaagaattacattttagtaaaaattaggaatatttcaacttacacaaaaaactttttaattagtcatagatgtcagtgaccaaagcaaatgcactttcaaaaataaccatttaatatccttgcttttacttacatctgaaactgaggaaggttttcagagggcaatgcgagagccaaatccaaaaatttgcaagcagagagatagaggtttaaccaccgctggctgttatatgaagtagagaagccattacctcctgtgtacgttgtctccagaccagccacagagggccctgaagtcctgtaagcaggagacagtgctgtcagcagctggacccatttactcacaggaattcctggaaagatctaaaagtaccagctaatatttttcataatcatcctgagataaatgtgccagtaattgctaagcaaggtcatgatgaaatgtcactgttttcaaatcaaaaattcacttttcttctttgagaatgcaaaaacagtacatagactgggcgcagtggcttctgcctgtaatcccagcattttgggatgccaaggcgggtggaatgtttgagcccaggaatttgagaccagcctgggcaacatgatgaaaccctgtctctacaaaaaatacacacagacaaaaaaaaaaaacactagccaggcatggtggcacacacctgtggtctcagctgctcaggaggctgaggtgggggaatcacccgagcctgggaggtcgaggctgcaatgagccaggatcacaccactgcattccagcctgggtgaaaagatgagaccctgtctaaaaaaaagtagtacataacttatattatgttcaagaaatataaaaataaaaactgtaaaagcgagaaacttttttactcagtttctgcaaggatgagaaaattctctataataataaagttattagtacaggagatcctttttataaatctactactgaagaagaaaatatattcaagaaacttggtcttaaaggaacttttcaatttataaatttgtgtaagtaaaaaattgtatttagtcatacattaataaactgcctctattaaaaagaataaaagtatattaaattgggaccatctggaagatctgcatatacgaatagcctggttccaggttacctaccataacagggttggctatatgttgcaatgtttcagagaccagatgtgacttaccaaaaccagcctagctcatg

SEQ ID NO: 95937 - DNA, 85526 bp, Homo sapiens
gcagtttacagaagaaagaagtttaatcggacttacagttccatatggctggggaagcctcacaatcatggggaaggcaaggaggagcaagtcacatcttaatggatggcagcaggcaaaggaaaaaaattaaaaaaaaaaaaaagcttgtacaggaaaactctcccttataataccatcagatctcacccaccaccatgaggataccatgggaaagacctgcccccatgatccagttacctcccaccaggtccctcccacagcacatgggaattcaagatgagatttgggtggggacacagccaaaccatatcaaccatcttttcacatgaaaagtaatactgcagctctgctgatgaaacttctgcaaaatgtctcttctcatttttcagcaatttaagattttgcttttaatattttgttttatatgtttgatataaacatatatcaaacaaacaagctatatgaagtctttttaatcatatttaaatatttaggaatttattgcctaaaaaaaagtaagaaagttcaaattaattacctgaccaaactttttagctgtagatgcatacaagagttataagccttacagacatagctggtcattattaattgacttttttatagcaaataagattatctgaaggatgtgtatgttgagataatattgcttaaaaattattaggctgataaatgacccctattttcattaatagaaattactactaaattgcttggcaggttaatcttcctcatgcactgaatattatatgtcttcaaaatgaatgctattttatatcttattctggaaatcttgctaaggaaggaaaaaaaatgttcctgctgataaaatttatgcgtgtgttttactctgtctaccacattcttaaattcattgattggattttagttattttatacgaattttatgtgctttcagaaaatccagtcaagttgatattttccctgagtttaatttggttttgctatccttctgatttctgagaaacagaactagaaatgttttaggttgtgttcactctaaccttcattccatatatgtcactgttggtatttaactgttttattagctatcagagtttatggccttacttgttttagtgtgctagtcttttgtatctgacatacatacaggtattgctttgtgtgtatgctgtgtgtgtgtgtttatggttaaatctagtatttaaaagttttagaaaccatggattgataatgaaatagcttgtatcatttttaatttattaccagtctttaactattatgtttaaacactttgatcatgagtccaactgtagcctcactattgtaagttatgtgttgtccagcatagagacatgtataaaacatagttcctgctctcaaagaactttcctggtaggaaaattgcatagcaaatccttatataaaacaaaaattaatttgatgtgcaaggttaagattattttgattcacatatttaagttcatatttattgtgagttcttcagagtacttcaaaatactgctttatgtttgatttgctgctctgagtccaaagcatgaagggacagtagtgtccctccccccccccccaccatattcaccagggatatgttttaagacccccctaatggatgcctgaaactgcagatagtaccaaactctaaattctgtttttttttctatacatatataccagtgataaagtttaatttacaaattaggcatagtactctttcttgcactttacagctattattaagtaaaataagggcacaagcactgtgctaccacaacagtcagtctataacccacacagctactaagtgattaatgagcagttatcatctatagcatggatacactgcacaaagggagggttcactttgttctgcgagagattttgtcatgttactcagaatgttatgcaatttaaaacttacgaattgtttatttctggaatttttcatgtaatatttccagactgtggttggttgaggttaactgaaaccccacagacagtgaaaatgtggatggggtggggaagaagtactgtatgactgtgttttcctccccacataaactttatattattttaagtcccttagcatcaaatataaagttttaaagagaaaaataaactatcttattttgttctctactctcactgtcccaattgggaatgaaagtatcatgaggtcagggatgttctctctagtcagcacccaaacatagtgcttggcacatggtatgctgaagcaaaatcatttcatgtcaaatgaaatcacatttaaggtgactactctctccaaagataggctttgggacttgttttcatttttgtggataaaataattgaagtagagaattgggaaactcgtatagcctctctttggcacaaccttaaccaaggaaattttgattttataaatcaatggatttgtagcttttttcagtacaaacagattttactcattggctatattctctagtggtttttaacctttttgttaaaaaactattgtttgagaatattatgaaagaagtagactctccccaataaaatgtaagacatgtaaatttcacatgtaatttaaggtgattcatatattttgagtatgcagttcacctatttaaagtatgtaatatgggctgggcacagtggctcacgcctgtaatgccagcactttgggaggccagcgcaggcagatgacgaggtcaggagttcgagaccagcctggccagcgtggtgaaaccccatctctactaaaaatacaaaaattagccaggcatggtgccaggtgcctgtaatcccagctactcgggaggctgaagcaggagaatcgcttgagcccaggaggcggagattgcagtgagccgagatggcgccactgcactccagcactccaacctgggtgacagagtgagactccgtctcaaaaacaaacaaacaaaaaatatatatataaaatatgatattcagtatattcagaattgtgaaaccatctctacaatcaattttaaaacatttttgtcaccccaaaaagaaaccctatattcattttgagttcattctccatttcccaccaattcctcttttcctcttctccccccactctaatcaaccactaatttactttgtctctatagatttttctattcctgtcatttcatataaatggaatcatatactatgtggtcttatgtcaatggcttctttcacttacaatgttttcaaggttcatgcgtgttatagtttgtatcactatttcattcttttttatgaccaaataatattccatggtattttagttatttgtgtgtcagttgatgaatatttgggttatttcttcttttggctattatgaataatgcatctatgagcattcacacaagtttttgagtgtacatatattttcatttctcttgtgtctacaccatacgtaggagtggaatttctggcttatagtaattctatgttgaaccttggagaactactaccagactgttttccagaggagctacaccaatttatgttcctccagcagtgtatgagggttccagtttctacataacacgcttattgtctatcttttttattgtaaccatcctagtagtcatgaaatattgtggttttgatttgtttccctgatgattaattatgtggagtgtcattttacgtacttattgaccatttgtacattttccttttagaaatgtccattcacatctgttgcccactttggaattatttgtctttttattattggcttggaagagttttttattatctagtttaagtctcatcagatatatggaggatatattttctcctattctgtcagttgtcttttcactttcttaatgttatcctttgcaacacgaaagttttacttctgatgaagtccaatttattttttcttttgttgcttgtgtttttggtttttaattttattttattttgtttatttttttgagatggaatctcactctgttgcccaggctggggtgcagcggcgtgatcttggctcactgcagcctcggactgccgggttcaagtgatagtcctgcctcagcctcccgagtaactgagattacaggcatgagccaccacacctggctgatttttgtatttttagtagagacgaggtttcaccatgttggtcagcctggtcttgaactcctgacctcaagcgatccgcctacctcggcctcctaaagtgctaggattacaggcgtgagccaccgtgcctggctttcagttttatttctaagaagactttgcctagccacaggtcacaaagatttaatcctatatttttttctgagggttttatagttctaactgttacatttagatctctgatctattttaaagtaacttttgtgtagatgtgaaggagtcaactttgttcttttgcacatgggatattcagttatcccaaactacttgttggaaagactattcttaccttggttgaattgtgttagcatcccctaaggcccactcttagaccttcctgtaggtccgtgcatccagctctagagaaaggtaccaagttagttagaagtcagttaggataccagaaaaattaaaggggagccacattggtttttaagtagaaccttaattcaattattcctattaccctagattacgtattgctgtgtaacaaatgacccctgaactcagtggcctataacaaaatcttctgtaggtctcgaatttgagagacttagctcatgtattcctggcttcgggtaactcatgaagttatagtcaggatgccagttggggccacagtcaaattaaggcttggctgaggatggaggatctgcttctaaggtggcttactcacatggctgtatagaaagcttcagctccttgtcacgagacctgccttctccatagggctccttgaaagtgtcttcatgatgtggcagctagctccccccagaactaatgataagagagtaaagaggaaaccaaagtgcatttatgacctgttggccgttacacattgtctcttctaccctattcttttcatgagaaatgagtcacaaagttgaccctaaggtgctgggggattgggaaccactttttcaaagaaataacaaagaatttgtggatttgtttttttgctttaatagaggcagagtcttgctctatcacccagtcatatttcattgcagccttgaactcttggactcaagctatcctctcacttcagcctcttgagtagctgggactacaggtgccaccatgcctggctaatttttattttttttagaaacaggatctcactgtgttgccaatgctggtcttgaaaccttgatcttaggccatactccatcctcaagcctcccaagtagctgggattacaggtgtgagccactgtactcagctgtgggcatactttaaaccaccacatgttcttgtcagttttattcaaagtaaagtctaattccaaacagctaatgggccttcatactagatgcccacttattacttaataaaatgatctccgaatcatttatttgtttttctttcttcccctgtgttcttgattcttccaatctaaccagacttaatgtattttaggatcaaaacaaagtagaggagcatatatatatcagaaatgttacataaacaaatatgacagagaaataacatgattctaaattgaaataagtataagaaaattttctatgcttttacttactaaattttcacagtcatttttccaattcctaggaaggaacacacaagtagttatctttcaggctgtctttgaatacttccatgaccctgaacactagctgaggagagtttcaaccactgctaacagtaaggaacattttcaagttagtcattacctttgtagtaagatcatatgaacccgttttaatactttgtaaccttggttcctcctgcaaactcttttgtaggtaatgactttacatgagtttggaactggtctctagtgggaagttgtgggaggatgaacacagaagagctggagttattgagtgactccaaatacagaaactatgtagcagcaattgacaaagcactaaagaattttgaatactccagtgaatgggcagatttgatatcagcacttggaaaacttaataaggtatgtctgtattatccatttcataaaaggagtaaaaattagaaatctgtgtttgtacttgttagatttctcgaaatcttgaagtaagaatgcaaaaacataaatgaaccttagattactcttggtagtgctatttttcttcatgagttgcatgcctgtgtagtcaagcatattaaggctttggaagttttaattcaaagaaataacaatgcttgaaaaatatagttatcgccatgattatcagctataaaaacagaagagaaggaagcaaatatgctaactatgagggctagtaaatttctgtaatggagcatcagatatggtgctggaattcctggcagcaaaatgaaaacctacaaatggaaagcagtaattcctgtgttctttccaaatgatatatagcaacaaggaaacattttctatcctggcaagctatagttataatttggtactttttacaaaggcgagtatatacaagcagttgcttacgccttgcagcttgtccttgagtaattcttcttgagacatgtctggtttttattcagttattgttgtggcatcgttgatcaacctctggcgcttcattttgacctttttattttttaaacatcaattttttttactgcatacccatagttaaggttttttttaaattgttattgaatgggagtgtttctaaatattaaagaggttacataggaaaggagtggccttccaataacttattctattttattttattttattttattattttattttattttattttattttattttcatttattttattttatatgagacaaggtcttactctttcacccaggctggagtccagtggcatgattatagctcattgcagactcctgggctcaagggatcctcccacctcagccttctgagtaggtgggactgcaggcatgccaccatgtctggctagttatttttttagagataggatctcgctatgttgaccagggtggtcttgaactcttggcctcaaatgatcctcccacctcagcctcccaaagtgctgggattacaggcattagccactatacccagcctatcaaatagcttaacwtacaaattaggaaagaagtttgtcttaaaatacatactaagatgtgtgggggaagaaaacacagatagtttttcctctgctctcaccacgacaatcaatgcagaagatttctataaccctaaaacaagtggttatttctcccttaccagcaagcaagcagttctayagtagataccagctggatgtgctgcagttcaatttggacactatctacctgsagatagtatcagatcccacaggttgagggctgagcctcataagactgtcctcctgttttgatgccaatcacaagccctagtttgttttacctgtgcttctgatcaactggctataaagttccacaatcctttctttagctttaatttgctagagcggctcacagagcttagggtactggttcattataaaggacattacaaaggatacaagtgaagagatgcatagtgtgaggtatgggtgaagggacgtagaactttcatgccctcctcaggagtgccaccctccaggaacctccgcatgtgttcagctggcctggacactctctaatcatccttttgggccttttgagacttcattggataggcatgattgaagcatggacagctgtgtagaaatgtgataggaaagaaaagatatgatgtaatactaacagactaagtgggggaacccagcaaggcccgtctgtcagatttttcttggcctctctacagcattccttccttctgggtatggggcaggaccccttctgaaatgggggtctttgacctacaatgagaccaagtagtccagagaattttgttacggccagctccgagacaggggaagattcctgccttagggagaaaaaggagatgagaagagggcaggaaaagtcagagagaaattgttttctgaggcctgcttctgaggcccaaagttccccatattataataagggctgtgggagttatgagccaggaaccatggatgaaaacctacagacacactctcactcacaataccacaccaggacactagttttcaacctgatacgacagataatcactttgataccataaaaagaaaagttaccattttcagtatgtcaaggatttgtcttaaaatttgattcagaagcttctctttgacgttagaacttctaacatttatcttttgaagtttgaataattctttattcctttacaacatccacaagaaattccatctaaaagtacaagtttgcttaaaggtagttaggttcttttttttcctaaagagttttgaagagtctgtttctgaagatatactgggaactctttttaaaggcaagtcattaaatgatggaaattaatttgcctaattaggtacataattagttttttagattaaccaatattcacaaaagtagatttcatggtatctagataactcaaagaagaatacccaagttgtttatgaagcttagccaaaattgtgatagaacaaggcaaggattgcatatgtgtgtgtgtgtgtgtgtgtgtgtgtgtatatacatatatatatatatacacacgtatacatatatatacacatacacatatatatatgctctattacatatatatacttataccgcctttgatggtcatttcatatattatggcaaaaaaacacaattacttttgcactaacctattatttcaacctcagtttattctgtaaaataagactttgcatatttcttctaaattccagttctaacatagtctgtattcattctgagtcttcactttgtgacattctatcaatacttgattataatactgacttctaggttcaaactaaaggattacatttattataagatcttctttacttaactaatctcctttgagtggttggtaagatagggtctctgtacagaaattctgccctgaccattatttctaaggaaatgttatggttgaataaataaaacaaaaagttgttttgtccagttagaaaaatcagtttataaaaacaaatgggcaatgataatctcatgtagattttcttataagcattagaattacttgctgtaatttgatatactaggacaatggttgtacctcttccaagtactgtaaatatctactttgaggccagactttatttcaaagtagcaaaaatrgattgaaggctgtaactttccatgttacatgttcatgtaacattccagctgtcttctcacatcaaatattaaaaatttaccaaaaaaaatctaaaatacctctcttctccataaatttgttttggaaaatatcatttttcattaaaaatgttattctgttaacaggtaacgagtttattttttaaacaaattaataaagtttgtaacatttcctcagttttaattttaaatatggtatatataggcaaatgtagctaacaaaacacaaagacctacaatgatcattttttataatactatgctagaaaatggaagtaaaatgaatgcaatattttgtttttctcaactacattaaaatgctttcttcaaggttttacaaaataatgcaaagtaccaagtagtacccaaaaagctgaccataggcaaacgcctagctcaatgtctacatccagcattaccaggtggagttcatcggaaggcgcttgaaacatatgaaattatcttcaaaataattggacctaagcgacttgccaaagatctttttttatataggtaagaataattttactatatatatacaaataatataaagaaaatgtattgctaaactattttatactttctgcactaaaaactaaaaattgaaaactccttagtgattagaagttttcagatatcaatctttgttttgttttgtttgagacggagtcttgctctgtcacccaggctggagtgcagtggcccaatcttggctcactgcaagctctgcctcccgggttcacgccattctcctgcctcagcctccccagcagctgggactacaggcgcccgccaccacgcccgactaatttttttgtatttttagtagagacggggtttcaccgtgttagccaggatggtctcgatctcctgacctcatgatccgcctgcctctgcctcccaaagtgctgggattacaggcataagccaccgcgcctggcctcagatatcaatcttaaatatttgagttaagtgattcagaaaaatgtagaacagtctttaatgtctttttgttttttattcttagatatcatttattaaaagttttcattcaaagttgttgagactatagtacattctacctttttaagcttgaaaactggcctgagaaaaaaataggataccttgatctctcagcaactttcaacatggttgactcttctccacttaaaacagtcttttcctttggctttcattgtaccacattttcctgttcagttactctttctcagtctcctttacaagtctttcctcctctacccaaactccacacagagtttcttagggctcatttagtgcagcaccttcttatattttcactttgtaatctctccttagacaaacttagccatacccatgatttattttttattttaaattttattgtgtacatttaagatacacaacatgatgtgagataccaacagataataaaacaattactgtagataaacaaattaacatagccatcatcttacatagttacctatttttgtgtatgtggcaggagcagttaaaatctatttagtaaaaatcccaaataaaatattattaattatagtcttcatgttgtacattagatctctagatttgttcatctgacatttcccattttctcctgcccttggtaacaactgttttatcttctatatgctgactcccagctggacatttccagtgctggcagcagctttaaactcctgcttgcttgacatcgccatatagatctttaaaggcaactaaagttcaacctgtttaaaactaaactttcctcttctcctattgacctgaccttcctgcaatgtactgtattaaagctcaataaatggtatcaccatctatccatttatataaccctcaaatctgagagttacacttgttaccttgttttccccacccacattttcccacctscggtgtacacagtctgttgttcagagttatgtctcatggtggttaagagaagagatggcagggtcaaactagctctgtgatctggggccattgtcctcacctgtttgtgtttgtgtcctcacttgcacaacagaaataagattatcaacctcatagggtggttaatagaattgaaagagttcatacatgtaaaatgcaatgggcaacttatagtaagttcttaatacatgttagctactattctgatatatgtctcaaatacatctacttccctgaaccttcactggcagcatgcagtctaagtaagcatcatctctagctcaggcttcgtcactggcctaacattgatccaccatctgttcttatcctcttctaccctgttctccacatagtaccagtgtaatctttttaatatattaaataatgttacygtcttgctaaaaagtctattgactgcttctcagcacacttcagaaaaattaagaaaaaggctttaacatggctttgaagactttacttcctgaagtactctgaccctggctttgtcagtgacctcaactcttaataaactaaaactaaactattattcttttccccccagtttattccactcaggtccacaggtctctttgcttattattactcattttctttgctattctcttgccctgtaactctcaaatccaggtctctgatcagatatcagctcctcagaagacttgcttaattatcatctgaaatggcccttcttccacatttttatccctagtattctattctattgtgatgtgtttttaggtaggtttttattattattattatttatcctgttggtatttgttggactttaaaaaatctgtgaattggataaaaaggaatgaaataatggcattcacagtaacctgaatggaattggagaccattattctaaatgaagtaactcaggaatggaaaaacaaacatcgtatgttctcacttgtaagcgagagctaagctatgaggatgcaaaagcatagaatgatacagtggactttggggacccaggagaaagggtataacagggtgagtggtaatagactacactttgggtacagtgtacactgcttgggtgatgggtgcaccaaaatctcagaaatctccactaaagaacttattcatgtaaccaaacaccacctattccccaaaaaaaccattaaaaaaattttttaatctatgaattgatgcctttcaccaattttggaaaattttcaaccactatcttttgagattgccttcaccacatctgttctctccccacttattaggtcttcccactatggcttctccatctcttaaccatttttcatattttctaactttttgtccttatgtgcttcattctcaggaatttcttctgacctagtttccaggtcactaattctgtctctccttttcttaacgacttaacttttcttttaaactgttgatataatttacattcaataaaatgaacagattgtaaatgttcaatgtgatgagttttgacaaatttagtcaatttcgtagccactgttcaaaataagatataaaacattcttgtcaacccagcaagttccctcctacccccttctagtgaaaacccctactatccaactatatgtattacccttattctgcagcttaacttttaaaactttctaaatggtatctttgaagaaccaaaagttctttatgctgtcttttgaagaaagttttttttagtttaatgaagtctgatttatcaaccttttattaagtagtcctttttgcttcttatttaagaaatctttgcttggtatattgctgctagaatgtagaaatatgaaggtgtttttctgtattgacattgtattcagacactttgtcaagttcacttgttctttctaatagcttttggaattttgagatatagtcacactatctgtgaatggtgagttttcttttccgattttaataatttcatatctttttttgccttattgtattgactagggtctatagtaaagtgttaaagagagtaggggcaagtatatctttgtcttatttctcactccaggtagaaaatgttaaatatttttgaaggttcaatcaacccttcatttctggaatatatccagttggctcatgatttagaatcctttttttccatctttgtttagtagagaatggctatgattttacatttttatctaattttgttttctagtatatgttaactttcaaattgttctcgtattctgttctctggaacagttctcataacattggtataattatttagaaggttttatctgaaatttatctttgtgggaagatttgtaattacagattaatttctttagtagttatgggactattcaaatttatttatgtcagttttaataagttttttctctcaaaatttgcctayttttactaaatttttagatgcatcagcctraagttcttaatatactgttatctttgtagcatgtaggatctatagtgatgtctcctctttcactcttgatattggtgactcaagccatcctttttttttaattgatcagtcttatcaggagtttatcaattttgttagtctttttaaaaaccaacttttatttactgatcctttctactgtgtatgtgtttactctctcatttttgctcagataagctctctctgaccaccctatttagaacctgtctatgctccactctccttgttattctcctgtaactttttcttctctgctgtaacatttatcaccatctgatatgtatgtatgtatgtgttaagacatataataaccaaacaattaaaatatatacatatatactctccaaaaaataagctttatgaggttaaagagcaggaatttcttactgtgattaagtgttctattctcagtatcctgaagaactgacagatagtatacccttaataaatatttgtttaatgaataaagaaacgctatttgttatactcaattctttgatattttaaaatattattaaagagaagtgagcaaggaaatattattaaagagaaatgaacatggatgtctttcttttttttttttttttttttttttttttgagacagtctcgctctgtcacccaaggtggagtgcagtggcacaatcttggcccactgcaacctccgcctcccaggttcaagcaattctcctttctcagcctcccaagtagctaggattacaggcacatgctaccatacccagctaatttttgtatttttagtagagacagggtttcactatgttggccaggctggtctcgaactcctgacttcgtgatccgcctgcctcggcctcccaaagtgctgaggttacaggcgtgagccactgcgcccagttgagcatggatgtcttaaagatagtatgtaaggccagtaaaggtatttttgatagtaataaataatacattcaaagaatgatattaagaaaactgagcattgctgaatcagtgttgcatgtaattatctaataattggtagattttcctttctcaaggcaagatttacataattcatgcctgctactttctaactcttaacagaaagtttaagcaacacagttattcttcagttgtagtatacctatttttatcattagtatgttacgtaaaattaaatctagaataccatttctaaatatggcagatattcttgtacacatacacacacgttatggagtaaatgataccattgttctatacttttttgaagtataactattttaaaaactaaagtttatattaaatgtagatatgtttatttttaattaatgattttttcatctcaaggtttatggtttaacataattaaatacaaatacttttaaagttctataacctattacatgatagaataccatattgcctcttcaagcttatttctttttaatgtgatgcagtgcacaaagatgttaagaaggctagaagtggagttttgaatgccttaaaatatttagatgagtatgtaaagtgagcttttggtaatataaatctagattgcagactagacagatactatagagcagtcagcatttagttggcagttgaagccaagagaataattgaaattacctaggtacattgtaaataacaaggaggaaaaaaggaatgagatcattttaagagtatttaggagtctcagtatttaatatcaggtgggggaaagtagccaatgaaaaagagtcagaaatagaaaatgtaccaggaggccgggctcagtggctcacgcctgtaatcccagcactttgggaggccgaggtgggtggattacctgaggtcaggagttcaagaccagactgcccaacatggtgaaacctcatcttaactaaaaatacaaaaattagcctggtgtggtggtgagtgcctgtaatactagctactggtgaggctgaggtatgagaatcacttgaacctgggaggtggaggttgcagtgagctggttgcaccactacacttcagcatgggcaacagagtgagagtccatctaaaaaaaaaaaaagagagagagaaaagaaaggaaaatgtaccaggagacaaagcagtcctgaaagtcaaaagggaagagcgcttcaagagaatgctctggttaatagtatcacatgttaaataaaataggataaggtctgaagatagagcattggatctggcaattggtggacattggtgaccaaaatgagaacagtttcagtggaggaggtagaagtatcgtgaytgattaatgatggaagataaacagaagaaattcataaaaatatatatatattttaacagttgatagagtttggtagctttaagccagaaggttagttagaataaagattttggggtttggttgttgctgtttttttttctcgttttagaattatgaggaaatatgtgagtacatttgtattaaaaagcaaagatgtcagttcggaaagaaaaattacagaaaagaaaaaagataatggatgaagcaggtccctggacaggcgggtcatggccctggggcacatgggaaaaaaggtagcctggaagagactgagagactgtgactgtatctttagatcaaacagtacctaaaatgggagacagaaaagtagaaaactgaagccattctttcttgatgatttctgttttttataaactaggagcaagagagattcctaattcatttgttcatcacttgctaagtacaggacatggtgcttgaaacttaggatacagaaataaaaatatagtcatggtcctttgttttctgatatttacagtccgttggaagagatagacattaagcaattcaaataaagaatgataagtgttttagtaagtgaatattgggtactatgagaacatcaaatagggggcctaacctagtctaattaggagataatctccctaaggaaatggcttcttaggctgaggcctgaaagtttgggaatcccccagacaaggagggtataagtaagggagtgggaattgtatctgtcagagcagcatatggaaaggtatgggcactaaaaagagcatagaaagttccgaaaggaactagaaaggaattcttcagtatagccggagcagagggtacaggagtaaaattggtgagtatcagtggattgtacagagatatgtagtagccatttcttaaaagatgttaaagtccacattggcaatgggaaatcagtgaaaggttttactgagagctgcttcagggcaataatgaaccaatacatgttaaaacatgaagagcaagatatgatagcagctgcttctaggtagctatctggtggagatacaatttgttatattcaaaaaatatctaggagagtgacttggagagagaacttgatgaccttgataactgattgcaggttagagtagaaaattattttatttttggatccaggctgtcactctgtcaccctggctggagtacagtgtcatgatcacagctcattgcagcctctacctcccaggttcaagcagtcctctactctcagcctcccaagtagctgggaccacaggcacatgccactgtgcccagctaatttttattttttgtagagatggggtctcactatatttcctgggctggtcttaaactcctgggcctaagcagtcctcccacctccgccttccaaagtgcttggattacaggcatgagccaacttacccagccatgttagagtagaagatttttaaagctactcatgaggctgaggcaggaagattgcatgagtcaaggatcagtcctagatttatagcttttggtcagccagatagatagtgatrccatattttgaaattgacagttattacagggaaggcacatgttttgctggggcacattgggggagaattctgtttttggaattgtgaaatatgaggactttgtgaaacagctaggtagctattgggtttataagtataaaacccaggtgagagaactggtctggtttaatggatgtagtcattcatatacaggtatcatttttaagccaatcagtataactttttcatcagaaagaaatatttatacatataattgcatatgaattaatattgtatagttattttgcttccttctcctttgtctttatttttttaatagttctggattatttcctcttcttgcaaatgctgccatgtctgtgaaaccaacattgctcagtttgtatgagatatattatctgcctttgggtaaaacactgaaacctggtctacagggattgcttactggtattcttcctggcttagaagaaggatcagagtactatgagaggtaagatcatatttggtgcagttatgtaattgaagtcatggatttgtcagcaagcatatttaggtcaaatatgttttaacatcacaaatgaattattctagacagttcagtatatcacatgaatatttctatagcaatgaaacattattatagtttatctagtctrtgtatcatactgaaaatatagctagtgataaaagcatagacttcggaggtggatgtactgagttgaaatcttgcctatacagacactgagcttagggaagttttcttagtgtctgaactttatttagtttcctcatctttaaaacaaacataatacctatttatctgtgttattctaataacaaatcacttagtccttagccaagcacatataagtcactcaagaaaattgtgacccataatttaaaataatataacaggacatttagattagtgataagaatggaagattagtccatgcactaacaatttttaagttgctaatgggagaaaatagcttagtaccagtacagtgctgtttcactagctgttgacgtggtactcttgatatctaactattcaaacaaagttatttgatctgtttggaccctattattattttcggggagttaatatttgtaggcaatgcatgatggcattaagtatctctaatatctcattactaatattyttattaaaaaactaaaatgtatatggtattttattacttagcgtactttaacaacctagtgaggtagataggtcttgtggtggagtgttttgttgttgttgttctcttcattttacagatgaggagactgaacttaacaatgaagtgacttcctcaacatatacagctagtaaatggtggagccaggacttaaattcagtcctctgactctaaagtatattcttctttcagtctatcacacttgtttccagggtggaacatatgactgtagcatgggtgtttgcatacatttttggaaaagaatgatttattttttaaaatatgaaactaaatgtttcccttcttaaaccactttatttatacctcagaacaaatatgttgttggaaaaggttgctgctgctgtggaccagtcagcattctacagtgccctgtggggtagtcttctcaccagtcctgctgtgcgtttacctggaatcacgtatgttcttgcccatttaaacaggaagctttctatggaagatcaactttatataattggcagtgatattgagctaatggtaggtctaaaaatatggttgctcatttcacaaatatttctttagagtcaggcactattccagacatatattgaggattgtataatgaacaaagttcctattttcatcgagcttacatttatcaaggaaaattaaaggccaaaataataattattatttttaaaagcttaactcctggactcaagtgatcctctcaccttggcctcatagccttctttataagaagtgaattttagataaagtaatatagccagattccgtatggaatttatgtgagaagatgtactaaaacagatagtgaaagataataggaagaaaaatcacatttattgcttacttatacaatatttttctttttaatttcaagattaacaacagagggcaagctttatatctctagrgtgctatactcttaatatgagcaaggaataaaaaaccctcaaggatcattttgaaaaattaaacaatttgattgatcatactttactttttctgcatatgattatgacattactgatattttaatgcatatttctggttagatttagtgaagttaatttatgtacactgaaattagcccttcttacattgtagagttacctgaattttggcaagcacgtagagtcatataaccactattgcaatcaagacacagaatatttacatcaccctaaaaagtcctctatgccttttttttagtcactccccttcctctacactcccaggcccttagaaacactgatctgtttactgtttctatagttttgttttttctagaatgttaaataaatcatactgtatataagtggactcattttttgtgttctttaaatccacgttggtcaggctggcctcgaactcctgacctcaggtaatccacccacctcagcatcccaaggtgctgggattacaggcatgagccactgcgcctggcttgtgttcacataccattaatcagctgatggacatttgggttgtttctatattttttgggtgttaaaaataatgctctattgaacactcatgtatgagttttagtatggacatgcgttttcatttatttcgggtatacatctagtagtgccatttccaagttttttggtaactctgttgaactttttgaagaactggcaaacttttttccaaagtgactgcaccaatttttatttccacttgcagtatatgcaggtttcagtttctccacatcattgccaacacaacacttgttattgtcttttttattatagtcctcccagtgggtataaagtattctcattgtggttttgatttgcatttccctaaagactaacgatgaacatcttgtggttggttattggctatttgtgtatcttctttggataaatttctattcaaatcctttgtccatcttaaaaattagattatttgcctttttgttgttgaattgtaggagttccttatatattctggatattaaacccttgtcgtatatatgatttgaaaatattttcccccattctgtagattgtcttctaacattcttgatagggtcccctgaagcaaaaaagttttaattttgatcaaatccagttcatccggacttgattttttttctcttgctgcttgtgcttttggtgttatattaggaaaccattgtctaatccaaggtaccagagatttastcttttttcttcaatgcgtaagtttattagaaactgccaaactattttccaaaatggctatgctttttaaattcaggttttaaaatatactgttacatttcttttgaataacttaatggaaattttaaacaaatcattttttacttatttaaacaaatgacacacatggaaaaatatttccaaaatatcacagtcaaaggagtattctttctaatattcaaagagctactatagataaataaaaacaagtagaaaatggatttgaacagataattaacttaaaggaaataagaataatttgaacataaagagatgatcaacattgtaataaagaaataagagtttaaactacaccaagccagttttcatgtcagatgggcaaaaatacaaatatatatatatatatataaagctaagcaagcatgtggagaaacaaactgtcatgtaaaactggtgggaatataaagtgatagaaacctaacataaagcattatgctatgtatttattgacacagtctcactttgtcgcccaggctggagttcagtggcacaatcttggctcactgcaacctccacctccagggttcaagtaaactcccttgcctcagccacctgagtggctgggattacaggcatgcaccaccacacccagctaatttttgtgtttttagtagagacagggtttcaccatgttggccaggctgatctccaactcctgaccaagtgatctacccaccttagcctcccaaagtgctgggattgcaggcgtgagccaccatgcctaacagcattatgctatttaaattgtaactgcacataccccaagacctggcaattctattttgaggaatttatcttacagatgtaatgtaagtattatatattgcaacattatttacagtagtgtttagaaatgtataagtgcacatgattagaagcttggttaaataaattagagttcatttatgaaataaaatactttggccattaagaaatgaagctctttaatgacaaggaaagatctctaaaacatgttaaatgaaaaaggcaggtttggaatatatatatatatggtgtttttcttgtatttacaggaaatattcactagtaaaactggtgcctacaaaacagaagttggatagttggaagttttgctgtatagtcttacgtacttcttaatttttaaaccatcattatatatatactattcaaaataatgtaaatatctttaattattgattagatcctcagaagcatactttcgagaaaataaagagttgtcacattttcrtggcaaaaatgtctcagcataatagacaatagatgttaaagatgctgttatttcaggtagaagcagtaagtacttcagtgcaggactcaagtgtacttgtacagagaagcacactggacctcatactcttctgttttccattccacatgagtcaggtaaaatattaacgccgatgttattataaggcattcttggaaaactgtagattgataatgtgtagttattttttaaaggcatgtgtgttgaattcttcttgtataaatcagtaagcgcatggaaaataagttccttcttaaggagtggaatttgttgtgaaaaaaaactaaagataaaagcttcactgatttgataagaatatggtcattgaagtagattatttcatacttttgaaaaaagttgtaacatataaaaagcaagaggttctctattgctaactctgagtaagccaagactgagacccagccatcatctgtactggtgttatgttatcttgttttggtgattttaacatgcatgccagacccttggcagagttgactataacttaagagccacatgtttagccactgtgatattctatagtacttttattacaaataagtgcaactaagttgacaaataataaatgaagttcattcctagaacttaatttaatcagtgccctcattttaaaagaaaggatctaaattcctttgacttataaaccttgatgaagagtgatttacagcaccagtatataggcattcagaatggtggaactacatacctaacaaaagtaataagatatagagaatatctaccttggaaaagtaaatttattcctaaaaaggactattatttgaggttttcataagaactgtgattaatagataactgtagtgaatttgcattatgactggccaattttttattcattattttattaacatttttcttttacttatttaatttgatattgaaatattaataactaaataattctactcttccttgtctatactttgactaattggaacataaaccactctgtttctattttgagactttcacccttcaaccaagggactttattctgccctctggcttttcacaaaaacaactgttgagtcatctcagcgtaatctaaatttaccaatgctctattatagggatggccaaacagcagctcataagttaagaaagatttatgtttttttaaacacttagaaaacaaagaagaatatgccaaagcaatgtatgtgatctgaaagtctaaattatgtactgtctggatctttatccaaaaaatttattgactttcctcttgaacttttcccattgctttcttactttccaaacattcaacatcattaggccctcaattgacagatgtctcaacaagatctgaggaattaagtcatagtagactcaagaataacttaatttgtaatcttaatatatcagcgtttcctaagcttttctcagcctgtactttcttactctgccttttctgtattcctgccagccaaaatgttctagattcttatattctataatatgtattatggaaacaatagcttcgttgaatgtgttttttaaaagtatacacccagttctaataatcttataattctaatacttttctccccactatgctaccaaattctaatatagttctccctattactgtaccaaactgaataaggattatgacgtaggtaccttagtgttccactttccctctttctatgtcttacatataatagaatacaatccaagtatggattgtattataattgtgacttaacagtgccttcattaccatatcccaaaaggatgatagttgttaggaacttcagcagtgggatggactgctacacttctttaacttgtttcctggaaagctcacccaaatctgtagtacttacacctttgagattataatagactttttttcatattagaaatagatggtgatatcaattgtaatcaagaagcaacttcttttttaaatttattttttaatggacatgaattgtatatattgatcctgtacaacatgatgtttgaaatatgtatacattctggaatctgtaaatggagctaattaacattcattacctcacacaattaatttttacagtgagaacacttaaaatgtactctgagcagtttttaagaatacaatacattgtggccgggtgtggtggctcacgcctgtaatcccagcactttgggaggccgaggcaagcggattacgaggtcaggagatcgagaccatcctggctaacacggtgaaaccccgtctctactaaaaatacaaaaaaaattagcagggcatggtggcgggcgcctgtagtcccagctactcgggaggctgaggcaggagaatggcgtgaacccgggagggggagcttgcagtgagcaagtgatcgtgccactgcactccagcctggcgacagagcaagactctgtctcaaaaaaaagaaaaagagaatacaatacattgctaacaactatagttaccgtgttgtaccgtagatctttttgaacttatttttcccatctgaaattttttatcctttgactaacatcttctactttctgctttcttaagtagtttttctcccaaaataagatggggagacatttgtacttttaaagattttgtgacaatataatcttcatatcttatgttggatagatcagaagttctcaaatgttttagttgtagaaccccattacactctttaaaagtacagaaggtcctcaaaaatcttttgcttgtattggttagatcatctattgtgatttgttcttttggttaaagtatatgaagaaaatctgatctcacattgatatgtagttggaaaatcgaggagtatttcagtagcattttccgttaaaattacatattctttgatattataccaaaacttcgaagctgtagattttaaaaattagttacaatattaagtcttaaaccacatcaatgaacttttcatattctattccactaaaatccactggtctatcttgtactttcagtggctctttcagtcatatgtgcttttgtaacttcatgattggatattaaggaaatactggtttattgaattatgcagattttccaaatgttttcacattttattgtacaataccaatcatgtttattactattgccactgatctcatcagtaaagatttttagatattgggagaaacttttaagcccagtattgagaagctttcaaccaattcaaatcaaaacaatacaatttcagccagatgcggtggctcacacctgtaattccagcactttgggaggcctaggcaagcagatcacttgaggtcaggagttcaagaccagcctggccaacatggtgaaaccccatgctctaataaaaatacaaaaattagctcggcatggtggcacatgcctgtaaccccagctactctggaggctgaggcaggagaatcacttgaacctgggaggcagaggttgcagtgagccaagattgcaacactgcactccatcctgggcgacagagtgagactccaacttaaaaaaaacccaaaaaatacagtttcagtctaaatgcaagttttccataattctacttttctcctagaagcccaacttttattatttgtcacgattaatgttattttccttgcaatgtcaggctcactttgaggaaatgactacaaaatgtccaggcctgaataatcataattcatattagtaattcttcgggtaaaaatggcattctttgagaaagctggtagttaagctcacaactcagttatacaattgcttttccttaagacaactatcatacttcagtatacatcagaagtaattttagtacttttttattttattttattttattttattttattttattttattttattttattttgagacagagtctttctctgtcacctaggctggagtgcagtggtgctatcttagctcactgcaacctctgcctccagggttcgagtgattctcctgcctcagcctcctgagtagctgggactacaggcgccaaccaccgtgcccagctaattttttgtaattttagtagagatggggtttcaccatgttagccaggatggtctagatctcctgaccttgtgatccgcctgccttggcctcccaaagtgctgggattacaggtgtgagtcacggtgcccggccacatcagaaatactttaagtgaatctttcactctattatacagaatattaaaagacatgcactcaaaggttgatacttattttttgattttactgcaagtacatggctgtgaaaatataatgattacaagtatagtaggtgcagctgctatgctgcctcttttcatgctaaggtgccagcagttttatccactattgcatgatcagggcatatgtcaacaaaacaaaaagcccaataacatctttgtattgttatgaatatgcatagttttatttgttatgaatatgaatagctggtttttactttgtgcaccccctgaaaaagtcttagagatacctaggggtcttgaaccatactttcagaattgtacagatcaatagaaggcatttgtgttcaaaggagtgaacctaattcgtcaattgttggtgatctgtgttctgtatcatctcagttatttctctaaggttcctttaacacaaatgagctgggtaaatcctttctaattctatcaagaagcatgatataggacaaagttcactggtctgtgattaaggagaagtgagttctccatctagctggggcactaaccaggcatttgaatttggctaagcacttagccaaaacctcaagaacctgtgaggtttagattctttacttatagagtggttgttaaactagtcagtttccacattatcatctaattctcagattccaagattatattgtaaagtgattatctggcagtattcttaaaattaatagcaagttagttgcttttcttctattttgatttttataaatttacctcttttagctaaaacccagatctcctttaatcatttttttaaacgttgaattaaggatattgggaaaaaagaaaaaaattatttctcttaaaaagaaatggaacaaaatgagagaaaaattaagattgttaaagctggatgattggtagaaaacggtttattattttgttttctgtattttttgatatgtttaaaatactacaagataaaaatttttaaaaagaataaagagtggatgaagatagtaaccttctcaggagtttatagtcagttgacaacrttataaatgtgaaagactaatggcatatcattttcttgtgtctgtcccatcttgcttcattttatttgttttatgtcagaatttgcttttattatatagacaaagaactttaaactgtaagttaaaataattaagttatagtttcagttatgcagctaaatagccatgttacctaactttcttcctgtttcctaatctgtaaaatggaagtaatatcctgtgtttgaaataatccatgaaagtactccatacaccctaatattctaagcatatttcagggcattttttaaagaggaaaaaaataatatatattgtatattgctaagtacaaccatattcctaactctttcaggccactcgaccggatatgatcaggatcttgtcagcagcccttcatgtagtgctaaggagggatatgtctctgaatcgaagactttatgcatggcttcttggtaggtatttgatgtctrtggtcatgattggggaaaaaatggagggagatttgtcatgtataagtattaccaagttgtatgtatgtcctgaatttaaaaactaaaatctcttgtgtaaatggacaataaaaatataaacagtattagttgtgtattgtatgaagaaatttcagcagctttatatttgaagagtctatttgaattcataaagtcatgttcccttgtccttaacaagatgtttttccccttacaaattgagatggttgtatataagttagtaggcaaagaaggatgagctaataatcaaaatactgtccaaaactttgaattcatcaaaggaatcaggactagtaccattgtcttacacatcatacagtgtcccactcaggcagtaatacatatgtacactttggtcgtccatgctttttgtgtgttttgtctgtcttcacaactctttactgcctagagtgaggggacataatataacttattgtggatgttctgagtattcagttatttcactgttagtaaaattggccaaaaaataaaaaggataattctggaagaatactatgatacttatgtattgaattggtttccctttattaaactatctaaaatgatctctcttgctgacattgaatgggctactaattggtaagtgtttagtgctgttctgagattttgctgttttggtatttagtgaacaacagttttgagaattccattttaagtaattttgtgatttgtttccatggaggttttgataacaacggtgctatcataggacccagaagcacaagacacagtaatcctgaagaacatgccacttactatttcactaccttttcaaaagaattattagtccaggtaatgaatacttttattattctttggttacttactgaccactagaggtagtgaaaaagtgtaagacgaggtcttgccttaattgaattcacagttgaaggggtggagacaagacttacaaacttcccaagaatttttataacaagaaaattcctgtaaaatgataatcatatgttagactaccatgtaagacaaaagactttttttctcttactttgttgttttcattactttattaaaacatagttgtagcttctcacctgtctgctcaatggaagttggagcttttccaaaaatgagtcaggacctgtgctatttcctgtgaagctctggagaagtttatttcatattatttttaattcaattatatttatttaagatatttgaaatagaagaaaatacatggtatctgaagcatttttaaatgagtgaggttataagaatatagttgttaagtcactaacgggaaaataattgcctaatagcagacactgccatgataatgtggcatagttctgagaagaatgatcttaaatagaaattcatctgtagggaaaacactcagctcatgaatatatttttctaaattttctttgatattccactatgtctaaagaaaatttagacactttttttctcaagatagataaataatatttttttcctagcagagtaagaaggccaaggttggtgaaaaggcttcagaaaagcaatagtgggtataagtctccgttatatatggttgcatttaaaaatactttttcttaaggaaaaaatatttgaatatgtttacttaaatgaccagtgtactttccttttttaaaggcaatggtgggaatcttacaagtgaatggatttggagaagagaacactctaatgcaggatctaaagccttttcgcattttaatcagtttactggacaaacctgagctaggtaatgtatactgtcctagggcataaggtcatgtgtggtacttttgtgttaataagaaaataaaaagagtcatcagggaaattgttatattttgaggtggcctttaaatataagttctcaacaatttcttaaagttcactctacaaagttaagatacaggtattcatccacctgatacgttattatgtatctgtcttgtggtatgtatgtagcagaagaatccctttaaagatgctatctaagcttctcttaatcctgattgtattactgaaattaaaacattaatccatcatgagcaatttatagttcacagaatccaaggacttgaggaaaatatttgagttatatccctcagctttcttctccacattccctttattttgcatgttctctctttatccattgtatatttcttatatattatggcacttgagacagaaattagtaaaaaacataaatatttacagcaataaaatgaaatcataaagtatgtaatttcttcaaattatatacagatgttttagcaggtgtcttctcaccattttttaaacatgaaaaatttaaaatataagaataacttgaattatataaatggtcttgagaggtgttttagctgttatggtaacagatgaagctcaggaatttttttaaggaaatctgtaatagcaagaaaatttagccttatgcattttagtattatttaaattaatagcagtaattacaagtagcttttgttgaatacttattatattctagaaactatgctacccatcttacaaatattttttctaacccttaacagtcctgtaaattttggtattatcctcattctggatgaggaaactaaagctcaaagaagttaaataacttgtctaatgtaacagaactattaactggcaaaaccaatttctctgattctgtaatttctattgtgtcaacctgcactttaaatatttgttcagttatgtaatatcttatattaccttctcaaagaagtgtgaatttagcttagcttctgaagaaatactattttaaaaatacttgtttttaaaacattgtttcattgggccaattttcagataagcatgatttgctcatgctgattaattactgtctttaatttgaatattaattttaggacctgtaattctagaagatgtcctgattgaagtgtttagaacattatattctcaatgcaaagcagagttggatcttcaaactgaaccacccttcagcaaggatcatgctcagttaagcaggtggattatcaaaaaattaaatgtgacatgaagacataatatgtattcacttaatataaacttgaagtgtaataacttgggatcctactctatgaagtttgtgttctaataagtaaagctgatttaatactagtaaagctgatttaatactgacatactagttgtattgacagtgcctcactatataaagacaattgttttaattgttacaaaagacaggaggaggaaataggtaataggctaaagggttgccacttgaaataacaaagttctttttccctgatgcaatttcagtaatagtggctattaacagcactagttggttttgttgttgttgtttttcaaactaagaataataatttgattgaaactggtcaaggtaaacctttcttaagaaaatcctgaatagcacagggaagcagacaaaattcttcacaatcaaggctgtgaaaatcaaatcactactcagtttgtatgtgccaagggaaataaaagaattttgccaaatttacagtcccacacactaaatagttcaaaaagaaattcttgttcttttgtcttttttattatgcagaaactgtgcaagtctcatttctgatcttgatgtttgacaaaaattcaaatttgaaaaaataactgcccataaaatgataggagagtggcagtagataaaaattatttgttgcaatcttcttactagcacattttctagcaactacctaggaatatgtactggcactgcactcaaatttaaatttgaaaaaacaaatgttaatattttttagtttttgttttcttttctcttttttcagtaaattaagagaaaataagaaaacagcagagctgattaaaactgctaaccttctctttaattccttcgaaccttattatatgtgggattatgttgcacgctggtttgaagaatgttgtaggtatgttaaactttcattccttttaatttcgtaacatctaaagctaacctttgggttttttttaagttgttacatttaatgaatgttcttttatacattctattactaataataactgttacttactatccataatctgactctaccttgtcacataggatataaaatcattgatcatataatcttagaattggaagggagtttagagatcagttattcatacaccagagtagattaaaaattttccgtcttcagtctatagtaatccagtttttttgttgttgtagaaaagatagcaaatttttggctgctgcctcagcacacttttccaaaaggatttccactttgattaacaaaaaactttttggcctgacttgtgtttttaaagccattagaactaatccatgctgtcactgggaagtgataaaagccttctaccccttagcaaataaagcaaaaaatatggtctgaaaaccctaggatactagtgaatctgagtggaatctctgtctggcttctagaccagatcctctcaaccagattaaccactcaaggcccaggagcatgtagtcaaaatgtaattatgtacgatttcagcattagaagtcttttaataaaaaatgttaattgttgctcctacacattaatctctttagtggtttagaaagttcctagcttattcagcagaggttgagcacccagttaaaaagcatcatgctaggcagatagacagtccctgtcttcaaagatcttatagtgggaacaaataagacatgcacgcgtatattcctagtattaaaaattacaaatgtcttaatagattaaaatgtaggaatcgtatttttttgccgcctggccctaccctgggtttttaccttctacattcacaaatgcacacatccacacttcttcagccaacctggactattctctgaaagttagcagcattttaactttcattctgctgaggcttcacttgtgctattccttctgaaatactctttccccttgcctatctgctaaaatcctatgtagaggttacccacctttccttcctttcctcaaatagcctatcagaatcaatgcctccacactgtcacattgttgcttttatttgtctacatgcttatattcttgttggtcagggactatattatattcttactttgtgtcttcagagtggagggcaatgtatggtcatataggatttctatgatttaatgtgaatgtttgttggaggaatgatctctactacttggatcagaagaggcttcctggaggaggtaacatttgatctcagactttgaaggacagatgcattctgatcatgggaaaatgagattggggaggacagtagtacagaaggacaaatgagcctattttaagacccaaggttagaaatcaagtagcagttaatcactgttaactaggaggtgatatctatacaggaagcaatgggaaataagtcccagaaagtgagatccattcagaacacttcgaagtacaggatgggagttacagggagaggatcagcctaggaatcttgctttgagaattttccatgaagaggtacagtggcctgggggaaataaaatatgtcatcacaaaaacattactgtgtgtgacccaatattgacttggacttcattagaaggatgatgatgctgtcacaggtattcacatcacttgacagtatacttaataaagtgaattttgtccttttaggaggacactgcatgtgagacttcagattggacctggagatagtaatgactcatctgaattacagctgaccaatttctgcttactggtggattttttgttggacatagtttctttggtaagaccaccttggtaagaaaatatcaaggaaatcgaataacgtagttcaaatatttcgtgttgtaggcaagccttcagatacatttcatctttaaaattaaattgattttttcctctttggtaagcttttttcataagatctttcaagtgtttgtcctttgacatatacatataaaaaatacatggagtaaacttcataattgcatgttataaaatcttaactgtttagtgtatagtggtctaatgctgcatttatattaatattatttctattaaatgaagacttttggaaatcttttcccttctgttttctctcctcacttctttgctttctcattttgaagcctactagaagtatgagggtgctgtgtcaggtatgacattcagcctgttttgtttttaaatgattctatttacttttgttatattataattttagtaatgtagcagataaaactggggttattttataatatatgctttgaagtatttaaattgagaatttgggaatagaaattttataaggcatcagtaataaaatatacagtgttaattaagagcatgatgcatataaaacattatggatgagtaaaatcattgcctatttatatagattaaaaaatgtaacttttggkttccacattgtttaaacttttttcatttcacttttattttcaggagacttacattgaaatccagacagaacacttgccccagttgctgctcagaatgatttctgccttgacaagccatctccagacattgcacttatctgaactcacagattctctcagactctgctcaaagatccttagcaaggttcagcctccactgttatctgctagcactggaggtgttttgcagtttccaagtgggcagaacaattcagtcaaagagtgggaagacaaaaaggtaattttaactattatttttggtattagactgttcatatttcttcaaagcagaacagttacttagtaaaatcacttatacataagcatttaaataatagtgagtctttcctagatccaaatgcagtgttagtaggcttgtaggcttttggttatagggcagtttaattatctttatcagtactttccagtagaagtatcatgtgaatggcatatgtaattcaattttctagtacccacattaaagtaaaaagcaggtaaagttaattttaattctagtttatttggacaattgtagccaatatattatttcaatgtaatctatataaaattgatgtcatataaataagtgaggtagcttacatgatttttttgtactctcttcaagatctagtgtgcattttacacttacagcacatcttcgtgctgattggtttgtgagtatacaaaagaggctaaaacaaaggcaccactcaaaggtgagccacaacagtataaataaccaattagggaagggtaggtatatgtaaaataggtgaagagtggggatcaatcagaggaaagcatgccaaatgggaggagaggttctcaatctggtctgtggatttatccaggacttgtagctaggctttaaactgtctttggcttgaaggtggggtttcaccggggacccgtccctggctgcctaggatttgtctgtctcctgctgctatcactatgctagttgctggctatccagtggtgagctaaacatagtctctgcccttctctatccttcctttctaattggaagaaagatattatacaagtaagtgcacatttaattacagttgtgataagtgtacaaaggaaaataatcaagtggtaggaatatggaaaatggggtgacctgacctacgctggggctaaagaacgctttcttgaggaagacgtgtttgagtgaagccttagaggaattggtgtggtgagggaggtaaaaagagagcacctgacagaggaagaagtataacagcccagtgagttcaccttgcctgctgcctagacagagccaaattatcaagtcagaggaattgcaatggagaaacagtaatttatggacagccggctgtgtaggagactgcagttttattattgcccaaatcagtctcaccgaaaacttagggatcagagtttttaaggataatttggtgggtagggggccagtgaattgggagtgctgattggttggctcggggatgaaatcatagggagtagaagctgcttttttatgctgagtcagttcctgggtggggaacatagaactggttggcaggtccaggtgggaccactcagttgttagaaatgcaaaaacccgaaaagacatatcaaaaggctgatcttaggttcacatagtgatgttacctacaagagtaattggggaagttgcaaatcttatgacttctggaataatggctcgtaatatttagaattccagtccttctcattctaacctggtggctggtggcctttcatttgttttacaagaacagtttagctttaaactrtaaactaaattccttcccaaggctagttcagcctatacccaggaatgaacaaggacagtggagaggatagaagatgaggtcagttaggtttgatatctttcactgtcataattttctcagctatgattttgcaaaggctcttaggcagagacgagcaccaagcagacaagagatgcagctataagataggcagaggccaggtcttagagggccttgagctgttcgagggcttttgttgtttaggagcaccgggaaggccctgaaggggaaaaggcaaatggcataattacgtttgtatattagaaaagttactctggctgcagtatgaaatgtagaggagaaacaaaaacagatgtgggaagacctatagtagcgcaggtgagaggtggtgataacttgtgccaacaagatacgaggagtaaaaatagaaatggatggattagcaatatatttaggaggaaaaatagacttagtaatagattgataagggtaatgatcactaacacttaatgagtgtttactaagtgctagttattttgccatgtgctttatatataccgttatgtaatcctcatagcaattgtaaaatgtaggaattactgtctctcaattatacacattaggaaatggtggtttggagaagttaaataacttgccaggtatcacataactagtgaatggcagagccctagttgactcaaggcctgcacccttaacccctctactgatatgaaagtggggaaggggaggaggggtgacgaaggtaccaagaatgacccctaggtttctgtcttcctgactcaaggaaaagtgtcattcactgaggcaaggaacattgcgtgaagcccagctttgggcaacagggctttagttcatgatgctattatattctgactcagtcacccaaggaattcttacatataacttttacttaaactaagccagaaaatatgcttgatatttatacttactctatcctattgtagggagtaaaaggctaatatactccagttctactccaggaatggttcatttgtttgtttactgtaattctctcatcttcccctctagattataaaatattccttttatttctactacctaatacagtgtctggcacatgataggagttcagtaactattcactgaaagaaagtaagattaatagcaaagatttaattagtactatacacatttcaataaaaatttcacattcatgtggccctgaacagatgacctattagattttatttgtagttattaaaatgtcattttttaaccttacatatctcattcttggcattgtttagacattaggaaagtgatttcatgaagtagatgaaatagtcatttgaaaacaaggatatagatcctagagacttgtatatatgtatttttgtcctcaagaatctaaccttatgtrtgctgtgtgtgtagtgcatagtaaatacttggtgaatgaataaatcagtgtggggctgctttaagagtcaacagaatgggcagattaagttgtgaatagtctaaaacatctcaaaagtggtcatttctaattcctaatatgtacactttgctactcagccttttgttttcttaaaaatctctaacaggtatcatcagtttctcatgaaaatcctactgaagtgtttgaagatggagaaaatccaccaagtagtcratcatcagagagtggattcactgagtttatacaatatcaagcagaccgaactgatgatattgacagagaactgagtgagggccagggggcagctgccatcccaattggtagcacatcctctgagacagaaacagcatccactgtgggatctgaagaaaccatcatccagaccccttccgtagtcactcaggggacagcaacccgaagtaggaagacagcccaaaagactgcaatgcagtgctgcttggagtatgtccaacagtttcttaccagacttatcaacctctacatcattcagaataactctttttctcagtctttggctacagaacatcaaggggatcttggtcgagaacaaggagagacttcaaaatgggacagaaattcacaaggagatgtaaaagagaaaaacataagtaaacaaaaaacttctaaagaatacctgtctgccttccttgctgcctgtcagctcttcctagagtgctcaagtttcccagtttacattgctgaggggaaccatacatcagagttacgttctgaaaaattggagactggtaaggtcatctcagttttgcttatatttcagtattgtctgtagtatgttttttctttttaaaagaggcactcaaaactggggtttttttagccagttactttttttaatgttttaatttgcaagtttttttaaaaatgaaatactgtcactatggggagattgatatattggaagattttgtgattttgatgtctttcacagtttgcatgcagataagtaggagctgaaaaggaaatctctggagaaaagtagcagtagatctgctggttttctttgttatgaccagtaacatatgtatttacctttattttgatttttatatatacacacaaagtgcagtgaatactacataatgcttattgatcaatatactgtttttcgggacagaaaactagattgtatgacttggcataagaaaaatatatattgaaaaaagtataagaaattcttgttgctactttattaaagctctagactaggtgagaaaccatggttttgttaacagatcaaggccttaaaagtatttagtggctttgttttttgaaattaacttagagtgtgtgtgaaatgtttagtataatgaactctgattgctaccatcttttgtttcagactgtgagcatgtgcagcctccacagtggctccagactctgatgaatgcttgcagccaagcaagtgatttcagtgttcagagtgttgctatttcactagttatggacctggtgggactgacacagtctgtggccatggtcactggggaaaacatcaacagtgtagagcctgcacaacccttaagtccaaaccagggaagagtagctgtggttattagacctcccctcactcagggcaatctgaggtacatagctgagaagactgaatttttcaaggtaaattctaagaaatgcatatatgactatgatgattacagccatgtatgatacttgacctagtttgctttaagaattattttttaaatgttaataaagcttcatttaaacacctcttaataggccataccatgtagaaaatgatgccacagctgatatacatactgctctccccatcttattcccaattttgtgagcaggggagaaagataaggataaaggagtaggaatattaggataaagaaagagaagtattagggcactgaagccatgtaggaaataatttcagctagaaagaggaaagcggtagaacttactttcagattaagtggttgcaacacttttgcttttctttttttttttgagacggtcttgctgtcagataggctggagtgcagtggcatgatctcggctcactgcaacttctgcctcctggtctcaagcaattctcctgcctcagcctcccgagtagctgggattacaggcgtgtgccaccacgcccagctaatttttgtatttttagtagagacagggtttcaccatgttggccaggctggtctcaaactcccgacctcagtaatctgcccgcctcagcctcccaaagtgctgagattacaggtgtgagcaacacttttgcttttcatacagtaaaacctcagcactccaaaactctcaygaaaactttttctgactcttcatattgtctcattatcatctgtggcgtataaagtcactcagaaaaaaattcagaaaactcagtctttgatttctaccacactggtataaatattattctctatatcgaacatcaagtagatttggattgtatacatcttaagcaggtagactgtacattaaaaaaaagtttaaaaatctgatttcaagtcattgtgccccttcagatatttcctcctgctagattagagttggattctataatattgtggtagtgaatcctgaagattattgcattattattattactcattgcattattattaatgctgttacagatcaagtgctatgttaacatatgtagctctgaaatacctattatctattgtataggttttaagtagtttggatatttcaactatgaattatttttcactctgtaatatacaaccataaatattaaattgcattcaatgtgggatttgtatcttattaaggatagtttattctagcatcactttactaaacaccactaaataacgaaatggggtcttatctgggccctgcagaaaacatttacatgtctgattttttttttttcgagatggagtctcgttctgtcgcgcaatctctgctcactacaacttgcgcttttcgggttcaagcaattctcgtgtctcagcctcccgagtagctgggattacaggtgcatgccaccatgcctggctaactttttgtatttttagtagagacaaggtttcgccacgttggccaggctggtctcaaactcctgacctcaggtgatctgcctgcctcggcctcccaagatgctgggattacagccatgagccaccatgttcagacaacgcctgatgtctgaaaacaaatatcattaaaggactatcataaaaggttccaagggcttgggtgatcagaaggtaggtacatggaagactgccttagtaacctcatccccatgsagtagaatattaaaagcctttcaggtctgacagagagcaggcattcatttgtacctaataggaaatatttgttaaattttcatgtatggtattgtgactgtcacttttacatcttttttatagcatgtagctttaacattgtgggaccagttgggagatgggacacctcagcatcaccagaagagtgtggaactattttatcaattacataacttagttccttcttctagcatctgtgaggatgttataagtcagcagttaacccataaagataaggtaaatcctcttatcttgtgcacaccgccccctccgccacacacacacacacamacaaatactgaaaagtaagaaaactttagggaaattattgcaattaacatcggagtaagagaaaatagctttgttcacagtgatcttaatatctttaaaataaatgtattcaattatttctagaggaaagttctttacaaaagcatcagtaatatgaaaaattaaaacaaaaataaaatgctgggtttatttctttgttcaagacacagttatgggaactgatgtttagtattggtggtctcagttcttgggtcatttaaagaggaaccagaggcctcagttatggaacttacggatttattaactaatatatatgaaatgaaataatgtataaagtatatttataagccatagaatgctaatatgtgagattatattatttgtattattatactgcatatccaaaataagaattttgtatcctaatgtatatgaagtgtgatatataattcagttaaaggtggctgagaattagcctgagaagaagctggaataatcatttttactaacctcatcagggttatttaatgacatttgtggtcttcctgtgctgctctgtaatataaattgaagattttattgaagagcttttagaagtagattgtcctatttttaaaaaactcaaaatgctagtgagtttgagtgggtcataatcaaaaaaggaattgtgttaaataaatgaaacatttggtagaggagaaagtagtatatgaaggagtaaatgaaaggaatgaaaagtttattccaagaaaaatgttaaaattctatttctgctataacatattttttcaaaattattcaaaaataataggtaagcactgtattctaacaatttaagtttcacattaaatataaatctaggacaaatatatgcctgttttcacttgggtagcatttcatttttaaagaaatactcccaagttctaaataaagatacacatccatgaaaaaaaattaaaatatcttttactacttaatttttacatttctggtggttgatacaaatgcaggcttcataagaaaagcctgtattaagcccatagaaaaaacaagcatgcctcccacctatcacaagcatttagaaagttgccgtctggtttcttggggcttttgcttgaaggatccataaatgctaaagaaagactttaaaaattttgatagtgtgacaatttctacttgatttatacatgtttattatctaataccaaatgtgcttgcctatctaaataatttatttttacattgttttacccattattatattaatctttttccaaataatctcaaaagtagtttaatatttttattgtaaaaattatttttaagtatttaaatttttgagtcaaaccagctttataagtgatgaaaaactcatttgggattaatgtatcatttctgggacaaaaaatatatagtgcaatgaaatcaattttgataactaaatgtttatattaaaatgaaggaggaagtgctttctggactccagatatatgtacattagtaacttttttctcctgttatacaataatatagtaaactaattacttaaagtctgaactcaggaataattatttatgagacaggatgagatgatccttttaagttcaatatttctgtatatatttacatattttctgtgttyctactgccataaagaatataaataaagtttattgcaatgtgtgtttgaatattgtggacgttgaacgtaatacagtactcctaaatagtactctgattttactaaaatcatagtatcttcaagagagaagaacataatttaagctcccatgtttctcctcagaaaataaggatggaagcacatgccaagtttgcagttctttggcatctaacgagagatctccatataaataaatcttcatcttttgtacgttcttttgacaggtcagttacattttatattaagatttcacagtcatatatcttaatgttgcctctttccttgagtccactgtctagcttggcaagtgtaggagatagcaatttacaaattttataaagagaatttattattttgaaaaccgtaagctgtattaaaatgcatggcatttttactcatccaccaggtttttactttctggttttggagtacccggctccacttcccttccttggacaactattcatcacgttcctgataatgttagtgatagagcaatggatacagctctcttgagactatattcacatttagtgaaactgcatatagatagtagattatgtgtttctcaagcaattattttcaatcttctgcctaaactagatttattaaaatctatagctgaaaacactaacagattctttccatgaatccagagaacttgtagctgcctgagagtggttttggtttttgtctggactacgtaggtgacttcaaatatcagatctgcattaaattccaaggagctgccatttttaggtggattcatatattgtcataaggtagtctcaccagttggtctcatactggtggccatgaatctatgttcaaggtcagctcaggatcagatgtgtcctctactgaacgttatttcagctggtgcttttcaaccagcattagcattttaagtcatctgatactgaaccatatattgaacccctacaatgtactgaatatattgaacctttactttataaataatcatctcttatttgacaaccatctttcctaattttacaagtgagggaatagaggtcaggaaaagttgttacttgcccaacaccacacaaaatatttgaatcttgggtttttctgattccaaaccacactttcataccttccacagatctttccttgaattaagcacagagctttggctcacaaggagagtgtgagcagaggaacatggaccaacatggagtaatgccgacttgccgaaggctcagtgcttgataatatgaacaggaaaatgttgctaaaacaagactaatcatattttttttcagttcttcagtattaatcttagtaatgtatgcctgtgaaatttcaaagcatgagtatatttttaaaagggcaaaaggttttttycctttcttatacccaccgagactattgggattaagattattaaaatactatgatcaaaatttatcctgaagtatgactacttcaaaatagttaattcaaaataagaaacagaatttattaattttataaaagagtgtgacaaggtagatgtttggttctttattttaattatttgtgtttattttaggtcactgttcatcatgttagatagccttaacagtctcgatggttctactagctctgtgggacaagcctggctgaaccaagtcctacaaagacatgatattgcacgagttttggaaccattgctattgctcctgcttcatccaaaaactcagagggtttcagtacagcgtgtacaagcagaacgttattggaataagtctccctgttatccaggagaggagagtgacaagcatttcatgcaaaattttgcctgcagcaatggtgaataacacatagaagtagacagctttatttagaattattaaaataaagtgatacatgaatacaacagtaattgttgaaagaactgcatgtgagattttctccatgggcttattttctcccctcctcatgcactagcaatgctgtgtggaccatgtcagaatgtactttgtcaatgaccatcttagaggatgtgggtctctcagttgactctttcagggcaggaatcaggcacagctctgattagagacattcttcaattttgatggaaatatctttagagcttagttagcaattctggtcctacaggctctgtagatacttcattgggaatttatagtaaatctgtaatgcacattttgtatttcatgagtcattttcctcatcttttaagagaagaataatgctcaactttcaaggttttattatgaccatcagatgtagtcatgtttgtgacatgcctaaatattcactattactatattactacaaagtccatactttatagttgagtgatgccttctatacagtgatattgtccccttagattamtttatttcatttaagggacaaagactctcacatatgtcatttgtctcttgacaaaccctgtggtggtaatgaaaagatcattttactgagcaggttgctgatgcctagaaggctatggctttctcagagtctcatggctattaagtgatgaagctgaaaccaaactgtcatagtcctacttcatctctagtgtgtttctacagagtcttggttcctctctctggcttcttttctattccttcttctgaatcttgtaagaatttgcattaccctgcttattgccagaatgtctttgtgttaatgctttatctaactgtctgctgaattctcacctcccctctgagatcagtgccagacctcatcaatggtatcatgattctttccctaaatttgctagcatttggtatgtactactttgtatgtcactaagccttccaccttttctaaaagaagaccgtcattattgtatgccccctaaaaaatacagaaatgaattatgtatttgtggtttgctgctaattttaaagtctttagagagcttagaaacagcataactaaagtgaggtattaaggaggaaaaaacaaaactttcacctgcaataaaataaaatgtaattttaggaaaatataagtagatgatgacactaatgattaaaaattttgatcagtctacatttctacatttcaattattttaatgcattkkgtatttttcttcttttactgtttttctcatatatcagtgagccaagtacaactcatcacatcaaaaggaaatggtgaaaagccacttaccatggatgaaatagagaactttagtctcactgtgaatccattaagtgacagactttccctcctaagtaccagcagtgagacaattccaatggttgtgtctgattttgatcttccagaccaacagatagaaatacttcagagttctgactcgggatgttcacagtcctctgctggggacaacttgagttacgaagttgatcctgaaaccgtgaatgcccaagaggattctcaaatgcccaaggaaagctccccagatgatgatgttcaacaggtagtatttgacctgatatgtaaagttgtaagtggcctcgaagtggaatctgcatcagttacatctcaattagaaattgaagctatgcccccaaagtgcagtgatatagatccagatgaagagacgattaaaattgaagatgactccattcaacagagtcagaatgctttgctgagtaatgaaagttctcagtttctgtctgtgtctgcagagggaggccatgagtgtgtggcaaatggaatctccaggaatagctcctcaccttgtatttcaggaaccacacacactcttcatgactcttctgttgcttccatagaaaccaaatctagacaaaggagtcacagtagtattcaattcagcttcaaagaaaaattatcagaaaaagtttcggagaaggaaacaatagttaaggagtcaggtaaacaaccaggagcaaaacctaaagtaaaacttgccagaaaaaaggatgatgacaagaaaaaatcttcaaatgaaaaactcaaacaaaccagtgtattcttcagtgatggtctggatttagagaactggtatagctgtggagagggagacatttctgaaattgagagtgacatgggttctccaggatctcgaaaatctcccaatttcaacattcatcctctctatcaacatgtgctcctgtatctccagttgtatgattcatccaggactttgtatgctttctctgccatcaaagccatcttgaaaactaaccctatagcttttgtaaatgccatttcaactactagtgtaaataatgcatatactcctcagttgtctctccttcagaatctattggccagacaccggatttctgttatgggcaaagatttttatagtcacattccagtggactcaaatcataacttccggagttctatgtacatagaaattcttatttctctctgcttatattacatgcgtagccattacccaactcatgtcaaggttactgcacaagatttaataggcaatcgaaacatgcaaatgatgagcatagaaattctgacactactcttcactgagctggcaaaagtaatagaaagctcagcgaagggtttccctagttttatttctgatatgttatctaagtgcaaagttcagaaagtgattcttcattgtttgctgtcatctatctttagtgctcagaaatggcatagtgaaaaaatggcaggtaagaacctggttgctgtggaagaaggtttctcagaggacagccttattaatttctcagaggatgaatttgacaatggcagcacgttgcagtcacaacttcttaaggtgcttcagaggctgattgttctagaacacagagtaatgactattcctgaagagaatgaaacaggttttgattttgttgtatctgacttagaacacatcagtccccatcaacccatgacttctcttcagtatttgcatgctcagccaatcacatgtcaaggcatgttcctctgtgcagtgatacgagctttgcatcagcactgtgcatgtaagatgcacccacaatggattggtttaatcacatctactctgccttacatgggaaaagttctgcagagagtggttgtttctgtgacactacaactgtgcagaaatttagataatctaattcagcagtacaaatacgaaacaggattatctgatagtaggtaagaggtgatttttaactttattggtactgacatttttcacatatatgactgcttaatgtctggaaagttggtcacaacttgagtaaataaagtaatggtttttggtaggttacaaatagtgtattactttccacaaaaaagaaaatttgacttgaggaagagtatcagtaaaagaatctagaatggaaaagggaaggaatatttaaacaggcttattttctaccaagatctaaaattaatttcaatgctcttctcttcttgcctgagctggcaaaactaatgggaagcttagaaaagggtttcccaggttttgtctgttttatctaagtgcaaatcaatttcagactgaaaataatttaaatttacaaatcttttccatccaattttatttcttgttttggattttcatggtttagtgacaaaattcgatctgagtctctatgctcaaaatgaagtctgaaaaattagttccagtagactgtcatttttcttcagaataaccttagtttctacatgtaaaataataagaaaactgcctgtattgtttaatattaatatgcctgccattcctcagtggctagagagtcactagccatcatttgtttattttgtatagaattctttagccaaaaagaactctagtacatttagtccaactcacttattttatagattaggaaataaaagcccctgatttattcttttagccatttgttaatctagtatttattgcacatcttctgtgtacctgacacattgtgagtatttactagtgataaaatatgaactatactatcataaaacttgtgtttaaatgaatgcattttacttcaggcctctgtggatggcatcaattattccaccagatatgattcttactcttttggaagggattacagccattatccattactgtttgttggatccaactacacagtatcaccaagtaagactgcacaaatatttgacttcttttgaaagactgtgaggtctaataaatttccatttgtaaatctcagtaagtaatatgtttcttttcccccaactgttaatagcttttggtcagtgtagaccagaaacacttgtttgaagcacgcagtggaatcctctcaatccttcatatgatcatgtcctctgtgacactgctttggagcatactgcatcaagctgattcttcagaaaagatgactattgccgcatccgcatctcttaccactattaatcttggagctacaaaggttagacaattcatatttaatctgtagagctcaagagtctgaggaccttcccaaagattatattcagaatatgtgaataatttgtgtagtatttacaggactctgctaattatcaaataatttttaacagttttcctgggctatggctgacgtatcatagaatttgcccatttttaagtatacaattcagtaatttttttagtaaatttacagagttgtgaactatcaccccagtccaatttttgaatatgttctttaccacagattcctcatggccatttgcactcactccctgttcccatccctaatcccaatcaaccacgaatctattctctccatatattgatttgctttttctgaaaaagttcatataaatggaatgataacaatatttggtcttttgtgtctagcttctttcacgtgacatatttttaaggttcattcatacatgttataactttattccttttttttttagggcattttaaattgacattttaatatgcaaagccctcctagaaaacaatttagcaatatgtatagagagctttaaaggtttcatagtctttgacctagtaatctactttaggaatgaattctaaggtaattgaaattatacaaagatgtatatacaaagtgttcattatagtattatttaatggcagaaaaaacagagatcctaaacaattaattagggaatgtttaaattatcctttcaatgtttcattacatagccactaatattcatggttttgaagaattcttattggatggagaagggctcaaaagctcagtgaaacagggatgttacataattgaacaaataccatattttcaattatgtaaaaaatgttatctgcagaaaaaggaataaagaaagtttgcattttatcagtaattatctcaggatggtgggataacttattgatttttaaattttttttcttccttgcactctgatattttccaaatgctgtgccatgtcaagctgtcaaattgatatccttcaataacctaattttgctcctagaccagaccacctggatcagggatccaagggaacacatagggaagtgggaaaagggtaagggtgggaaccattagaacatttgatctaagttttgatgcttggattaaactatactttttatgtttcgttttacttaaataaaacagaaggtgttttataattatagaatccctcacctttttttaaaggactctatatcagacttactaagttgaattttatatgtgttgtgtttttctagtatcttttcacagtgaatagacttttatttggctgattggtagccgtcattttataggatttgtttttcttttagaattatagtcatattgtagctcttaacgttattaaagtttcctctagtgttatttagatagtaaaacctataagtactatattatttcaaagaaaccaaaaacgcagtctagttgtaaatgttttttcattttttaaaagtttcactttcatttgcttcaaattgttttagaacttgagacaacagattcttgaattgttgggccccatttcaatgaatcatggtgttcactttatggctgccattgcatttgtgtggaatgaaagaagacagaataaaacaaccaccaggaccaaggtatgtatttagacatttggcactttttgtttttgcatttggtgagtacatgctaatttccacttctccatatattgcagtggggccggggtagattcgagtgtaaagcaaaagtctgtcgacagctttagataaattgttgccttaatttctttaagtattgattaaaatttgaggtcaaggctaggcacggtggctcacacctgtaatcccagcactttgggaggccgaggagggcggatcatgaggtcaggagatccagaccagcctggccaacatagtgaaaccccgtctctactaaaaatacaaaaattagccaggcatggtggcacacgcctgtagtcccaggtactcgggaggctgaggcaagagaatygcttgaacctgggaggcggaggttgtggtgagccaagatcatgccactgyactccagcctgggcaacagagcaagactcttcctcaaaaaataaataaataaagataaaaataaaataaaatttgaggtcaaatataaaagatatgtgaaaaaagagaaattagtatgatattaaaactaaatagaaatggtaatatggtacagtatatttttcaagtgctagtcatttagggtacaaagcaaggatatggagaaaagttttcatcttgactatagtttactatgatgtgatagttcaaagagttcttgtttctaaatataattcacaaatttttttttctactttttttggtagagatgaggtctcactttgctgttggtcttagctgagttatatatgtgaattttgttgctttctgagtttcaaagctcaagagaaatgctctatattgaaaacaaatcatggcacattagaatagtaaggctattatataacttacatttatataaaatatatgattttttccacctaacaattcctgattttgtgctgattttacattacatttttaaattaatcaaaataaacattcacaccatattacattattttgcatgtgaagattcagtagtagatatcactcacattgaaaatttaaatcctggactacttaaaagcagtaaagaacatttgatttaacatggcatgttgaagccaggcacagtggctcatagctataatcccagcactttgggagaccaaggcgggaggattgcttgaggccaagaattcaagacctcatgagaccctgtctctacaaaaaataaaaatagtgaagtgtkgtggcatttgcctgtagacctatctactcaggaggctgaggcaggagaattatcaggtatattacagctgataatatgtaattcacatagagcaatgcctagcacttaataatcactgtgtaaatattagctatattattcctcatatttaaatagaaatagagagccaaggattaccagtcacataaagtctctaatgtgatagacagactgaaacaactagattttaaaaagtcaaacagtgcagataacagaagaaaatgtaaataatagtaatgtccttaagtgggtgagaccatgaagtagaaagggagatcataggaaagaccattcccaaaattaaaatttttcatggatattaaaaattctgcaacagaaacaaagcaatatttttaggagggttggaacagaaagtggataaatatcagaaatggaatacaaatttaaagatacggaaaatacgagaaaagagataagaatattagaggagtgatactagagacccagtatctttctgcagaatttaaaaacaagaggagaaaaatacaaagaaataatacaataaaagtcctcaggaatgaagtaaatatgtttccagattgtgcctaccactgtgaaaagagatctgcacaaagattagcatgtaatttcaaaacactggagataaagaagagatcctaaaagcttctaatgaaagaatactggtcacattccaaagaataaagatgagatttgttaacagcaacactgggaattttgatgggaagttagtttcaacccataattctatctccagccaaactgtcactcaaacattttcagctatgcaatgtctcaacaacaacaacaacaaggaaaattgccatgagttcactttttcttggctactggaagatgtaactccaccggaggaggaataaaccaagaatgaagaagacaggggatccaagaaatgggctgcaacacaaaagagaaagcaaggggaatctctgggataatggtaacaggagagatatcaagatgacactgtgtagcaaacctagagagtatcaacccagggtagaataaaaagacatctaacagaaatgtctcaaggaaaaaagagaagagagggaggaaaagatacaaattaattacctgaagtatttgaatatgtaattagagatttacagttgaagtatgtagggatgaatttttaataggtacagagaaaatgaagcaaacaaagcagtttattagctctaggaaaaacaaaaagttgtaccataaaacaaatgcaatgctagtacaatgcacattgcaaccaaaaataatcatgtgaacattggatatggatttaaataaaaatatgatataacaatgttgagaggataggtagaaaagtataagagagctacatctttgtcttccaaaataagtaatgaatagataatgtctaaaattgaaaataaaatcaggaaataggaaaaatagtagtatatgttatttagacgtaatggaaaagaacataaagagttgagcatggttgctttggggcatgggaagggatataggacaatactattttttcttataaagcttattgttctgttttattttttgaggtgatgtacctttattgatgaaaaataaataaattttgagcctgggcaacatagggagactctgtctccacaaaaaaattaaaaaattatctgggcatagtggcatgcctgtggtctcagctactcaggaggctgaagcaagaggatcgcttaaacctatgaggttgaggctgcagtaaactgtaattgagccactgcactccagccttggagacagagcaagaccccatctcaaaaaatatatacatatattgtatatatatatatatatgcaaattttacttttatatatataatatatatatttaaaagtatatatataatatatatatataataatatatatatatataatatatatatatataagtaaaatttgcctaaagtagtcaagggacttgaagaggtctttatattaaatagaggccagggctgggtgcagtggctcatgcctgtaatcctagcactttggggggctaaggcaggaggatcattttgagcacaggagtttgagaccaggctgggcaaaatagcaagacctcatctccatttaaaaaatataaaaaaagaagagatcataaaatactctcttctgtaacttcccctaaaagacttatatacatacatacatacatacaatgatttattacctaggtcattcctgcagccagtgaagaacagcttttattagtggaattggttcgttcaatcagtgtcatgagagcagaaactgttatccagactgtaaaagaagttttaaagcagccaccagccatagccaaggacaaggtaagaaaaaactcttcttcacatgtgtttacaattctgtttcagaaattatgctggtaagatttttttttgtacaataatgtcctttcaatatagtacagattgcagagatgactgcatgtggccctcacactgcttcaatcaaaacaattatcaatatttgtagtgacttgctattctgattattcggtagccagtgaagagcagttaactgctcatatcttcatatgtacctcaaaggtagtcagggaccatgtgactaaattctcaggagagatttttctggtcatttaaagaacataagccagagctcaagatttgcttctctcagttgttgccatttttcatagcttctttattgctttcttttctgaatgaatctcttaattctgtgaactccccaaattttgctataaccttagttctagtcaatgtcatttcttgaccatgtataatactgtgctatgcaagtgctacactatgaatgacatagtctctgcacacacattgctgtgtttctaggcaaaaataaaagtctacaaattaggaatattacggacttttctactttttctgctctttgttcaagcaataccaagaggtcatattttcccagaaagtatttaccaactacaaacattagactttgagccaagccaaaatagacctaatcacatcctttaaagaattatgatatatatctgaaaatgttgaatgatgttttccttttatcttgtgtttccaaagggagtaagatgtgtgtgaatagtcagtgtccttattaagtttttaataaaaactggggcatttgtcataggatttttagtttgtattttgagtacctatttgtgccagacattgagcaacacatgagggatatgaaaacaaattagagccaatccactgtcctgccccaccaacctgtgtccccttattaagttctgaatctattagacacttgatttttggacaggaaaccttcaaggaaatagttgggactaaaaaagcacaaattgataaacgtcagtggtcatcaatatcattctctggcctcttgttaatttccaagggcaggtgttttatttttattatatattacactcaacactatctttaatttagtggctatatttaaagctcttaggaattgatcacaaatttgaactacactaattgaacagatatgtgtaataagactcaaatacacatttcattaaaaatctcaacctcattctgatagcaccaagcataagctacctaaaatagtgttgatacttatagagtacatgaatcatttaaaagtgagtggtggactatcaacttctgatatatggaaggaaaaattgacagtctttccattccttccatctgttttcaacttttaaaatagctcatgtgttctgaatttttcctactgagtggaagagaactgcatggctcattaatgaaaaattgatgattttgttctttcaatttttttaattaaaaattggcagtaagatacagagtagttgcaacaatgaaaaagcaaaggcagtattcttcttcactacaaaattgatttcttttatttatagaaacatctttctttggaagtctgcatgcttcagtttttctatgcttatattcaaaggtaagattactgatattgatctgtccttactatgttgctagaaacagagaaacattatttatggatatattaatataagtaatgagtgtcttaacgacccagccatgtatatcctacaaacctaaagacctaaggatattgaagattcctagatagtaaaacactgaattgtgataaaatcatttaaacataaatgaaaagttgaacctactctcgaaactatgcatattgccactgaatccattattttggtataggtgaacatacagtaattcattctgcttttttaatgttaggaatgattacatgmaatatcttcttactatcatattccattttgcgtttaactgacctgtgaacagaagttatgatttgagtttttataacttcttactcaagaacctgactcttcatcctcctttataagataattccattttattcaccaaactcagcctccatttgtaatctatgactagcattataaggtcaggctattgagtgtatttaaactggttgtgacctagagcaagcactgcctaaaatctgaacttatatacagagaggtgttagggttaaggtcagactgaaacaaagatagtcttcattatttttacaggttaaagactaatgttcagttgacagccctccataatatgaggtagagacgtacaaggtgaaggaaaaagaactaagagggaaatggagagaccaggctagggagtacatgactgtggtatcagtagttaaactgagaattactgcagttgtattttacttttgagatcccatgtgataaatgggatttcaatagaaaaatttctagattaagaaattgcaggctaggggcggtgactctcgcctgtaatctcagcactttgggaggccgaggcgggcggatcacgaactcaggagatcaagaccatactggccaacatggtgaaaccctgtctctactaaaaatacaaaaattagctgggcatggcagcgcacgcctgtagtcccagctactcaggaggctgaggcaggagagaattgcttgaaccggggaggtggaggctgcggtgagccgagatcgcgctactgtgctccagcctgggcaacagagtgagactccatctcaaaaaaaaagacaaaaaaagaaaaaagaaattgcactggggccagatgcagtggctcatgcccataatcccaacactttgggaggccaaagcaggtggatcgcttgatcccagaagtttgagaccagcctgggcaacatggtgaaattccatctctgttttaaaaaaaagaaagaaattgcattgatatttcaactgtgttggtttactaattaacgttagtaaaaatgtaaagtttttaggaattttgttctatcattgtctataaaaatttagagaatgttccacaaactagtagaaaaccatagtttattgtggcttttgtataaactatattatcttgcagaattccagtgcccaatttagtggatagctgggcgtcactgttgatacttctgaaagactctatacaactgagtcttccagctccagggcagtttcttatacttgggtaagcaatttcacttaatattatttcaaataaaaggataatgttaattgtcctagttgccaagtattagtaatagatattttaggtgacagtgatctctctaccttctcatagtgttcttgagatgcaaaactagatgtataaggcctgtttaagaaaaaaaaaagtgggaggcagggtgagaggaggaaacagtctatgtttatacatatacaaaatgtaactacactaacataaaactgttacaacagtagctgtttccgtggtggtggagagtatggaatggaaaggggagggggtgatgtagcatggctgaaggggaacttcacagaggagggacacttgagctgggccccaaacctaaacagcctgggaaaatttttctctttgtgtcttgaagttttctgatttatcttagtgatttatatgattatttgataaatgttagtcacctatgactgcaagtactgggatgtcatagtcagtctctctttcttgcttgccattattcttgattcctaataggtccccagtaaatacttggtaagtgaatagaggtggtgggcacagaaagcctttgtgaaacaggaaggggaagggtattctggggcraagtaccttgtctgatttggtaatagagcagggcacaggcagtggtatagtggaaaataagactgaatgaaaagggagatgggagctagatggggcaggatcttgaattttattttaaagaatgtggtcttgaaagggagtgggagcggttgcaggtttttgaggagagacatgactggcatgttagtagtagtaggctagatcagaggggaaagaggctagactaggaattctatttcaagtgggaagtgtggggatggtttcaactattgatgggattgaaagaacaggataaagaaggagaaggggccagcaaaggagatagaaagggaagtatcaaaaagaagaaaaccaggcatttgattgtccagaaccaaagggaggttaagagagcatggttaacacctacagagaggttaaggaaggtgaggagtaataaaaggctatgtttgttgacaatctggacaggcatcctaattgtccaatcaccagttatctgatgattttggagagagggtttggagaggtagcagcacagatgtgttaacagcaaatgcttagtgtgggaaagtaagtgttgattcttctttgaggatatttgatcatgaaaagaaagaagccacatgcggtggctcatgcctgcaatcccagcactttgggatgctgaagcaagaggactgcttgagcccagagtttgagaccagcctaggcaacatagggagactgtgtctctacaaaaaatttaaaaattagccaggcatagtcacacgtgcctgtagtcccagctacacaggagttgtcataaggttcagagagggaatgtatgtacaggtgttggaatcatcaccaaataaccctgctggctaatttcatcaaaaaattaagttcatttgttgtgatctgtagctgttcccctttccttacatgccttttcttcctttcagaatgaaggatcctcttccttttcaacatgtgcatattctgaatgttaaaacaaaaagttgaaagttgaacattttcagttatactagaamctttatttccttttaaaatttgtcagtttacctttttgccaaccattgtactgatcctctaaaattacctaattaaaaaatagatattgatatgaaggttgctctttagtttcattttacatattagtttggaagtaattgtgcatataatttatcttttaaaaaaccatgtcagagtgaatattgagtagactcttagcaaataatgaaaatggaaatttttttcttcatgaactatttttaatgtgttatgggaagaaatcatttctgtattacaatttaagattttttaaacttttctgtttatatataaaacacacatagaaaaatacacaaataattagtacacaactctacaaatgcaaagtttgtaaaaagtcaacataccactatatcattacaaacccaaattaagaaataaaacaccatgtgtccctccacacctctcccaattactattcttttatctccccaaatgtaaccactattctaacaccacagatggattttgccttgtttttgaactataagtatatataaatattttgtgtcggcttcttttgttcaacatatgtttatgagattcatttatgtaattcacatatctgtaatttttcattgttgtttagtatttgaacattctgcaatttgttttttctttgatatgggatcttgccaggtttcccaggccagagtgcagtggttattcacagcatgatcatagcacactgcagccttggcctcaagcaattctcctgccttagcctaccaagtagctggaactacaggcatgcaccaccacgcctggccacattccacaatttatcttttctgctcttgctggacatctgggttccttccactttggggctcttacaaaagatgctttgagcatctttatacagtgtcttttcatgagtatgtttatgaatgtcagttgagtcataggatatgtatatatattaaatatttaaaatggaaatcaagaccattaagccgcttaactcatmgtgagaaattagatcgcattagtttcttttagcctgatatttcccgtttctgttttctctttggcccttttagggttctgaatgagtttattatgaaaaaccctagtttggaaaataaaaaagaccaaagagaccttcaggtaaggcagtctaagagctgttgccaaaactgtttctcagtgccctcaatttgaaaatgagagagtcaaataaaataaactgaagtttctttcaactctgaacattctatgggaatcaacaagtctattgtaaaatatctattatcagaaatataaactacagaagttcataactagtgtgcatgtgtgtaccatacatagttgttcttccttatttttttaggatgtaactcacaaaatagtggatgcaattggtgcaattgctggttcttctctggaacagacaacatggctgcgacgaaatcttgaagttaagccttctcccaaaataatggtagatggaaccaatttggaatctgatgttgaaggtattcttgtcaaacatttaggtttattatctgtaagcaggcatatatttactaagaaatcattttgcctagcactataagtaccacaaatttatcccttttctcatgtctaacaagtaactttttttcagtgggaaaaatatatatatacatatacatatatatatacatatataaaaataatacacacacacacacacacacataaaatttattttcagtgggaattagccatatctttaattttctcttatttatagatatgttatcacctgcaatggaaaccgcaaacataactccttctgtatatagtgtccatgcattgacattactctctgaggtaaatattaagctttttcacatgaactctcaagtagactgtttcattattaaaaattagcaagtaatttttatagaggaatttctaatttgagaaactattttgtgcttctagaaatcactatatagaattaatataaagttttggccttgtatktatttggattatttagtttgccaaacattagtgataaatttagatactgcttcccttctccatgtcctattcttttttatgtgtttttttctttttcttttttttttttttttgagacagtttcactcttgttgcccaggctggagtcaagtggggtgatctcagctcactgcaacctctgcctcccgggctcaagctattctcctccctcagcctcctaagtagttgagactacgggtgtgtgccacaatgcccagctaatttttgtatttttagtagagacggggtttcatcagtttggccaggctggtctcgaactcctgacctcaggtaatccgcccacctcggcttcccaaagtgctgaggttacaggcatgagccaccgcgcccggcctggggaggggtggaggtgatctaaagcctgccactataatgtattttacaatttaccaaacattttcatgtacattgtctgacaggttcttttttataccctattatacacatgtcattttgtttcctctttgcagatgtggatagtgacctttacaaagatcagaacaataggactaaggccaaatagctgttaattgacagtgttggaatttgaacagcccagttcaattgtttgtttttttttcctaaactacattttagctgagtcagggaaaaagaatactatagtttctagtactaaattcactgtttactcactgtcacagaaggttcttgaactcttttcttttttgtacttccctatctcagttggaaatggcaagatttgcccatatttatatcctatagtaacaatgtacaaaaaagcagatggtggcaaaactcattaacataaaaatgattcaggaagatttaattttagatttttctaattttaagtagtctaggttttctaacaaactgaaaatcagtaccttgggatgatgtcagtttcacctcatatgttactcttcattttttatgttttcataggttttggctcatcttttggatatggttttctatagtgatgaaaaggagcgggttattcctttacttgtaaatattatgcattatgttgtgccctacctcagaaatcacaggtactatcattatttaaatagtttttaaaattaattcatagcctgttagaaacaagttctgttcccttattgccatttctagaattatcataaaatggcatttttaccttgaattataattgtttaaaaaaattcatatattatttttcttatggtgctttctatttcatatcttcatgtcactgtcttaggtaaatgtgaacatttatgtataacttgataggatgattaaagttaggacayrtaggttaaggtggtttttcttccttgtagtgcacataatgcccctagttatcgagcttgtgtccagctgctcagcagtcttagtgggtatcagtacacacggagagcttggaaaaaagaagcttttgacctctttatggatcccagtttctttcagatggatgcctcttgtgttaatcagtaagttgccctcttatttgtattcagcatgatgcacctcacagtctgatgaaatcagctactcccctggaaagttagaatactgttctttaacagtaacaacataattacatgttgtaatccttatctctttcagttggagagcaattatggacaatctgatgacacatgataaaacaacatttagagatttgatgagtgagtattacgggatgacaatccaagttctttcctgtacatggttccttcttactatttacttgtactcttttctggagactaggagactactgaattagctctttgtcaagtgtcagtggggatatgtgctctagggaaagcacactactttctgtacgctatgggaatataatcttaaaatttacagaggacaacttaagtgataagtaataagtaaaactatttgtccttttgcagcaactagtggagggaagggtccatgtctaatttgaatctaaattatttcctcagtacacagcatcatacccagcacataataatagcactcaataaataattattcagtgaatgagagactgacagatggtgaagtgcaaaaggcaggcagtcgaatccagcctatcagacaagtcactttaaatctctggggctctgtttatttcatctgaaggaagaaagaggggtgccaagaagggcagaatcaccccccaccccctctttctactcttgattgtttttatagtttaggattccatttagaatttcatctgaaaaaaaagagttttaaaaaacgtttgaaagttattaaatagcagtaacattgtatgattctgtaatattttttaacaaattctttagctaaagctacagttttctcatttggaaaaagggcaggatatctgttttatcttcataaggttgttttaaggttcagatttatccattcaacaaatttttattaaaagacaacagtgggccacgcattgcgctaaccttaatcaaattttaaaagttgtgaaggaaatagggcaatgtgtgatggattttaaataacagctaaatagctcatatacaaggtgaaactaaagaagccaaccatgagaaggcctagggtcaaaatattccaggaatagggaacaagaattacaaaggttggctgggtgcagtggctcacgcctgtaatcctagcactttgacaggccaaggcactaggattgtttgaggccaggagtttgagactaacctggacaaaatagcgagaccccagctctacaaaaaaaaaaaaaaaaattaaactggccaaatgtggtatgtacctgtagtctcagctactcaggaggcaggaggattgcttgagcccaggtggttgaggctgcagtgagccatgattgtgcccactgcacttcagactgggtgacagaggaagataccatctcaaagaaaaatacaaataaattgcaaaggtcttgggatgggagcacgcttggtgcactgagagaatgacaagcaagacagtgtggctacagcagagtgagttgagggtgagtaatgacttgaggaaggagaggtaggtaggcaagctacaccagaaggtatttttaaagtaacgagaaggatttaagcagatggcctcaaatattaaagggtttcctcagggttttatataaatggtattagtggttttaccttctaaaacctacagttctaaattttcctctccatcacaattcctaccattttggtcctctggcttatatacgttggatctgtttgccagcctgtctgccccagagaggggcatcaagttttgtaccccaagctcctctcagttttggatgtcatagagcatctagctattttaaaaaacaacagaataatctttcttcagatgacagtgtcacagtctctttcacttgctttttcagctcgtgtagcagtggctcaaagcagttcacttaatctctttgcaaaccgtgatgtggagctagaacagagagctatgcttcttaaaagattagcatttgctatttttagcagtgaaattgaccagtaccagaaatatcttccagatatacaaggtaaaaaatgaaaaaccctttattttttctctaactacaggtttttggttccttagaaaatacttctctaaatactaagttggggtaaaatatatcaagtgtagatcaatcgggaattagaaatttttctactgaaacaatgaaaattatcaatgctggcatctaaaagaaatcatcactgagttgtaggacttgcctaaatgtggtctctattttattgtttagttcaaatttcttaggaattcatgtttgaggatgaggtataagatgattttgctgcgggcagtcatgttagcatgttctccttgtggacaagaatttgtgtactctgagaagaccaaaatataaggcaaagccaggaaattgtggctagaagtaacacctggagatctgtaatttggggactgcatgggggattatgtaacattttcggtaacttcatcaagtgggtttggtgaccttctgtatccagaaggatatcagtacacgtgtcatcaccctgtaccaccaaatagctccacaatggggatttatccagaacagaattatttgctgctcgagtcagcatactctaaagcctccagcctcaggagccaacatgggaacatgatagttgtcatctctctagggagaattttcttttctcccagaagacaaatgattccttgtttcctaaccttttacgcctaatttcagatatgcaaaatgtacactatttgtccctacaattttttttgtttaagttgactagatcagtgctactcaaagtatggtccatggaccagtaaccagtctgttatcccatccataagtacaaaactttagagtaaacattttaaacttttatttgctatttgacagaatctgcttaataagaaaatgacatttgtattttgtgtatctttgtttaattggagttctcttattcgttgttttatgaaaatatctacaacagttttgaatttttttaaagtttatcctttactacagatagtttgagagtactggaccgacaatatagaaagttttatgtgataaagattatttagttattgaaaatgctctgcatttctttcagagagattggttgagagtctccgtttgccacaggtgccaactctccattctcaagtgttcctgtttttcagagtgttacttttaagaatgtctccccaacatcttacctcactctggcctaccatgattacagaacttgtgagttaattttaattcagtcaggttataaatctaaatgataaaacagtgattagtttccatgtgcttactagatattaacgaatattgggagagaactgagctgtagttaaaccagttactgatgctttttacagttgaaaatagtaaaacaagtcagattccatttccatacagcttaaatttacaaacatgcaacatagatggatggccagctccttgtgaatgattactttcttggatctggtttagtgtttagtctgtactacactacatttttaactctgtcatggcytacagtcctgacaatagcagctggacccatttacaatagctgtagcaatacctctagtgatagagatggctgagctggatttaactgctctgacatattacatatactcactcttgaagtgcagcacctaccccatttaaacttgcttcagagagactttcacaaagattttgtaacctaccaaacggtaaaaccttcccaagtcccacctacacccttctgttcccctcctcaaaccgtacacagtcatccttatcctcctcagaatgatttggggagttaggaaagaggaatgagtaaacaatggaaaaggaatctctctctgaaaatctagctttatagtttccctgcaaatataattgctttaatctttcttttatttttccttttttttttgttttttgagatggagtctygctctgtcacccaggctggagtgcagtggcgagatctcagctcactgcaagctctgcctcccgggttcaggccattctcctgcctcagcctcccgagtagctgggactacaggcacctgccaccacacccagctaattttgttttgtatttttagtaaagacggggtttcagcatgttagccaggatggtctcgatctcctgaccttgtgatctgcccacctcgacctcccaaagtgctgggattacaggtgtgagccaccacaccagacctatttttccttttttaataactaactctgttccataatcactaaaaacaaaagctcaccttcatctcactggatttcaccaaatgattagcaaggctctgtgtggctaaatttgcagttttaccttcagaaactaagtataatttaaaagattctgaaaatgtattctaaaatttgtttttgcgttaatgaaaatacaacttaaagataacttgaaaggattaaatatccagtttaaataaacatttaacatttcaccattttcaggtacaagtatttttactgatggagcaggaactcactgctgatgaagatatttcacggtaatatgtaatttaaatatattgttgtccattttttaataccctgaaattattcagaatattactcagcatctargagaatatagtctttttctgaatacttatttattattatctaattgattacgtttggatataatgtagttttacttattccttaagccctttagattggattaagccatcagcattcattgccctgggcccctagacacaaatttaatttaaagcagtacagtattgtttcagctacatgagctaggctggttttggtaagtcacatctggtctctgaaacattgcaacatatagccaaccctgttatggtaggtaacctggaaccaggctattcgtatatgcagatcttccagatggtcccaatttaatatactttwattctttttaatagaggcagtttattaatgtatgactaaatacaattttttayttacacaaatttataaattgaaaagttcctttaagaccaagtttcttgaatatattttcttcttcagtagtagatttataaaaaggatctcctgtactaataactttattattatagagaattttctcatccttgcagaaactgagtaaaaaagtttctcgcttttacagtttttatttttatatttcttgaacataatataagttatgtactacttttttttagacagggtctcatcttttcacccaggctggaatgcagtggtgtgatcctggctcattgcagcctcgacctcccaggctcgggtgattcccscacctcagcctcctgagcagctgagaccacaggtgtgtgccaccatgcctggctagtgttttttttttttgtctgtgtgtattttttgtagagacagggtttcatcatgttgcccaggctggtctcaaattcctgggctcaaacattccacccgccttggcatcccaaaatgctgggattacaggcagaagccactgcgcccagtctatgtactgtttttgcattctcaaagaagaaaagtgaatttttgatttgaaaacagtgacatttcatcatgaccttgcttagcaattactggcacatttatctcaggatgattatgaaaaatattagctggtacttttagatctttccaggaattcctgtgagtaaatgggtccagctgctgacagcactgtctcctgcttacaggacttcagggccctctgtggctggtctggagacaacgtacacaggaggtaatggcttctctacttcatataacagccagcggtggttaaacctctatctctctgcttgcaaatttttggatttggctctcgcattgccctctgaaaaccttcctcagtttcagatgtaagtaaaagcaaggatattaaatggttatttttgaaagtgcatttgctttggtcactgacatctatgactaattaaaaagttttttgtgtaagttgaaatattcctaatttttactaaaatgtaattcttttggcacagcagagttatcggaagtaaatggtcaatgtggatatattaacagactattcagtcaacagattgagtacctccagatgtgagacaatggggtacataactcacatgcttcaagtccagggaaggagacatactcatactatggtggctcatgcacaagacacactgaggccacatagcagagatccctactagctctgaaggtcagagcaggccctgagggcagtcttaacctgaggtggtgaagaatgacagctgggagagtgaagatagaggcagctgcagacatgatacgtctgaagtgtggagagattggtattgctggagcagaatgttaagaagaagctggaaagggattaaaccatgtaagaccttgtaagctgtgttagagaacttggacagctaaggaaagaagtgatattattaggcttgaattttagaatgcttattttggctatgtagtgtggagaatggactggagctgggcaagcctagaatgaaggaggcagttttatcttagatgataatgaattgaactgaaaagaataggggaaaagttgataaaagcatatataaattttaaaaataatgggcaagctatgtaagattgttttatcaaaatgtagttaaggtaatatgagaatttatccacaagatcaaatatgtattaatttattatattgtgtcttatttttcttctggaacagaaataataggataaagagtatgctactgagctttttctcttttttatttggacatgctccaaaatttgctattttacaagcttacttttcattaaacttaatggtaagaactagaaattacttttagagtcattctagttcctttaattttctcttctacttgaaaaccatatatatatatatatctactttttgatgaatttcagttgttgggtatctgttacacagatgttactcctaaggaagtccagaaaagaatactaaacagaatcgtaggaatgtggccaatattaaccaagacacttaccttcacaaaagtgataactattctgtggtgcttttggagggacatgaaatagtatgctcatgatactgactttttatcttccatgacaagaaccaaaatcagtttatcctctttgtcaagatgttagttactacaaaagggaaggaaacatgccgttatattaattagttttttaaaaacttacatctttctaaaaataaaaatctataaagtagaaagtgtaaagattttaattatcttgaaagagtaatatcttagcatgatccatatttggaaagttcaaaatacttgataagtttactgtatataaatttaaaagtatccatgtaactaaaaggtactataaagttcgaaagatagcaatgaattggtaaaagatattttcgatgtatatgacaaaagtctaaaatgcataatgtataaaaataacctggtagaaaaatgagccaatgagcaagacagttaataatttataggatggtttctaaacataggaaaaactgctcagttgttctcctgagtttccgattaaaattatagataaccatcagaatggtaaagatctgaaagttgctttccttttacttttagtaacagaagcattcttattcttgttggaagtatacactgatattgtccaattgttcagaggttatatttaccaaaatttaaaatatatatctttaagcctataattctgctacatccaaggatttatcctgtctctatattctcagatgtgcacaaaaataaataagcattacttaagagtatccactgtggtactttgtaagtgcaagaagttggacaatctaggacattggctgtggtgtactactatgttgctgttaaaaagaatgaagttttatatgatgcagaattgtctccaagatatgtaatttatatcaaataaattatatcaaaaatatatatcctacatgtataattaaaacaggcagcaatcatgtttttttaaaagagagggttggttgtgtgaatatatactcttttgggcataaactctctggacggacttacgaagctgacaacattgatgaatcctatgcggggaggggagactgcctttctttggtatgcccatttatactgtttgaatttttcccatggtcggatattacttttacttacttatgaaagacaaaattacaaacaaaaatacaagagaagtgcaaaaaaagcccttagttttcttaaattcgttcaattttttactcctttactatgcaactagggaacatttggccagttatatgttgaaaaatcaagtctttgtcagactgttatgttgcagtacaaagagataagctaaatgaaaacatcttccttttaagaaccttatgcctgttcgctaatgagaaaagaaacatttgttgagtacttgctttggactcatgaaaaaagtaatgatgagtactttacaagttttcatatttattccttacaaccttatgaggtagttaatagtatctttatttactgatgaaggctcagagaggttaagaaacatacccaaagtgacaaggctacgagtggcacatctggcatttgaatttttataagcagtggggtcatgatctttctactacattatgtggcctaatcttagatggcacaaagtctgtcttactgatgctgatgtcattattctatacataggtaccgatgggcctttattccagaagcctcagatgattcaggtttggaagtcagaaggcagggtatacatcaacgagaatttaaaccttacgtggtacgactagcaaaacttcttcggaaaagagcaaaggtatcgcattcttttgtgattgttttgttttacatcactacatgttgcattagtgaggtatttattaaatacttcctgggaaactgagaacgttatcaagttgagctattttgaaaacaagtccccagttttgagagttaatgtccataagcctcatatttccagacattagaaaacatatcgtatgtattttaaaggaatatgcggttattcatttttttaaagaagaaaaaggaaggcttttgtacattaataacatctaccttaaaatgttttcccctcaaaaaagaaaataaaaaccttggaaccatacatgtgagtatttaagactgtagtcctgaacactcttcgtgtcaaaaacttgagaatgtaatataatgttcatcttaatgccatgatgacaaacaaaagtatgagttgattgaaaaaaatrcagtacaaaagggatttttagaacctgtcagagttgtttcaacagaactaatcaatgggtaagaagattatacattttaaatttgtaaaatatgagtcagatttcattgaaattgaatgagctagacctcgatcagaataaaggaaataatcattagcattcattctgtttatctatatgaaataaaatatatatgctaaaattcattttctaagtatttttcactttctgattataacctacattcagaaatgtgttccttatcctgatccagtacagctatataaccgaatctaaagtttcacaaaacagttcttgcccttaacatgagatattttcctttttgtagttcacagtgatgatgctgagtacagattgcaagacccccacaacctgcagtttttaaaacagtgctcagagttaaactggctttatgactctttaatataaagcatcttcttagagaaattatttaaggggaaaagtgggaatttacttaaaacatataccattaaaaagtgtaggaaaataaaatttgtaaaatattgtcttatatactttttatctttcagtatgcatcatgctaatttattacagatctttgcccaagaacctaccagcaatgaaactggtatgctcaccattgggcctttgttattaaccttttgtcaaattttcttttacattcaacaaatttcaaaatcaaattgtacaatttgggagtgatctaggttgtctggtgagatctagtatgcagtgtgtgctttgagtgctcagaaattttccagtcttctggagtcctcctaatcaggcagcagctcttaaactgaattccataactataaaaatggaatgaagaaagtgattaaagagattttgctggaaggaatttacatgagaaaacttgacttaaattcctagttgcttctgtaggggcttaataaaaggacagagatgaggatgtatgctgggtcctgagttcagggtaggactttggtactttcaatttgatatctcagagtttgggcaagtaatcatgacaaatccagaagcaaatatgaccccaggcacatgtccttttctgttatgcctgcctttcattagtaatgagaatttttataagacccccctcctttatctaaataataaatatgacagtcttttgcccaaaatttgtcccacagaataagaaaactattttgattgaaaggcatcttcccatccaaatcaccttaaacaaggtcttcatggccaagcatacttttcactggaacaaaggctgtgagttctcctctttccttccacaggacaaggaggaggactttaagacagtgattttggagggattggagatggccaagcatcaggtgagggtggctgtttcatgcttatgatatggcagcaaaagttgccaaatattgagacacaaacccaggtctgaatgtcaacaagtacaagggaggtaaacaggaaggaagtcttttttcaagtgtggactggtgaagtcaaaggagaaatcatttgtatggaaacatttgactttatttaatattgagacaatacatatagttctgattaagagcatcagaaactctgaatcaagtgtattcttcttggtcaagagcttaataaaagtccctctcttaaaggctcatcttgataggaatagaaacaaaaggttaccccatagttctcttacatttggaagttagctatatagagggtacaaggatattcattttccttcaggacaaagtcatctctgtacgccctttattgttgaattgcagtttgatttaggggattagaggtggtatggtaccagtaattgagtaatggtggaaatgtgaaagtcagtcacaggactcycattggtgccagtgtcatagttaagaaagaaagaaagaaagttttatatatcctgtaatctagactggaagctaaataattgctaggaagcaaacttaagtgatagctgttaagttttttggtttgtttttgaccagagatgatgaagtaggtgatcttttcttggtttgctcctagactcttccattttaacttatatttttagtttggtgcaaaagtaattgctgtttgggaccatgaattttaagtcattataactaggttcacacaaatctttattaattaaaataggaaccattacaatcaacacatttttgccaatgagaaataagtttgtttactcctgtagcayaaaaatccatgcttccaaatttgacgaactcttggaaagcattttctgtgtcctgctagttgtggaagcaatttccctgcaaaacgttgctgagatgcctaaagaagtggtagtttgttggcaagaggtcaggtgaatatggcagatgaggcaaaacttcatagcccaattagttcaattttcgaagcgttggttgtgcaacgtgcggcccagtgttgtcgtgaaaagaattgggccctttctggtggccaatgccggctgcaggcattgcagtttttggtgcatctcattgatttgctgagcatacttatcagatgtaatggtttcacctggattcagaaagctgtagtggatcagactggcagcaaaccaccaaacaatgaccatgaccattttttggagcaagtttggctttgggaagtgctttggagcttctttcagtccagccactgagctggtcatcgccagttgtcgtataaaatccaccttttggcacacatcacaatccgatagagaaatgattcattattgttgcatagaatagagaaaatgacacttcaaaacaacgaatttttttatttttcactcagctcatgaggcacccatttattgagctttttcaccttttcaatttgcttcaaatgccgaacgaccataaaatggtcaacattgagttcttgggcagctctcttatagttgtaagaggatcagcttcgatgatgttctcaattggtcattatcaatttccgatgactggccactgcactcctcatcttcaaggctctagtctcctttgcaaaacttcttgagccatcacggcactgtatgttcattagcagttcctgggccaaatgcattgttgatgttgtgtgttgtctctgctgctttataacctattttgaactcagaaaatcgctaaatttgatttttgtctaacatcatttccatagtctaaaataaatataaacagcaataagtcattagcaaaaaaaaagtgagaaatatgcttaaaatgatgtataacataaccacatttatttaagaatgtactccaatataaaacggcaaatttcaacaatgcaaaaaccgcaattacgtttgcaccaacctaatattttcctttttcaggattttactttaaaataagcaataagcttgagagcacatagaagaaaataagctggattttgcatctgcttgacccactaggaaactagtgatattaaattattaggtaaacaatgaaagtttctgagcaacatctgatcttagaaggcaaactccatttgttaatatgacagattgtaattctgcttcctaagtcttcatgatttcttccttctgtctagttcattgcttattttcattctttagtgtggaattgtatctgtgattctgcccaagttcaaccaacctgttctctcttatctttctctagacagaatgatgtctgtagctgtgtttgtgtaattcaggtggcttctcaaactagcctcttaatacccaaattattagtctttatatttagttgacagagttttcacataccttctcatttgacttctctactaaaaggtagttttagactgtcccattttataagtgaggaacctttgtatatcctgcccaagggtgccgtaagtatggcagagccagcacactaactcaattcctttgactccaggtccagctttcctccctatgttgtttagcacaacccagaaggagacagcagtgtctcctgagggatcccttcctttctctgtgatgcagtactgacagtaattattcactttggacactgctaccatcatggcaaatttaggccatttagataaaagggaattaactaattataataaaaggggatatattatgaaatgtataaagcactttgttccttttttctgtagtaattttgtgacctagtccttggttacagtagtgagggttcagaaacctgggagctttttgagtaaatacaaagcacaacataaaacttttatgtttgactctattcctgttcaaagctatttctgttaactaagcttatctgcgcattctagttgggaactattactacaatgttagactgctccatgtaaaactaataaatggcagtaaaaggtctcagaagcaccaagggttttgatcaggtcaggagttagaaacttaatgtcatttgtattcatttcttgaccaaytgccaaagtttatatatttttaatttttctaacataccacattgtctgttgtattaataccagttcactttttgttttctgcagaaaaatccagaggaagacaactcagggagaacattgggttgggagccagggcacttgctgctcaccatctgcaccgtgcgcagtatggagcagctcctgccgttcttcaatgtgctcagtcaagtcttcaacagcaaagtcacaagccgatgtggaggacactcagggagtcctatcctctactcaaatgccttccctaataaggacatgaaactggagaaccacaaaccatgttccagcaaagccaggcaaaaaatagaagagatggtagaaaaagattttctggaagggatgataaaaacttgagcaccattgctggttccatttagcttacatgtaaatgtaattatttaaaacacacacactgctctgcgttgtatagtttttccttttttgtatgtaacagaacacatttcagattgtatttaatttaaatayttgtatataagagcaaatgtctgaatgtggcctgaatcaagtttaaatattgttggctcatactgattatggtgcctaagagagctatatatatacacatgtaaagtccattgtttttattgtcctgagttgtcttaaacctgcaaaatatacactacccattttttttttccattggtttcagacttggttcaattaagattggttggggatttttctcttttccttattaaccatgttctggtatcagaatggtgttccttctccatcagaggctgggaaacgtattataattagtttttctcccacataccttcaccaagagcagtgaagaataactgaaggctggaccatgcatccttaaaagtattgcatgagcatctccacctcagtatggaagagggatggacaaccccctattcatacctctgagttcctgatggcattagtcatataggtaagtcatctaataatctttcttaagactctgcaatggaaaaactggttgtataaagtcttctctgccctctccatttgtatcagcaatggggaatgctgcaaaacatcatcttgctcatgtgatggtratggcaaagatatcacaaggagttggtaataagatttaattttccagtagcctgcatgaattgttccccacataaaactgtacagttagtgactgaattgtatacttaagtcccagtattttacattagtgagactgaaattagaggtaaatttctttaacaagtgtaaggcttacctatttataaagaattattctgttagtgtttaagaaaaacagatctagagacaatccagtaggctgcattgtaaacattatgattataaatctcttagtactgccattattattgacagttttgtaaagacttgtaaaaagtccagtttctcaggaatatgaaaattatcttcagaaacctggttggggcctttctccaattcctccagccagctgaaatactgccaagctcacttcatgtgcaaggtgatctgcactttcctgcaaattacattaaaagagattagatgagaaagacatagcatgtgtctaacatgggcaagaccatgttacttggaactctggggaagagaggggtgattcttgattttgtttcactaacaaattctaatgaaaaccttttttcatctttcagtaacaaattccaaagcccttaaataaacggaaaacagaccaaattcttctaaataaggtaagtttttaatcaattcagattataaaaatagctatcattccacaactgaaaaaattcaataaaactttaatccacaattggcctaacagtaagtaagtactaatgcctctgttgccatctcctcatccatcatggatattcattagactctgagatggcttaagcttctgcaggaaagctgccaaatgtctcctcctgattccctattcagcgcactcactgtactttgccctggctttgcacacactttaaggagtatgtgaagaggccaaataataaaaatccagaccacaagtcttgacccctgtcagggaaacaggcacagagtaaggctgtcatttaaaggaaatattttgaaaaacaaatcaagagtccagaatgctatcagttgacttagaaatgaactacaaagctggttgttttcatgtcacaagagtatatttttaaaagaagagaaaaggatcatctaccttatagtgcataaactaagtatttattagttattcctgccatggttaaaaatatgacactttcaggaagtctagaataagtcaaaaatatttggggaaataaactaagtgggtctaattttgttaaattgtataattactgctggtgaaaataattttgtagtcttaatgtgaacctaaaaggctcaacaaaataaagccttaatcatcatagtgagattctaaaaaccattaaaatagtttgcctgcccatcacctaatattaggctctttttcaayagaactatcccagcttacttgtgagtctgcttctgcatatactcggacgacatcttctgtaccagagggccggacaaaagctcgagaaagcttrtacttcttcaccaggtcattgattgcctcctgtaatcctgggggtgtaactgcttgtctttcagcatyggtagtgctaataactctcctgtctgcaacctaagtgcaagcatttcatatttgttactctattacacttcctttcagaagcttaacctgttaaacatacattctacgaaaagtgccagactaaatataaaattacattaaaacttctttctccaaggtcagggtaattaatttcaacatttgtgcaacttttctctttttcttcagtctataaagaattacctttggcaaaaaatatttccacaaatgcttagagttaccactaagataatggccagtaaatacgatatgactaagtcccatatcacacacaaaaacaggataagtggtagcccattatataagaagaccgataagaatttcttaaatatgccaaaaataatctgaacaatcagccatttctgtgaactgtggctttagtacctccaattgtctttcacaaattctgttggtgaatgtgtaaactggcataaacatgtacagaaatcaattagcaatttatctgaattctctccctcaggaagtactctgtgaactaaacataatgcagagtaagtactttcacttgaaatgacagggcatctgagttttgcttcaaaataatgttggggccaggtgcagtagctcacacctgtaatcctagcactttgggaggccaagggagaaggatcacctgagctcaggagttcaagaccagcctaggcaacatagtgagatctcgtctctaaataaaatatacaaaagagtattgggagggggtatgaagaatgtatagggcaataattgaaatctgttgaagctgggtacacaaaagttcattatgttgtttctctacatttatatctatttttaatttttttatatctatttttaattttccataataaaatctctttaaaaaagtgatgcgtcattcatattatttattatatcataaagttggaaaccaaatacttcacagacaatagaatgttaagtaaatgaacttagttattctataatttttttttcagctgtaagagaatacaattaggtatcataaggccttctttttttgttttgagacggagtctcgctctgtcgccaggccagagtgcaatggcataatctcggctcactgcaacctctgcctcccaggttcaagtgattctcctgcctcagcctcccaagtagctgggactacaggtgtgtgccaccacgcccagctaatttttgtatttttagtagacagggttttaccatgttggccaggctggtctcaatcccttgacctcatgatccgcccgctttggcctcccaaagtgctgggattaaaggcatgagccacgagctactgcgcttggcccataaggccttattttctatgtatcatatgtgtatgtacagaatgaaataggaaacatatgtcagtgagatataatgagaattgggataataggttttacttagctaatattcaaaaaagttactttaaagtttctctcacacctgaactttaagttgtctgtttggaagatctgtatagagagcatcccactgttgtacagtcaagcccttcagagccaagattgcytcaatcaccagcatgtcagaaatagcatcaccagctgcctgcaaatggggaaacaaatggaagaaaccacttaacacaagcaaatcttggaaatggatgttttttcttagaaaaccaatcacagtacaggttgaacaacctgaatctgaaacatgctgagtgccaaaataatcacaagtgaaaaattccacacctggcctcctgtgacaggtcaaaatgtgggtatacaactgccaggtgtggtggcatacacctacagtcccagctactcaggagaggctgagatgggatgattacttgaagctaggagtttgaggctgcagtgtgctgtgataatgcctgtgaacagccaatgcactccagcctgggcaacatagcaagaccttgtctcttaataaaaaacaaatgcactcctgacctcactgtcaggaatttgaaaccagcctggccaacatggtaaaacgccatctatactaaaaatacaaaaattagctaggtgtggtagtgggcgcctgtaatcccatctactcgggaggctgaggcaggagaattgcttgagcccgggaggcagaggttgcagtgagccaagattgcgccactgcactccagcgtgggcaacagagcgagactccatctcaaaacaaaacaacaacaacaacaaaaaaaacccactaaaggcaggcccgcagttcattcagcatccccaagggaaaaagaccctctcagcctccttcagctatgatacatcgtttccatgcatgccagatatgtatcatattttttactattaaaatacttgtgtgtgaataagtgtaaaaaaatgattgattgcttattgattgatagcatataaattcagagttttaggaatgatggtgatgccagacaaccacagattgtccaacgggtggctgacagagtgacacctttgctttctgatggttcagtagacacaaactttgtttcatgcactaaatttacagtattctataaaaccacctttaatcttatgtaacatacatgaaacaaaagaatttagtgtttccgacttgagtgccatacccaagatgtcacattatatatatgcaaatatcccaaaatccagtgaatctggaacccaaaacacttctagtcccatgcattttggataagggatactcagcctatatcatgtgctttctcacatgcagcatgattaaatgaagtgtttttgtggatggataaaatacgaacaatgaggtgaagatctctgtggaagacaatgaaaggtataacaaagaatactgaaactagctcttgagaaacttgcctttagtactccttatttataaaatgaaattagactggataactctaaggctcagcctaacattccatcactcatttttctttttataaatagatcccttttgagatattaccccacaatgattgatagaaagcatcaaggtaaaatggagaaatatgagctttggtataagatataactgaagataaatctctgtttcttcacttataaaatggaaattacagtaacacctctccctgtgttactgtaaggattacacagcaaggtatataaagtgtccagtgtgtgcaagacactcaaataattgaatcgctttcctctaccctgagtactgcttttccatagccaaacgacactccaaccccaactaacccacatgtatgtcctttgtcaatgagacaaccagttatttgtgtttgtttttgagacagagtctcgctctgtcacccaggctggagtgcagtggcgtgatcttggctcactgcaagctctgcctcccgggttcacaccatgctcctgcctcagcctcccgagtagctgggactacaggtgcccgccaccatgcccggctaattttttgtatttttagtagagacgaggtttcaccctgttagccaggagggtctcgatctcctgacctcgtgatccgccctccttggcctcccaaagggctgggattacaggcatgagccaccgtgcctggcctgacaaccagttatttttacttaatttcatcgaggtttggttaaaaaaaaattaataatatatatgtatacactgagtagctgaatctgtgatcctaggtagaagctacccaatatacttgaaaatttccatcataagaggtaggggaagggaagcatattaaaaaatgttctgtcattccatttcattataaatctcaactgaatataccactattagaaggaagccaccaggccaggacgtctccactttaattttgtatgcacccacactctgttctgtccatcttctgaataatgtaaaggtaaccaagagtccactgccccatcagttctgacctggttaaacaagtcaataatgttttcaagcatcttagcagcttttcttttcttatcttccagttgttctgctgattgttttatcttcatttcaacagctgtactaaacagtgcctgcagcaaaagaatataaaatcagtctcaaaacactatccaaaacctagtcataagtactattattctagctaacccacttttccctcctagtcaatctggagaaactgaggggaaaaatagtggcagccttaaaatgtatgaaattaatgtaagatcacattaaaacccagaggatagtactaggggaaaaattttatttgcggattatataactggttataaaaatttaaacatctgattacaaagaaaacaccaccttgacaagaggcaagcacacacagtaagttcatgttttccctttaaccagctaaatcatttctgtgcaaccaggttacttagagcctgtctgtatcctttttactttgaaggatataattcattgcagctagtatagttttattctaaaacttaaggggatgagctaggcaaaattaagagttcatagtattcatcaaaatatggcaaataatgtcatggatagtcattacaatatataattcatcatgctcctcaagagtcttatctcatttggaaatactcatcttttttactgccttctagaggcctaatactgagcaagattagcatactatgctcaactacttgatgaaatacatttttcttgataaaataaggcacaggctagtcacctgtttttgtaaagttttactggaacacaaccacacagattcatttaagctagatcagcagagttaaacaactgtaagagaccttatggcctgaaaatccaaaaatatttactctctaccctttagaaaataatttaccaacttctccattcgatcactaaagttatatcttaattgcattttgtaggaacttatttttcccctttttatatttatgccctccaaaagccaattttaaattaatgaggaaaattatttggctttgattcaaatgttctgatagccacctcaagtgtattcattaaatgaggtgagtataaaaacattttaaaaatattctgaacattatgaatctacaaaaaactaaattatacactttaaaatgtaattttatgtaaaatgtaaattgaaacattttatgcctatcactagttaccttaaattcattttcatttcttattaattatcaactttccaacactttgcaattcaccatagcgactgaatttttcttttcctctcctatggccagccggaaaatgcatagacaacatacttataaaaaaattaagaactgtaaattttaaaaaactattcaaaacaccttagtatatctcttcacattcaaagaagaatcattaccatgtaaaagagaatcacagtttcataatacatcaatatataagataaccaaaggatctttttgtcacatccaattatttcaacaaagtacaatattacctattattacctcccagatatagaagtctcatcataaagaaaagtgccagctaaggccaactataattaagagaacttacagtgccatgcccatttgcttcaaaataaactccaatgtcaaacwcttgagccttgtggtgcaaatgttttacaccagtcttagtgcaatagacaggyacctataacacatgcatttaaagaaatacagcaattactcagatgtcaaatgtttcttgcatacctagtatcccagagatacaaaggggaacaaaatactggggccgagtccagtgaggaagacgattaagcattaaaatacaaaatggtacgtatacaatggaagcatgaacacactctggaagcacgcagccaagggtaaagcacggtgagagagatgagggtctccttataagacacgaaagattacaagtgggggcgtgacatgacctaactgttttagaaagctgtttagctacagtgtggagaatagcttagagcagaattgcaagctttttctgtaacaggccagacagtaaatattttaggctttgcaggccatatggtctctgtcacaattactctgccattacagtgcaaaagcagccacagacc

SEQ ID NO: 95938 - DNA, 12972 bp, Homo sapiens
atccaattaaaaatagttctggttcacctgggcagctctagtatccaggactacctaaaggtttaggactgcctctcaccccttcccagaaactcccattctggtccatgaaaaaaggctagctccacacatctcagagtgagaggacctaggacagcaaggcatgtctactaacctctgggcactgaatcaactgacagtttacattataattgtcaaataacaagtagaatagcattaaactattgaaagttcctgcaacagactgaatgtgtcccccaaaattcatgtattttgaaatcctgacccccaatatgatggtattaggagatggggcctttgggaggtgatttaggccatatgattagtgccctttataaaagggaccccagagagctctctgctttctgcaacgtgaggaaataacaggaagctggcagtctacaacccagaagagggtccttactggaaagcaaccacgctgacaccctgctctcagacttcccagcctccccagaactgtgagaaatgaatttctgtcactgataaagtacccagtttatggtagtttatcatagcagcccaaattgactaagacagtgccacagtcttatttcaagcattaaaaatttaatttgcagttattaaaactggctgtgaaaccatgtttcttttccataaacaacttaggctcattttacaatcactgagttattgaagtacttatagcttaatcaagcaaaattaccataccatacagtatataattaaaatagatacatgaaaaaagccaggtagatttaaaactagagaaaatttataaagcaagaacaatatgaaagtttcattatattaacctctcctttgatagtataattataatctgtactatacaacgagaacatttttggttaaaggagtattagctttgggaaggtttctttttacatttattctttttaagcttcttttcttgctgctatttcacaaattaaacatcaattaaaactgacaccctcatcatataagacaacactatgggctatacatctgcagaaactatatgtttccatataagtaaacattatttagaccctcatgtttgtatacatctccatttctaatcgtggtcatgatggcatactagacatacttcctcacatgaaattacatattaagtaataaagaaagcttagtccccacaatttaaataatgaatactctacttcaaatccttttgggattctaaaggaaataagtataaaaatgcattattaaatgtaggaaaaatattttaatattttgttttggctgattttaatatttccttttatgcatttttcaaagaattttctaggaagacataaagcaacataatggaacaacttattgactaattctttttaacaattacttttgttgataatctgtgacattgccaaaatcaaaacagataccattcgtgcagcacatataatattaatatgcaagttaaaatgttaggacattttaactacatcatctaccaagttccagatccatatatttaattgactattagacccttctacttggaagtccgaaacacatttaaaatttagcatgtcccaaaaataaactttcttttctttttctttcctttcttccttctttccttccttccttcctttttttttttttttttttttggacaggatctcactctgtcccacaggctagaaagactgcagtggtgtaattacagctcactgcatcctcaacatcccaggctcaagcaatcctcccacctcagccccctgagtaggtgggactatagcacgcaccaccacaccagttgatttttgtattttctgtaaagacggggtttcaccatgttgcccaggctggtcttgaactcttaaactaaactgatccgtctgccttggccccccaaagtactgggattacaggcatgcaccaccacatctggccccccaaatgaactttctatctctctcaaatattccaatattctgaaatttggtacatgataccacaatctatttgatcaagaaacctgagagttaaaattataccagtaacaataaccaccatttgagaatatctactttgtgccaagaattaggctatgtatactactttattaaatctaattctcaccattcaaaagactcacaaaataggttattattctaagaaacttggctgtaaagaatcttttttgatttcatttaattctgtttttctccagttaattcgagcactgaatacttttttcatcataactttttggtgaaccaaaagtactatctaatcaaactttggaaaatgcttcttttaaaaagactatcaccagcaaactgttgtattagctcattctgtttgccaaaatcaaatcagtggtgccctgtataaggatgagtgaatgaggccagatgcggtggtaatcccagcactttgggaggccaagatggatggatctcttgagcccagaagtttgagaccagcctgggcaacatggtgaaaccccagctctactaaaaaaatacaaaaaaatagctgggcatggtggtgcatgcctgtaatcctagctacttgggaggctgaggcaggagaatcacttgaatccgggagacagaggttgcagtgagcagagattatgccactacactctagcctgggtgacagagtgagactctgtctcaaaagtaaaataataataataatatttcatgtcctcacagtctgattccttagtgtgtccaatttctttaatatctattatttatgagaatttgcctgttagcataatacacttaaacagtaggagaaataaagattatatgaatactttatattttttctgtgtgagtgaatgaataaagtaattctaagttacaatttctctgagatagcaaacaacatatactaattgaacaccaaccaggcattaaatctaaatagcatgagaaatacaagaataatttataaaatatgatcccttttctctagaattttacttacaatatagttgagacaaaatgaatggtaaaataccaaaaaaacagatcaagcatattttgatagaacattagaaatatcaaaagtaggaacatgaataattgccaaatacatggtataataatatgtagctaatcagaactcaaaagagagggagataaatcttagaaaatgcagtgtaaaaatacagtaggtagaaatatttccaaagaagttatatgaatctgcttcagctatccattacatatacctgcattatcaatttgcagaaaacttttctttaaaaaaaagtttcacaaaatacaggtaacttaagtaacacaggaagctcagcagtctgcaaaaataaaaaaaaaaattgtctctagcttccaaaaatcacacctctatgtacaaactaaccacaattaggcacactgacataagcagattgcactaccaaatactggaaattctgcaagaattaaaatgatttcggcacatgggaataagacaatccaagcgagcccaaaaatattcttaaaaatgattatctatgacatctgaaaaacccacataaagtatctatgccaaaaagaaaagaaattccacacaaaaccaataaaggagtatcccagcagtcatttagaaaaaaattagaaatacggttattcatacaagaatttattttgggatacctagccagattttaatgccatattcaaaataaaaaaatctagccacagaaaagtatcacagcattaagatacatacttaaaagtatgatcaaaagatatatttgtttgtaactatgttaagctcagtacttgaagtacttttaacccttaattttcactatgttcctaagtgctaccaccaaaaccatacacagtaagtattaatagaataaggggtataattctcctcttcactttctgaatgtcttaaaatacctgctgttgtagtagataaggtttactagacacttttccattttggcttaaaaataaaattcatctatatgctaatggaagatccatcattcacatcattcacgcatccacaattccctttctaattaaatacaacacctaaatttaagccacataacacaatttcaaacaggatttttttataattataggagaagccataattattttactggaaaacttcaaaatcatcaaaagttcaagaaaatatacacactaaattgcaatatgacagaaaactgtcatgaagagatcatacagaaatggatttagaaactttgctttctctagcagtaaagcattccttacttaaatttcaaatattacagaaaagttgaaagaataatacaacaaatacctccacctagattcaacatttgtaagcattttgccacaaatgctttcctacctctaccctcttccccatttcttcctctccccctccccagccacccatctctctctatatatatacatatatacatacataaaaacacatacttatataagtttatatatatgtaaacatatttatttctaagaaagttcccataatcaaatacattagtacttctacagaaaaacaaatgacagtaagtgaaataaatagactattatagtcttataaatccagtttactgctggacttataagactatatatagtctttggtactgctgccaatgatttcagataagatcaggttttgtcccaaatgagatttttttacagtcttgattttcaaagttttggaattcaaaagtatggataagatgcggcaggctgtagtattactcccaatttacagatgaggaaaccgaagcacagaaaagttaaataccttataccagactacaacaagtggcaaaaccagtaagtaaaaataggctacctactccagagcccatactttcaatcactactctaggaagctttcagtccagcagaaggtctttgtggctgtcttcatttttatccagaatctggattttaaaacttacccctaactccattattaccctcctaatctgaaccactatcatctctcactgggtttattttaatagtctcctaacaagggtccctgattcttcttttgctttagtctattctcaacacagcaaccagaatgctctttttaaaaatactagatcatgtcatgtaactgcgtaagaccatttagggcttttcatttagctaagagtaaaagccaatgttcttccaaacagcctacaggaagccctaagacatatacccactcattgacccacctctgtgaactcatcccctactctccctctctctcactccactccagacacagtggtctccatcctgcttctggtctccaggcatgttcccactgagggccttggcattggctgttccttctgtctggcatgtttccactcatatctacatgacttcctccccaactcctccaatatcatcttccaatgagacccacagtgtccactctgtttaaaattacaactgcctcctgcaaagcaactgacactcctgatcccccttttcctgttctctttctccataacacttatcaccttcaaacattctagacaatttatttattttatatgtttgtctcttcttcttttggaatatatgcacaccaaagtgtcctaagcctgagaaaaccatctaatatagtaaaagctctcaaaaaataattgttgcagctctctgctcctcccattcaacagacagctgcatcttctcgtgcattgccagctgcatccctgagacaccatggtgaaggtgaaggctggagtcaacagatttggttgtattggctgcctggtcaccagggctgctttaaactctggttaagtcgatattgtcgccatcaatgaccccttcattgacctcaacaacactgtctacatgttccagtataattctgcccatggcaaattccatggcaccgtcaaggctgagaacaacagctgcatcttctcgtgcattgccagctgcatccctgagacaccatggtgaaggtgaaggctggagtcaacagatttggttgtattggctgcctggtcaccagggctgctttaaactctggttaagtcgatattgtcgccatcaatgaccccttcattgacctcaacaacactgtctacatgttccagtataattccgcccatggcaaattccacggcaccgtcaaggctgagaacgggaagcttgttatcaatggaaatctcatcactattttccaggggcaagatctcaccaaaatcaaatggggcaatgctggcactgagtacatcatggagttcaccagcatcttcaccaccatggagaaggctggggctcacttggagggaggagccaaaacggtcatcatctctgcaccctctgctgatgcccccatgttcgtgatgggtgtgaaccatgagamatatgacaacagctcaagattatcagcaatgcctcctgcaccaccagctgcttaacgcccctggccaaggtcatccatgacaactttggtaccgtggaaggactcatgaccatcgctgccacccagaagactatggatggctcctatgggaaactgtggggtgacggccatggggctctccagaacatcctctctgcctctactggtgctgccaaggctgtgaggaaggtcatccctgagctaaacgggaagctcactggcatggccttccgtgtccccactgccaacatgtcagtggtggacctgacctgccgtctggaaaamcctamcaaatatgatgacaccaagaaggtggtgaagcaggcgtcagaggaccccctcaaaggcatcctgggctactctgagcaccaggtggtctcctccaacttcaacagacacccactcttccaccttcgatgctggggctggcattgccctcaacgaccactttgtcaagctcatttcctggtatgacaatgaatttggctgcagcaacagggtggtggacctctgcccacagtgtggcttccaaggagtaagacccccagaccaccagccccagcgacagcacgacgggaagagagcggccctcactgctggagagtccctgccacactcagtctcccaccacactgagaatctcccctcctcatagtttccatgcagaccccctaaaagggaggagccgagggagccccaccttttcatgtaccatcaataaaatcccctgtgcttgccaaaaaaaaaaaaacttgttgctattgagatttctatcgacttcaactcaaatacttcgtttgattcaagcccttctacatttatcattgttagtacttagtatctctcagaaacaaaatttcaataaacatccttgaatttaaaacagctttttattatgcttgtattaagattctttatatagaaatatattttttggacatgcacagatgtttataatacattacccagagaagacagtaaggcaagaaatagttcatacagtatgacccttcatctataaggaaaatactgtaggtttcttgcctttagtaaggcaagaaatagtttatgtagtatgattccttcatctacaaggaaaatagtatgtattgtgtctgttggcgttttttggtacgatgacattaggcatttttaagtttcttccttctgaatatttattattttttcaataatgaatatataattatttgtatagttaaaataatattcttatatacccagaaaacaattactttgcaatacaattaacagtaaattctaactccttttcttcaatgaaaaaaaatttagtcattgttaatgtaactattacataaatgtaacatggatatgtgctattaatgtagtttagtatgaagtttgatggaacaaataagacctattgtatatttcagaacagctagaagaagataatccgaatgtttctagcataaagaaaagataaatatttaaggtgatagatatctcaattacactgatttgatctttacaaattatatgaatgtattaaattatcacacatatccccaaaatatgtatatctaatatgtatcaataaaaaaattttaatgtagtttagatcaactatagttacttatctaattattctctttatacaaagggatgatgcggccaactcttttctttatacaaagggtaatgcagcgcagtatgataaatattaccactatatcaatacagctacatggaaatccacattcaatattgctttccgataatacctctgaaatattccttttaaggacagtactttcagtaggcttttgtgtttgtggtagatactttaaacatttcttttttatctttaaattcagagccaaaagtagaaagacatatgcaacttgaacttttgttattgctgttgttaaaagtattaatatgtatttatttcgattgtttcttctttcaaaaagtattgaaactaatataatgaataagtagtgctagaaaaattgtgttctatattttatgcatctcaaaggtgactactatttcatttaagggaaagaacaaaagagctactttaagatcatttaattttgactcaatttagaaagtaatattctcatttcagaaaaatttggaatctttgttttaacttgtaaaaatatacatgtaatagtggtaattaacatatcaaaggcaagcttaattatgatcagtattacttttttgtttttttggtttttttttttgagatggaatctcactctgtcacccaggctggagtgcagtagcaatctcagctcactgaagcttctgcctcctggattccagcaattctcctacctcagcctccctagtagctgggattacaggcaactaccaccacgctcagcaatttttgtatttttagtagagatagggtttcaccatgttggccaggctggtctcgtactcctgacctcaggtgatctgcctgcctcagcctcccaaagtcctggaattacaggtgtgagctaccatgcccagccaatctctttcaaaacaaaaaggaaattaatttactatctgtaaaagggaacccaaattgatttggaaatactttctattatcttaaatcttttcttttttttttttttgagacagagtctcgctctgttaccaggctagagtgcagtggcgtgatctcggctcactgcaacctccacttcccagattcaagcgattctccttcctcagcctcctgagtagctgggactacaggcacatgccaccatgcccagctaatttttgtatttttagtagagatggggtttcaccatgttggtcaggatggtctcaacctcttgacctcgtgatctgcccgcctcagcctcccaaagtgctgggattacaggtatgagccactgtgcctggccaaatcttaaatctagagagaaatctagagactggaagtcctagccaaaacaattaggcaagcaaaagaaaaaaaaaaaggcatccatattagaaaggaagaagttaaatggtctctgtttgcagacaatatcatcatatacatagaaaaccctataaactccaacaaaaaactgttacaactaataaattcaggaaagttccatgatacaaaatcaacatataaaagtcagcagtgtttctaatacactaactataaactatccaaaaatatcaaaaaagcaatcccattaataatagctacaaagggtgggtgtggtggctcatgcctgtactttgggaggcattttgggaggctgaggcgggtggatcacatgaggccaacagtttgagaccagcctagccaatgtggtgaaaccccatctctaccaaaaatacaaaaattagccaggtatggtggtgcgcacctgtaatcccagctactcaggaggctgagccatgagaatcacttgaacccaggaggcaaaggttgcagtgtgccaagatcatgccactacactccagacaaagtaagattgtctcaaaacaataataataataatgatagccaccaaaacaacaaaatacttaggaataaatttaaccaaagaggtgaaatatctgtatgtggaaaactacaaaacattgatgaaaaaaatttaagacacaaataaatggaaagatgttccatttcatggattggaagaattaatattgttaaaatgaccacactacccaaagagatctacagattcagtacaatccctatcagagttccaatgacattttttcacagaaatataaaaataaagattaaaaaattcatatgaaccacaaaaggccccaaatgtccaaagcaatcttaggcaaaaagaacaaagctagaggtatcatactacctgatttcaaaatatactgttaagttatggtaatcacaacggcatggtaccagtataaaaacaaacacagagaccaaagaaagagaatagacagcccagaatgaaacagaatagacagcccagaaataaatccatgcatttgcagtcaactgattttttacaaaagtgaaatggagaaagaacagtctcttcattaaatggtgacgggaaaactggttttccaaatgccagaagaatgaaattagacccttatttcacaccatattaaaaaaaatcaactcaataggtaaagaaaaatgtaagacttgaaactataaaacttctacaagaaaatttaggggaaaagcctcatgatagtagtttgggcaatgatgtttttagatatgaccccagtggcataggcaaaagcaaaaatagacaaatggaattataataaactaaaaagctcagcacagcagtcagtcaacagagtgaagagacaacctatggaataggagagaatatctgtgaaccatacatctcataagggattaattcaaaatatataaggaactcaaataactcagtaacaagaaaacaaataacctgttcttaaaatgagcaaaataccagaatacacagttctcaaaagaggacatataaatgacctacaggtttatgaaaaattgctcaacatcactaatcatcacagaaattgaaattaaaagcacagtgagatatcacctcacacttgttagaacggctataccaaaaagatgaacaataagtattggcgaggaacctgaggaaaggaaactcttattcactgttcagtgggaatgtaaactagtaaatctattatggaaaacagtatggaagcttctcaaaaaattaagaatagaactaccaaatgatctagtaataacactactgggtacatatccaaaggaaatgaaatcagtatgtctaggagatatctgcactcactcccatgttcactacagcattattcacaatggccaagatatgggatcaaggtaagagtccattaacagatgaatggataaagaaaatgtggtacacatacacactaggataccactcagccttaaagaagaaagaaattctgtcatttgcaacaatacagatgaacctttaggatattacgttaagtgaaataagccagacacagaaagacaaataccacatgatcttacatgtggaacctaaaaatagtcaaactcatagtagcaaagagaagaacggtagttaccagaggataggagaaaggtagggggagcgggttgcgggattagggaaatgctggttaaaaggatacaaaatttcagttaaacaggaggaatgagttcaagacatctattgtaccacatagtgactattgctaaggataatttattatatacgtgaaaactgctaaaagtagattttagcatactcaccacaaataaatgatatgaatgtgaaataaygcatatgctaattagcttgattctaccatttcacaatgtatacatgtttcagaacatcctctgtacatcataaatatatgcaattttattgtcaaatttaaaataataataataaattttaaattcgttaaaaaacttacaaaaataaataaagacacaagttgcatwtaaaataaaagttgacataccttggcttccgaaacaccaaactatattgttggcaagccagacccacagtgggagtataaacaataggcatgaatttctcaatgtcagatgtcagcactctataaaagagtttttcatttctatcttggagatccattaagagaagatacctgtaaaaattggacataattagatctacatcccataaagtcatgaaatagctacttagaaatctaattaaatattttcaaccaagtataaagtacatttaggttacatagaaaacatctgattaaaaaagacttaagaaatattcttttctttttctttacgacagagtcttggccgggcacagtggttcatgcctgtaatcccagcaccttgggaggctgaggtgggcggatcacaagatcaggagttcaagaccagcctggccaacatggtgaaactccgtctctactaaaaatacaaaagtggccgggcatggtggctcacgcctgtaatcccagcactttgggaggcagaggcgggtggatcacgaggtcaggagttcaagaccagcctggccaacatggtgaaaccccatctcctgagtagctaggattacgagggcatgccaccacacccggcttattttttattttatttatttatttatttattttgagacagagtctcgctctgtcgcccaggctggagtgcagtggcatgatcttggctcactgcaacctctgtctcctgggttcaagcgttttctcctgcctcagcctcccaagtagctgggactacaggcgtgcaccaacaagcccggctaattttttttgtatttttagtagagacagtttcaccatgtgggccaggctggtcttgaactcctgacctcaagtgctctgcctgccttggcctcccaaagtgctgggattacaggcatgagccaccgcacccagacaagaaatactcttaaatattgcaaagaataaagaaccataaacttaactaatatcatgcaaacattaaaatcactgctgaaatagcacagy

SEQ ID NO: 95939 - DNA, 119339 bp, Homo sapiens
ataattgaaatagaataccaaaaatgttaataaatttgacagctggcattcagacacaactaaataatttgcctggaaaacagcaaattttgtatgtacaactttttaaaaaggagtccagctaattaagcagatactagttttccttaaataatattcataagatcatgaataagaggagatgtgtatgaactgagactagctctgctcttgttataagcaaatctgacattacttaggaggcacatggtggcaacagcagctgtgagtcattatattcctctcattccttcacacttctgtttttcaccttactttctaagtggagaatcagtcatatttgggctgaggtcatcaaaaagggtggggmaacaccaggttacattcaaagtgggagcccagttcaagctccaatttttcttttaattggttactgttctctggctatacagaagctcatatgaatgttttaaatgtgatcttgacttctctttttcctcctcagggaccatcatttagcaccctttcgccagagtatacttcctttctcacatcttatagtaatgcaaagagccaaagattaaaaaataaataaataaataaataataaattaaaaaataaaaataaaaaaagagtgttaggcccgcaagccccaggtataaggtaaatttataatattttctcttagtaaaatacaaagtttggtggcacagatgtctgttagaaggcagctacacaaaaatataagaattttgtcagttttgtgcatttaacatatcccaagatcctaaaatcgtgcctggcacatagtaggtattcaatagtacttgttaaataaatgaagttttaaaaaatgcttgtcctaatggactattaagtttgatccacctcattggtgtgttatgaaaagtgtgttgatatgttaacataaaatacattttaaaaatgtacaagtggaactcagtatacaattctaaagtaaatttaaactgtaaaatgagttaagttatacctcagattatgttattttatgattctgtatctctttatatttattttatagagctttacgtcctcatattgcatacagcttggataagaagtacatatctatgttctaaaataaatataatgtccctgaaaattgtactggttttctcttctttaggcacagcttatagttaatatcctccttaatgatttagctaagaaattccatctttgatggaaatgataaacatgcaaaaaaaaaaaaactaaaagaaaaatagcatattgatcttggcctcatgaaaatcatcttcaagatctgtataaataggtagcatacattaaattaacgtataaatggtaggtttaggatctttctaataattcatatttctgtttctcagtttacttaaatttggtcaagtaaaaatcttgccatatttttattaattggttctcctttttttctagtaatgcatttcttttcacaattttaagacaaccgatattttctcagattcaagtctcatcactacagtagatccctccttctccatgccagaactagtcaccttaattaaacttgtttcctgggagttcccagacctggattattgtcgtcactgattcacacactccattcttatgaggattttcttcagggctattgatctcattttttccttcctctttggggaccatgaaccatcatccagcccctgtctcttcagaagcatctcctctcctgcctcctctcctcattttctaaacatacttttgtctgcaccctaaaaccaagatccctttatggacccagcactctccctctatttttcctctcaaaagagtagctcaactcactgttttgatttcttcttcacctctaatctacaactcaacttgctgtaaaaaaaaaaaaaaaaaaaaaaaaaaggttctgtccctatacagtcaaacgatattgttctaaattcacttataaccccttaaagcggttatattgccaaatccaattaacacttgtccttatcttatgtgacctcttggtagccctgactgcgttggacctcttctgccttattggagttctttcatcccatgtttccaccacacctgctttactaaagcactttcgcaccttgctttactgaaacactctctttctcttcttcttattcctcttcttcctcttcttcttttcttcttcctcttcttcctcttcctcttcttcttcctcttcttcttcttctcctcctcctcctttcctcttttctctctttctcctctttctcctctctttctctcctccttccttccctccttccttctctctctctctttctctctttctttccttccagtcttgttttgtcaccccactgcagccccaacttcccaggctcaagtgatcctctggcctcagctccctgagtagcttggactacaggcatgaaccaccatgcctggctaatttttttaattttgttttgtggagatgagctctcattatgttgcccaggttggtcttgaactcctgagctcaagcaatcctcccaccttggtgtcctaaagtgcgaggattacaggagtgatacactgtgcctggcctactgatgcactttctaccagcttcaccactccttttcagtgagatggatttttttgtttgtttgtttgtttgtttgttttattttgcatatcctctcaccttacaatcaaatgttgatctctaggctactgtccttggtcctggactcaagctacaaaatttccctgggaaaacgaatcaattcctattgttttaatcgccatttttttttttgctgatgactctcacatttaaatctttagccttaaattatctactaaactccagacctcatgtctctggttgtcccctgaatatcttctccacctacatgttactgagccttccaaagtctcagatctattctgagttcttttccttggggtgactgtattttacatgtaggaaggaagacaaactgaatatttagtagccagaagggcagattatggcactcttatatgttgtttatttctgtttctccactttctgaacacatggtagaattgcacttccttgctttttgaaattggtgtgtcatgtgacttgttttagccagtgaaatgtgtgtcccttctaggcagaagcctctgaaacctggtaggcaaataattttattcttttctccttgtacattccagcgggaagaggctccatcagcttacatccttaagtgaagatgatgtagagccgacctcacaccaaccaaaaatggatgtagggcatgagtgaaaaataagcccttgctatttcaagcctgtgagatttttgcattatttgttaccaccaaatagcccagcccatcctgactgatttaagattcaaaaccaaactcattatttttttcctgcacatcattaacagaataaaacaacataagaggatctcacctgctctttatcctatgctccctgttttctatgtctgtgtttgagccatcaccatttactcacttaatcgggctagaaacctgggaatatatccagactccactttcaagtcctcctacattttatgactcaagtagttcctcaggttctatttcctaagtatccttcaaatctatcccttcatctccattcttagtgcacatcttactatctcttgcctagacgattacagtggccttttaaatggactccctatctctagcctttcctaaatccattttccatatggctgcctgagtgatttttataaaatgccattccactttcctgcttaaaatctttcatcagtgcttacagaataaagtgaaaatgacttagcatagaattttaggctcttgatagtccaaaccccttctatctctacagcatctctgctccagagatatccagtcccttttcttctcactcctgaacaacccagacaataccattctttgattaatccttccaaaaatatcaacttagatttgatttactctaagaaggctttcctggttatcccaaacagacttcttaagttcctcccacctatctgcctaaaatgcgcttttactattgaatgtgtcactttaaattttttttttttttttttttttgcttatgtgtttattgtagtggtcagagtttggaataattgtaaccttctcaaggataggaggaataccttactgtccttatctggaaagcacagtagttagcacattacagccacctcaaaaagatttttttttattttttattttcattttaagttctgtggtacatgtgcaggatgtgcaggtttgttacataggtaaacatgtgccatggtggtttgctgcacctatcaacctatcacctaggtattaagcctagcatgcattagctatttttcctaatcctctctctcctcccaccccacccactgacatgcccagtgtgtgtttttcccctccctgtgtccagatgttctcattattcagctcccacttataagtgagaacatgcagtgtttggttttatgttcctgcgttagtttgctgaggataacggcttccagctccatccacgtccttggaaaggacatgatcttgttcctttttatggctgcatagtatttcgtgttgtgtatgtaccacattttctttatccagtctattactgatgggcatttgagttgaatccatatctttgctatcgcaaatagtgctgcaatgaacatacgcatacaaacattatgcatgccatctttgtaaaataacgattgatattcctttgcatatatccctagtaatgggattgctaggtcaaatggtacttctggttctaggtctttgaggaatcaccacaccatcttccacaatgatttaactagtttacattatggaactgaaataataagccattttatcagaaaggttaacatctgttaaggccttatatttttttacgtagcttaaaatctgttgaaggcttactatatgccaggcactgcaaaacgcattttataagctttattttatttagcctaacaataactgtaggggatgcagacatgcattaggtatctatccttactgattttcttatcagaagcaacccaaatctcaccttcctggcaggtagatcattataggctcttagctactattaataattaaattattttcctatgcagtagctgaatgaatagcagagacaactatagtttacaatcaagatttttgtctaaacttttaagagaaagtccagttttattatttaaaacattttgaaaaaaattataacatttatatatcatcttttcctcgatgcataacactttttacaaagtttagtggtagataagtgaggggtaactcaaatcagagaaacaggggtgcagacgtttgattaacttgtctcatatcataacttttcaagatttcattatcattccacaacactgccctcaaaaaagaattttgtaattaccattgagtgacaaaataccaagtagtgacagaggtgtatagacgaactcaaaagttattgtaggaggacactgataaaatgttggggaaaatcacaaaagacacgagaagataatttagagctctatgcccaaatcacatgactccagtctctggctctcttagccagaacagcgaatcttttacaatttacctcttgttgccaataattttctattatcttcaaataataataggctggagtatgaacctagtttatcaatacttttttaaaaaaccgacattcctctcttaaggagtccatgcattctccccattttttagaaaattgttccatgaagaggaattaagtttattcctttgaattctagtctgcatcccagcttttagaacacgggatgcagaaccagttgatttgccacaggccaagtcctgagtctccagcgaatcaagcaattaaccagtcacttggcctttttgcagaaatccacaaaacgtgtagactcgcttaattccatctcctcctggcctcttcacacggaaattggctgctcgggcgaatgttgtttttctccgcagccatgtgtcgaagggcgattaacattcgctcgacaaaaccctgtcccgggccatttgggagttgcacgcgttcacacccggggctcagcccggtgcgccttcacgcgcagcctttttgtttatscggctagcagggagaggggcggagaggcagcgaacctctcaatgtgcagcaggccgcgagggctatataaagctcgggtctcggacctactggaactggycaagattgcccgcgagctggcagcggccttccgcccagctctgcggcgtcatggagaacgcgggaggcgcagagggtacagagagtggagctgcggcgtgcgcggccaccgacggccctacgcggcgcgcgggcgcggactccgggtaggcttccccgcgctgctctgcgcctcccagcttcccccgtctctccckcctgcgcctccccagctcctcccctccaactctccatcccccactgcccggtgccagcgctcggcttcggtggattctcccgggtctgggctcacgtctcctctgcgcgccttgtgctcccctatcccrcagatacgcaggcttctggagaccctgggtggacgccggaggcaagaaagaagaggagacgccgaaccacgccgcggaggcggtgagtgagccacgcgtctcaggccgcgcctcccacgggtgcagaagatcgaccagggctctcgggacgcagggcctgagagagacatgcgagacaccgggtcctgcctctcgcttaacatcccgcctgccggtggccataaaggtgccgacgcggcggatgtgtcctctggagcgatgggccacaggcacccagccgggagcgaggctgctgagagccctgggkttacattcccagcgggcacgaggaacactgggtcgtgcacgtttccactttctagaaggaggtgggtgataactrgattcacttcctttcctctccagatgcccgatggccctggaatgaccgcagcctcaggaaagctttaccaattcaggcacccagtcaggtgagtgacaggcctcgccgaaggtctcccgctcctccagccccagggaggagccaggggcatcgcgcagcccagctccgcagctggtcctgcagtctctctctctctctctgaaaatctggcttcaaggttacttatcttctcactcatcaaattgaaaaaggtaggggctcacggtcccacgtaaagggactrttgatgaatacatactcagtgaacttgatgaatatattacgaagagggaaaggggatgatatggtaaragagcggtgacatcttgtgctggcaaaacagtttttatttttaaatcctaaagggttcgaatgaaattgacttcgcatcaggcagagtgtgtatgctgcttttgtcttgcaatctggaaggaagaatgggattaacagttacagtcttacaagtttgccgagtaggaaaaaatagaaatgtaatgaaaatcctaaagattattgagaatggttatagaaagggtcaaaagtttatttaacttgcggagctagtttactgttcctagtcacaggaagtcagcctttatctaagattctgtgtcacttttattcaggtgaaatgttaagaattctgcagttttcctgcctccgagagctgttaaatgaagagctggatgatgtttgtaaagtgcccctggtcataaataacacatagaagtcattacatctaatttcctaccgtgtrctagcactggtgaaggacacaggaaaaagtagtcacagcacatggcaagtgttgtaatggaatttagtttggttagttttacaagtatgggcagggcacgaagtgcctaaatctgtcagtggtagggggaagggtcagggaagtgtatattataagttgtggttacctggctgagtcttggaaaagttagtcagatgaatgggaagtgggagcaaaagaaatagcattggaaaagagaagcaggatcatgaaacggtgtggctccttgcgggaactccaaggagtttaggtgtgtgaagttgtggtcattttagcagggtaatcagaggccaaatcttgcacactcttgtacagagttctgtcctgatcctgtatgtagtgttgggaacccatgggctttattccgaaggtagtcttgggggttatatgttaaataggcttagtcagggcatcaaaagtaaaactggaagttctgcaatttttcaggtaagaaataatgatgaaccattgtaagacagtggaagtgagggtgagactgggtgaatctaggaaatacttgaatgacaaaatagattaggctttataacgtattggatatgttaggtgaagaagaggtaaaaggccagaatggctcctaagtttgtggctggtgagcaggtgaatgctgtactaaaagaatgtaaattagggccgaaaacagatttgggaggtgagatcatgagtcaagttttccacttatcatatttaatgtgcctatggggcatccaaagagtgatatcctgtagagaactgcgtacgtaagttaggggcccagagtcaagatcttaagtggaaatacagacttgggagtccatggtaaatgtagggtggggaaatcatgacagtgggccaggtcatcctagtttgtttagagggagggctgatgttctcaatgaaaacctgagggaaggccagcatctaaccagtacacagagaaagagaggtccacaaggagacggagaagaatcagaacaggaagaaactcagaaaagtatgcgggccctgggagaaaaatggcccacagtgagaaattctggacagagtatcataatgactagcattctttgggtttgccagttccagttacgcattaggaaataaattgtttcttatataagaaattcctttcttttctgaagtacggttacaatttaattgttctcttatattttatttttattcatttatatcttgactaatatggtgtgttttattctttttattcagctgtcaactttttgagggtagggaccatgatttattcatctttaaattgtgaattatgttggcacaagggatcactaaaatatttattgaacgactgaataattgatagttacttgtttaagcatcaaaaatataaactttttttatgatttttgctggaaacatttataaactgcattgtttgtttttctgccttttaaagtggagcatactgaacataatgtaatcttccatttgttgggatgactccattgtatggatatatgggctgtttaccctgcactaaaatgactgcactgtacttggtgattcagccttatctctcctctttcttttccttgatgaagaccagaaggcaagattagtatttgtcagatttttgaaattctgaggtaataatacttacatgccagttatttgtataaaacatatataatttctcaacatttcatatgatattcacaaatttagttgaatggggagaagacaggcacatagwatcaaagttgaggtcagaagtagtctttctatgcctcaagttgtgagtgcatagacaaaaattttaaaatactggtttttatacatttttaaacttacgttgtctacttctataagagttaaatctgtgagttttaaataagataataggttatttccacctttttgtaaggtgcataatattttgtcatctttataaagctggctatcattaaagtttttaatgtagtggtagaactcaattcattttttccaaaggaatttagaaactggaagacaaatcttctatatattataagaataaatatatccataatgtacaaagtaaggtaaacattgatcttatgcatatccagggtttagtgtaaatttgtttgatccaatttacagcttgaataaagatttacaataatcaaacaattattgatacttgggcaggtagattccatgaaggctgtgatagtagcatattttaactctgtatcttaaggctatatccaaatgtataagtcaattgttaaatatatggagctcttgaaatttgaccatttcatgagtttaaagatcctgaatgtgaaaaaataaaacatgttgtctgcttctttcagactattttggccaaaatcaaaatgttatgattacttatatcaagaagcagaagctcttctgaaaaattttccaattcaagccacaatttcattttatgaagattctgatagcgaagatgaaattgaggatctgacctgtgaaaattaatctgattagctacttttgattatatccaaagcttgtggggtttaaatttagtgtacaaatgtatcataattattttaaactaatttatttgtatataaattattaataaaatgaaatattttgtaattattctggtatttggccttttctttatccctacactagaattgaatgttggaatctaaaacaggtgccatctacaaatgtcttgattgtattataaatatttggggcttacaaagaatacatttttcttttcgttaaattgcacatttatatttagttataattttgcaaagaatgacagtatttaattctcaagactgaatcttttaacatctgctatttcctactgatgccagttggatgttgtagttacatatcaatgttatcttattagataatgaagaaaatagacttatgttagaaatcactcatttattagtaaagatttcttagcagatggagaaaaacacattaaatcattacctgtaattgaaaaagggaatcaatcttagggcttttaaattatagatattttaaataaatgatgagcaaagtaactcrtattttaatactcctcttcagtccttaaatccagtagtaaaatagtatggatgtttaatacttaatgtactacattgagggatccctagaattaaaacaaaacgtttaaatttgagtgattgatatggagtctaaaaaagtggagtctaaaggccagaagttgatagcatcttccatttctgtacaaaggggagctaagaaatttggaaagcatggaacattcttcaacaatattaacttttccttgctctggttctctgcttttgatattcttatgtaaaagttttctcacgagaagtgaaataaatctcagtgattagtttttcttgtgtagactctagaagaatatgtcatcatttaatgagagagaacacagaagcaatttgcaaagtcaaagtaatacagttaattatagtcatgaggttcttttagctcaaattcagtcttctcataataagcatttcaattgcaaataaaaatggatagaggtgaatgtcataggtggctaccttatttgaatgctygtatttgaatggccacatatagtcacacactttttcttctgattctgcaaacataaccttgattttttaggcactttaagaactaagtagttaaacagagaaagtttaaagcatgacaatatgttcagagttaggaaaaattagtaattaaaggaggatggggaggattatttagaactatgtttcttctcctgaaaactttctcccttattggattctactctcaagatctatgtgttccccaagggacacacaaaacaatcaatcaaacaaacaaaaaccatcagattttgagcattagagcctggtgtttacctgcacagtgttggtccttttcccattaatatgttggaatagcacaaacagccactgccacttattcagtacctaatattaatcaggcactgcagtatgtagtttacacatgatcctttaatctttaataaacccattatgcagatggggaaaatgagactttgagatactaaagtaacttgcataagacagctcagtcattaagtgcagggatggcatgcaaaccaaatctgacttttaaacgttacttcatcaccacagctggaggtgagctgcatcagtacacaattcccagtgaagacaggaagttacataaggagggagaatttgtgagtgggtgaatagagcagaaggtgactttactaacgtctttcgcgcattcattagccctcagcatgcttaaaggtgargtttaaggatgattaaaggtgaggttttcttcttaccccacagtagtggctgttgacatttgatatttttgctcttaaaggtgtgagatgctctttgcattacagcctagtgccttacaggaaagaatttcagagaaactaaaattcgttttagtccatatttcaagtagtgtgttttagtccatatttcaagtagtgtgatggtactgcttaacaatgaacagacattgctgttccgggttaacaggactaagaatttgttcccacattcggtcagcaccaaggctaaggaacagcttcactctctaatctttccacgaaatagctgtcaccttgctccggtgctgaagttcgggatgcggaactagctgagcatgcgtacttcctccctgccggccctccctccgtcccgttggctccgccctccgcggacgtgctgcgtcagaatgcgcctcacccctggcgaccccggaagtgggtcgggggcttggcctctgcccggccacagagccggagctggaggtgctgtcccgtctggcggcgatccccgggcagggcccggggccggggtttgaagatgctgaacgtcccttcccagtctttcccggcccccaggtcgcagcagcgtgtcgcctccggggggcgtagcaaggtaagcgggtggctccgtgagtctctcccctcgctgcgtttcgagctctggcagtgtgttctcttcttccgccccaactcccagctcctgcacccctctctaagctgtcgttccctgctgtccttgcctgcaacctctttctgatcccactttgtctacagtccctaaactctccttacctcctccctttcccctagcagtccctcttctttctggtcctttatcccgctctatccgttcccttcctccaagtcctttcccgcgatttaaatttatatgacagagccaggcactgtgtttgcggtattataggctctcggtattagccgccttccctcaacctcatcttctccctggtcttttgttcttcactgcctgaaggagttgtaccacatcactcgatgtgggttccctcgcaggagggaaaggcttggcagtggcgacagtgaccgtccgtgcaaggatggggacttctggagttggggagctaggtcaggtttacagacactatccaagacatactgcctttctttcttcctctggtacctgattgttttgtcattgccttttctactagtatcacttgctaacttcgaagcaaatataataatactcttgagttcttgttgagcacagttgctgttagcaacaggtggaatactgtacagatatattttatatttgcagaattcaataaaaattgtgttctttgttcttttgcgaatgttgtttgttcctatttgttagttcctcattctgtaaccatatctttatctttcgtttgtgacacttccacttaacttgggccactcggttaactcttgagtcttagcatcgtttggaacccttatcgattttcttatttttctccacttagacctggcgttctgattctagttcagaatgaatataggttcagggatctgtggttttcattagctttccagagatttcttaagtacttacgggtggccgtgtatattctcagtgctttgcatgtattaactttaattttcacaattatcctttgaagtgaaagcttttattgtctctatttcgcagaaaaggaaactggctaagaaatattgccctaaattgcgtaggcttgtgttgtggttctgctgtgaaatttcatttactgattcatatatcaatcatctagccatccaatcatgtatatttttctcattggtttttgacctatttcttgaagctaaatacttgactgaataacagtctttccagaaagaatctctgaattagaatatgagttactgcccttcttcgttaaaaataccaactgtgttcttagcatccatttaaaggagaaaacttagaagcaaagacaaaaagtcacacagggggcgatggcaaaggtgagtttttggtccaaaaagagaacaaaataagattattgtgcaattctaaggaaaagtcagactccactcttcttcctcttttctttgtgaaacaagatgatgctgagaatgtaaaaactgagtcaggtttggatgaaatgggtagaggttgagaaaatagaaccaagttgggaaggtcgtgtattatacaaaaggttctcaaatagtgttgtttcattcaacagcatttagttataatattgatgagaaaaaaaattcgttttggccagggccactgtctttggagtttgcatgctctgtgtctgcgtgggttttctctgggtactctggtttcctgctacagcccaaagatatgcaagttaggttaattggtgtgtctaaatggtcccagtctgtgtgaatattgggtgtgtatgagtgtgccttgccataggatggcatcctgtccaaggtcggttcctgccttgtgccctgagctactgggataggctctgactacctgtgacattgaactggaatagttgggtaaataattatcttacttgttttttaattaatctttcttaaatgtatatatagctaacatttctttcagtgtttaatattagaagtattttggtctttatttagaagtctggtgatgtttttgtgaccagaaatatgctgcaggaaattttgtttgtcaattaacccacggtaaaattagtttcgttgtacatagtttagtttccaagcacctagtgactagcttaagtgaaggcttattgtaattttttaaaggcacagattttgaagtgagaaagacctagattctttcaccatatctgccagttaatctctttgagtctgtttcctcagatgtaaatgagaataacagtacccattttatagsattgttcataggattcaatgagataatgtttctcttagcacagccttggtaagcacccagtaaatgctacttgtcctgaggcttttattcagatctcacagacttgagtgtgacacagaatatgcactcaacatatgatagttattatttctattaatactggtaaacaaatacttattgagaacctaccatatgctggagtttttggtctctgatttcaaggtgtttagtctcataggttgcatgaaatagtgaacattcagttataaagtcataagtactacaacagggtggtatgaccactaaggagttgaggatcagagaagccttccagaggaattaatgggagttggagtgaggttgatccatgcagggaaagcaacactactataagcaagtacttgacagcaataaaggaatcaaataatcagttcccatttggctaaagtatataatggaaaggagcaaaagttagaacatggagctagtacagtcaactgtgaccagattgtgaagacctggtaaatccctagggaatttagagacgttgttgtaaggtgacctgaggagccactgaaggagggagagcctgtgattagatttgcatttctgaaagattgctttaactatcctgtggattatggaatggagagaggtgagtgattttagtttgggatgggaaaggtcattttctcacacttcatttattgggatcaagagacctagagtttcagtgatagccagaatggaatgatgtagattgataggatagaatgtgaaaggcaccacagacctattaacttggttactttgggagtaaatggatgtctaaaatagatatgattcaggaaagtgagatatgtaaacatccttgaatgtgtctgcttttacattaaacattcttctgttactacgttacaaattagtcagacaagcttagttccatagagatatcttgaaaatgttctggtcaaagtactaataatacttctcgtctgaaaactttgaaaatgtgttttataaaacaaaacaaaataaaaacccaaaccatcctgttactaagttccctaggcaagggttggcagttttttttctgcaaagggccaggtggtgttttcggctttgagagcctcataaggtttcaggctctttaccaccacatgtgaagaygattctttgctcaagggctgtatagaaacaggtacaggccatagtttgccaccccttccctacagtgttacaagttttattttccattatttgataaacyttgttactcaatggattcttagataagattgctatctaatgatttctaatagtctgtttatcttgacagtccagaaaatcaactatagttaattgtctctttaccttttcttctgtcaaatctctttgatttttaaggtgaagaaattttggtccaaactggttaactgtaacatattaatgtcagagccaggaccagaacctcttttctagtttctggttcaataccattcctgttatatggtcagccctgtgtagccctgggttccgcgtccaaggattcaaccaactttagatcaaaaatatttggggaaaaaaattaaaaataacaatacaacaataaaaaaataagaattataaaacaatgcaatacaacaaccatttacatagcatttacattgctttaggtattattagtaatctagagattatttaaagtatatgtgagaatgttcataggttatatgtcagtactttgccattttatatgagacacttgagcatcctggattttggtatagggtagggggaagtcctaggaccagtcccccaggaatactgatagactactgtactgtgacatcaatatggtgaaaatttgtgtggtagaatttctaagccctaccttttataattcaaatacagcataaacaatgttgacagcctcttaaaactgtaaaaggatttatagaagtgttagatttgagttttattatcttttaaaatggaattaaaagtaatgaagctagatttaattcttcctttttccatttttaggtacctttaaaacagggcagaagccttatggattggattcgactgaccaaaagtggaaaggatctaacgggattaaaaggcaggttaattgaagtaactgaagaagaacttaagaaacacaacaaaaaagatgattgttggatatgcataagaggtaggtggtatttattaagtccttcaaaaaatgttgcctgaactttccaattatgatgttacataacctcacagtcatgttattttaaacaattgacaatttaacaaaaatatgccttgtgcttgacaataacttatataattctgactttggatagtatttcttccttaggtaaccattatattctgatgcagaaaacagtgaacttctgatacgaaaaagtttttcttgcttccttgtactgcatttcctttgaaaggaaacaagcatttgccaggcaatatagtacaaaattatttggtaaaatccagtttatatagcaataactttctgtctcagagccttataacagaattctgttggaaaaaaaaaatctctgagaatctaaagtaaacctgaaagtcctgcattaaagccaaatcttcagttttcacttgcagcaattttcattacatggtatatgtttcttagcaatattagttacttgattttgtttagctcagagtgcattagaaactccaaattaaatataaatgtattggaggaggtgagcaggcagacaagaaggtagctgataaaagctgactttgtggtagccaacaacctgatatctagtaggggaacaaaaataaaaatgaaaggcatccaactataccatgaggctccatgcatggttaactgtgtttaccatctgtttagagaggaagggaaatatatcatttttgttcttaatgcaattgtaattttatcattgtataattttggtttgttgtcagttatcctgactgcactataacctatatgagggcagggacattgttggtcttactgctctgtcctgastggctggcacataraggccattgacttgtatttgttcaatgagtgtaacacttacttttaagaagtatggtcacttaaagaggtatctggtggttttcacagtggattggtgatatcaacaccaataaatgctgtattaatttcctatggatgccgtaacaaaggaccacaaactagatggcttaaacaacagaaatttgtctcatagttttgatggctagaagtctgtgattagggtgtcagcagggttcgttccttctgatgactgagtaacaatttgttccatgcctctcacctagcttctggtggtttgctggcaatctttggagttccttggcttatagaacattaccctaatatctgacttcatcttmacgtggcatattccctatgtgcttgtctgtggtcagattttctgtttttatatggaccctaatcatactcgattagggacctcccctactccagtatgacctcatttaattttgcatctgtaacaaccctatatccaaataaggtcatattctgagctactgatggttaggacttcaacctatgaatttggagggggacacagttccacccataacagacacaattagagtgtgaaattttcagtggcaaagggtatggaaacttccagcaggtgatgacgtagtttatattgagacataacaggtgttcagctccccaaagttcctcagagacctacaaatgtgaatggtaccagcaatctggaatgaggattctggcaggtgcaaaaagatccttttgacattttatagggtttttgccaccctctttatccttccttcatgctccctatctgtttaccagctgcaagtaactggtacaaaatgacttccccattgtgcctgagtgttttctgctagatagggtgaagtcaagattaatttcccaagaacacctttcagctggcccaggctgcaggcatgcctgagttctgtttctgcactaggaaaccactttagaaaacttgattatgtgaacccttcatatcctagtgatattagataattgaggcattattagaatacagttagactttattattcatatgatgtattgatggggacaagggactggattgctgtgtttgaaaagtgatacaggttgagtatcccttatccaaaatgcttgggatcagaagtattttgaatttgggattttttcaaattttggaatatttgcattatatacttactggttgagcatcccaaatccaaagaccggaaatttaaaatgctccattgagtgtttctgttaaatatattggagctcaaaaagtttcagattttggagcatttcagatttatgaatttgggatacttaacctctacactgctcccggttccatatcctctgtaatgatttgaatgtatagcacctcgtctggtaaggtggttgaattaatcatggtttgttttttttttttataaaggagacaggatctcgctttgtcccctaggctggagtgcagtggcttgatcttggctcacagcatccttgacctcctgagctcaagtaatcctcctgcctcaccctcctaagtagctaggatgacaagtgtgcaccaccatgcccagctatttattttttatatttttctagagatagggtcttgctctgttgcccaggctggtcttgaattccaggtctcaagcagtcctcctgcctcagcctcccaaagtgctgggattacaggcatgagccaccatacctggccatgaattttttagaggtttctgctggggaacatgttctactctatctatagtaagatgttttcccctctttgtagaaataagatgtgtctttttttaaatctttttacagagtttggtcttttattttatcaagaaatactcagtttagaccctgctgatggaggaaggataaattattgttagcaggcagagtgaagcaccttaagagggctacaaagtgtaagtgatatcagactgttggaagggagacacatgagttaggaaaatcagggatgcttttgtggtagagataagccttgaagcagtagacaggatttcaataggaaatgaggaagtgcactcaggtggaaggaaaggcctgaacaaaggtacaaacacaggaaagtttgaggtgttctggagcttaggttaattgttggagaattataagaaggaaggctggaaaggtatgttaggtcagattgtggacaaccttgaaagccagactgggaaatgtgttcctcatatagatggcagtgtgtactcttgaagggatttgaatgtggggacagtgttataagagtatgccttggaaagattaatctggtggtaggtgtggtgaattgaaatagggtaaggaaagcatttatcttcttacagaagttcggatgataacaggaggtgaaccaggatgttgacaaaggtcatggaataataggatgaatgtgagacaaacagattactggtaacttctagcacgatcccaatgaaactaaaattacatgtgtaagggaaatggctgtgctttagtcaggagtaggccgaggtggcctgtatgcacagcatgactcagcgggtttggagcgcaggcacataacctcgcacattatgtaaccatgtcatgtgagctcgtgcttggctctgagtcactattgtctgtaaaaagtataattgccctgcttacgctgtacatacagcttgctcacacccagtgagagagtaaagccatgttgaaactgtctgcgattcctcaagtgtttttccagctaccctccacttgcccacccactcccctcagacctcagttagaacctgacaacatgactaaacaaaattacctttttcttcacagctgttctaatttaaaatattactgatagcttcttaatgggggaatgtgtgtgccaactttagtcttgaaggttagagatagtgtttggacccaagttttcatcaaaactgtgccacagggaagcatggtatcatagtgccttttttttttcccttttttaaagtactaattccttcattttgtgacaattgccccatttttagattaggtctgaattcaactgatcacaatgtgggagacacaatcagtttcttcaggaaatcttagaaaatatacaatttggtatgggtttttatgactaatattttggggactgttttctttttttgaataagtagcagcatttctgcttcatgttcaggtgtgccgagcctagtcacataccttaaaatgatggtataaaaacagcacttggctgacagtgggatataaaaaatgagcatcagtttggaatgatctctaagacgtgtatcaagttcctaattttttcatttaattttcaccattttctgtaaagtatgtaattattgtaatgcagtagtagttaattggaatgctgaagaaatcggtttgtagggggattactgcttttttaaaaaacttgaatttaccattaattcatgcttttatatttttctctcttgtttctccctctctttctcaagaactaaagatttacagatatgtaaagtgttgagcaagtagctaaatcactcgtctgagagttcttctgtcaagcctagatcagactgtttttactgtaatatgatatgttttattgtagtacagtcagtgttagtaatgatgcattaagtagtgaaatcatcatttgggcagcatggttcacccttttatcttagtgagggtaagggaagtgtggcttgatactcaataacagtccatttgaataaatggtatttcaaaaaaagttgactacagccaaaggactagtgtccctgttgctaaaaatttagcagattaggttctccaaatggtattttaatggattttacttatttagaaatgaacacattttgatttctccttatgctgattgtcatatactagtaaattgaagaggcctgcttgatgccactgcaaaagtggcttataatgggtctgtatttttaatttcataactattttttaaaacttgtgaagtggatcctaagaagtagtatttagtcctgttatatttccattgcagttatttagatttctaggttcatttacaacagaccttttaaaatttactcataggaaggtagtgtaaatttttgtgaatatagttgatcctcattattcatggactttatatttgcaagtttacctacttgctaaactgcgttcataacctcaaactcagtactcacagtgtctgttattcattcaaagacacacacagagcagtgaaaaatatctttgttgcccagcgtgcacattcctagctgaggttagacaaggctatgttctgacttcttgttttagttcttatactgtaaaaaagtgtctttttgaccaggcacagtggctcacgcctgtgatcccagcactttgggaggccaaggcaggcggatcacctgaggtcacgagttcgagaacaacctgcccaacatggcaaaactccagctctactaaaaatacaaaaaattagctgggcatagtggcacatatcccagctactctggaggctgaagcaggagaattgcttgaacccgggagtcagaggttccagtcagccgagatcacaccattgcactccagcctgggcgacaagggcataacttcgtctcaaaaaaaaaaaaagtgtctgtttttgaggtctgtttagtgccataatttttacacttttgtgtttttggttggtgtttttactgtttaaaatggcccccaagaatagtgctgaagtkctgtggcaagaaagctgtagtatgccttatggagaaaatatatgtcagataggtttcattcagacatgagttatagtgagttacagctgttgtctgtgagttcaatgttcatgaatcaacaatatatattaaagaaggtgtctttaaacagcaacacacattaaacaagtttatgtattgattggttgacaaacatgttgtcattataggctcataggaacccaactttgtattttttactagtagcaatgggtcagtattcgctaattcagtgtttgcagcatacaggaacccaactttgtgttttttccaaggagcaatgggtcagtatttactaattcagtgtttgcagcaattttatggaaatgattgctatgaacaaggataaccaactatatttctttagattatcttttatttatacttcagtaatgataacgaaagctttgtactttttgggttaaattcagacccaccaaaaatagagctgatttatctaaccgtttttttttttttcctaggtttccttagctccttggttcatttctgttttcagaaactgcagtgttatttgtccatagcagggaaatttttctacctgctcttttaggagcagtttttcaaatttggaactaatgttttaatttgtaatagaacatattaacccagtaatatactatctaaataataatatattattattacagttagttcaaccattctgtagtttactttgtgtactatcatcattactttcttggcagatttttgaacaactctcttcttccattttcttgtttaggttagattaaaacccactgtatttgtaacctcaaactcagtactcacagtgcttttagacattcaaagacacgcagagagcagtgaaaaaatctttgttgcccaacatgcaggttcctagctgaggtcaaagaaggcagtgttctcccttgaatacaaatcaacaatgttctgcctggaagaaaatcaacattattttagtggtacatgtcccttctttcattgtttgcttttttttttttttttttttttgcgatggagtttcactcttgtcacccaggctggagtgcaatggcacgatctcggctcactgcaacctccgtctcccgggttcaagcgagtctcctgccccagcctcttgagtagctgggattataggcgcctgcagccatgcccggctaatttttttgtatttttagtagagatgggggtttcaccatgttggccaggctggtctggaactcctgatcgcaggtgatccacagccttggcctcccagactgctgggattacaggtgtgagccaccacacctggcctgttcattgaattctaacctaacccatagatttttcaagttgccttatttcacatgattatgcaaataatctagtctttgtcgattgtattaattcctgtcttactaacatctaagattatttgctttctcttacttttaccctgtctttatctcctaaattgtcattcactcttttccttctcctcctttttttcactttttctctctctgtacttctctcccattcattaaaaatttagtggagaggaaaaactgctgatctgagggccttatctaaccctcaggtgttctgtttggttgacacagtggtttagaaattgcagccaacattctgaaattttctttgtgggaaagtttttcttttttattacaaatttaattttaaaaaaggatatagggctatttaaattttctctttacttttgtgtcagttttagttgtgtttttcaatgaattcrttaattttatctcatttaatatattggcatatagttatttgtaatattccctttttatttctttaatgtctttaagttctatgatataccctatatatcctttttcattcctggtgttgctaattttttctctcttttttttcttgatcagtcttactagaagtttatcaattttattaacattttgaataaactaattttggtttgtattttctctgttgcttcttttctgttacattgtttgttgtttcattacttgttgttttctattttgttacttttattagtgatatagctagtttaagattttttttcttcagcatttgcatccttatatttctagagatagtctgcagtaactctcattatattcctggttattgcctgaattacttgatagtggcaatttttactcctatttatggtttggctgttgccattatctttttgcacattcagatgtattacccagtcacataattctcaggtttaaattaaaacctcatatatagttaaatattctttttagaaagtgcttcctttttttaagtaccctagcagggttattgatgtgtcagttatatgctatgtgctaagtgttaattttcacaacagaccaatgaggtaggtcctccatttcacagattgagggtactgaagcttagagaatccgcatttaccaaataagaaaactgaagctgataaaatctattagtggggagtcatagatgtaaatgatagaaaactattttggcttaagcagaagcaaaaagttactaaaaagttagaggtgaggattgatgcaggggctcagaccaagtccccaggacctgctttcacattatcttttggtttcccttctgagatcactgtgttttaggattaacgctaagttcatagcctgaagatgatcacagaaacttcaaccctagttattttctagttctgttctgtttctctaatagctgagataaaggtcttagatttgactttgattgtaacagttttgatcaagttcccattgctggtacagtaattctatttcagggaaaacggtatacttactcwcttaaacctaggtcacaaactgcatcctgtagcctagtgtgggaccaaactgaagcatatatgacagggagtagttccctgaacaaaaagtgatactgttgctagaagggattggatgctaggggaaaacattaatgtctaccacagagagtctggtaacttgccaaaggcatagctgatgagaatggagccactgtttcaayttaggcagccttattctaagcctttacacttaaactatagactgtgctgcctcctgttttactatattcagctctaaagttaatcatgctttagcatttgtgtgtgtttctcactttgagtgacataacataaattaattaagaaattatcatggggtgtctgttacttataactcttctcgtgttaattaacattgctagttaagaatcatatagggtatccttcttttttttttttttttttttttttgacagggtctcactctgtcacccaggctggagtgcagtagcatgatcttggctcactgcaatctccacctcctgggttcaagtgattctcgtgcctcagcctcccaagtagctgggattacaggcaccgatcaccacactcggctaattttttgtatttttagtagagatggggtttcaccatcttggccaggctggtcttgaactcttgacctcaagtgatccacctgcctcagcctcccaaagtgctgggattacaggcatgagccaccttctgagacagtttttatctttagtaatttgatgaaacatagtttttgctttttcgtatgactgtgtgtagttgtcgctcataaaatatagagaagacaggttttaagtttcctttgttggttcattcatttaatgaatatttctcaagggtctgctatgcgtgtgcattacaccaggttctggagggtaatacaaatttaaaatagagatggcttgtgctctcatagaattgacaatctgctcggggaacagaaagtgttaatccagtctgttaggtgttgttaaggaggtgtgctgtgctgagtgaagatcgcagaagactgagctgagacctgaaggatacatgggagttaactaagcaaggagaggaatgggaacattattccaggcttcaggaaaaagcatgcaaaggatgggtggtgtgtttatgtgtgatttctttgtgataaaagaaattatgtacatgggcaggtgtttacagtgaatataaggaacttgaagtggtagccatattctgtcttctcctttttatcagaaagacacttctttcaaagacttccttcctgcctgcttgcctgcctcccctcccctcctctcccctcccctcccttcccctcccctcccttcccctcccctcccctcccctcccctcccttcccttccctcttattttttttgaaacagtgtctcattctgtcacccagactaaagtgcagtggcatgatcatagctcactgtggcctcaacctcctaggctcaagtaatcctcccacctcagcctccaaagtagctggaactacaggtgtgcaccaacatacctggctacttttttaaaaaaaaaattatttttttgtagagccgggcctcactgtgtggcccagactggtcttgaactcctggcctcaagcaatcctcctgccttggcctcccaaagtgctgggaatgagccactgtgccaggcctcaaagacctcattctttctcagaccttttttttttttccccctaaggctaatccctttatgtgttcttaccagtcctttccagccttttttatcatgttgggccattggtcgtcctttattgtctgacatcttcaattcttgcctttcattcttccagcagcttctttccttcagtctcttcatctttgaaaacctgactctgaccctccctgatcgcttcttccccaaggctttcttcctctgtacctggtatgtaggacttctgttagaacatctgtttcgttttcttggccactttttatatttttgtctttattctttatttttttatttttatttttttttttagatagagtctcactctgtcgccaggctggagtgcagtggcgcgatcttggctcactgcaacctccgcctcccaggttcaaacaattctcctgcctcagcctcctgagtagctgggataacaggtgtgcaccaccaagcccagctaatttttgtatttttagtagagatggggtttcaccatgttggccaggctggtctcaaactcttgatcttgtgatctgcctgcctcagcctcccaaagtgctgggattataggcgtgagccactgtgcccggccgtctttattcttaagtttcaggatattaatgtaccacttttctccctatatcccttgcatctggcagagggcatagctcatggttaatattcagtaaatgttctttgaggcatgtgtagattttgatatgtgcaaaactttttattttttaattaaaattttaatgtttttttagatactgagtctcactatgctgcctaggctggacccaaactcctgggcttaagcggtcctcctatatcagcctcctgagtagctaggactacaggatgtgcaggacttttaaaccacattatggtagtgttacaggaccaccaccacttacccaaaggtagccattgggtcaggatttctgcactgtggtcccttctgtggttacaggaaagtgttcccgatccagaccccaagagagggtccttgggtcttgtgcaagaaagaattcaggacaagtccacagtgcaaagtaaaagcaagtttattaagaaagtaaagtagtgaaagtacagctactccataggacagagtagggtgttcctgagagtaagaggaggaacgcatccaccctaggtacaatgcttgtatacatgtggagatgtgctctgctacaagggtttgtgataaaggattaattttcttaattactacattttgcaagaatcaatattattatctttgaagaaaaattaggaatgcctttgttctccagatatcaggatatctggatactcccaagtctgggtctgtttagtggatactattaatttgttcccttaaccacaaacatctagaggctaggtatgtctgactttctcggaatttagcctggcaggtcccagcctctttttcctagccctctctcaaaatggagtcgctctggttcgaacgcctctgacagtagggatattctaatgwtatcacaagatagaacccagctgagggacttccatgtttcgtgtttccatattgttggctcctggagttgggaaatatactagttccttaataagaaacttcgttatttctggacagttctctaatatagattcatggtctatcaattcaaatgtgagcaacagcctgataggtttcatatggtttctctcctttgtatagttttgtattttcttttgtagactttgcacactgtggggattgggtaaatattgaagatttcttaagggtcatttttgtcattaaatactttttaatgaagtattttattttgaaaaaagtttcagacttacaaaaaagttgcaagtgtgatgcagtgaattccataaattcttcaactgcctggattcatccattgttgacatagttatcattatattttaatgaaaccattttttctccactattattttttatacttctttgcttttttttttttagcagctgctctaagggtttatgatatacatttctaatgtatcagtctactttcaaataatatactatttcacatatagtataataaccttttaataatatacttccattttccttttctgtgccttatgctgttgttgttattcattttacttctatataagctgaaaaccccacaatatgttactatttttgctttatacagttacttatctttcaaagagataaagataattaaaaaattatattttatgtttacccacattttaccattttctgtgattgttattcctttttgttgatccagatttctgctgaagaacttcctttaacttttttttttcagacagagtcttgctctgtcaccaggctggagtgcagtggcacgatcttggctcactacaaccttcgcctcccrggctcaagggattctcctgcctcagcctccccagtctgggagtacaggcgtgtgctaccacacctggctaattttttatatttttagtagagatgggtttcaccacattagccaggatggtttcgatctcctgaccttgtgatccacccgcctcggcctcccaaagtgctgggattacaggcatgagcaaccgcacccagcccttttaacatttttttatagtgcaggtctgttggctatgaattccctcactttttttctgaaatgtctttattttgccttcattttaaagatatattgtcattgagcatacatttctagattgacagtgttcttttttccgtcagtttaaatatgtcaccctatcgtctagtttgcatagatgagaactctaccatcattctttttttcccatagtatgtgtcttagttcattttatgttgctataaaggaatgcctgaggctgggtaatttataaagacaaaaggtttatttgactcgtgattcttgatggcttgaaagtttaaaattgggcatctgcatctggtgagggtctcaaggaggaagatgaaagggagctagcgtgtacaaagattacatggtgagagagggggaagggcaggagtgggtgggtgggggaggatgtgccaggctccttttgacaatcggctttcacagaaactaatagagtaagaactcacccacaaaagagggcattaatgttttcaagagagatctaccccgatgaaccagacacctcccattaggcctcacctccaacactggggatcaaatttcaacatgaagtttggaggggacaaatgtctaaatcatagcagcgagtaagatttcttttttctctgactgcctttaagactttcttttaggtttttagcagtttgactatgatatggttttccctgtatttttcctgcttggggttctccaaattaattttgggaaattttcagccattatctcttcaaatatttcttttgcatcttcctctgggattccagttacaaacatgttagcctatattgtcccagggctcttagatgcagcattgtattatctcactctttcctcttttgtttatgtttgaataatttttattgctctttctttaagtttgcagagtctttcctctatttccagtctgccaataagcccattaaagaaattcttcattctaatatcatgtctttcaatttgctatttcctttagactttgttttatggttcccatctctctgctggaaatttctcatctgttagatgtcatccacattttccactagattaaaaaaaaatcaatcataggtattttgacatgtctaatagttccaatacattctggttgtgttgctgttttctcttttgacaatgagttgttgtatcttttaaaaaagatgtgttttgtaaattttttttttttgagacagagtcctgctctgtcacccaggctggagtgcagtggtgcagtctcggctcactgcaagctccgcctcccgggttcacgccattcttctgcctcagcctccccagcagctgggactacaggcacacgccaccacgcctggccaatttttgtatttttagtagagacggggtttcacagtgttagccaggatggtctcgatctcctgaccttgtgatccacctgcctcggcctcccaaagtgctaggattacaggcgtgagccaccgcgcccagccgtgttttgtaatttttgaatgaatgtcacacattacatatagaagaataatagaaactgtggtatttacactcagacatgtagtacatttttttttttctggcaggtagttaggttgaatcaatctagtaagtagttgagctagatttggagtgtattttgctattgttaccatcagtgtaccacagacttcaaattcctccagtggtgggccactgctaccttggttttaattcagggcctgcaatgctagagggtttttttcccccattgttcttgttctactcttagctgacaccttaccctatatatctttgcaggatctttctccattgctcttccccctctccaaaaggcagtgctgttacttattacttggtgtaagacttgtagtgggggcagaaggggttttgcagttttcctgtttcagcctcagtcttagacaggttttatgcacctgagccccaggggctgagctttctcattgcttttgtacttccccaagggcagataactcctgcatcgtactcaatgcagcatctagaatgcaggcaggtttcatgagcctcttccctttgtggcagctggactttgccttgtatcaggtggggagggcagggcaaagggtctaggatgtgagcagtttccctgtctcttttccagtgtgagagtatcagtgttttgtattcacaccgaatctgggtctgagtacattttctgttctttcccagtatttagctagcatttgcctagtgtcagtgcaggataagggagcgtgtgtgttttacactctttccagcagcagttagtatttgcctcctgtcagtacagggaccggtggtgggaggctttactgcccctttccatcaatagatggcttttgcctccagataggatctgtggtatgggtgaaattttccctttaccctggcagtagctcattaacaccttgtactcctgtaggccttaaactatggatggacttttctttgtactcttgcactaccctctaatcttgctgcagatattacacagctgtgctaccagtgggcctttctcgtgtctgctttgcctatagtatttctcatgagcatctcaagaggtgaaagattatgaaaaaagagttggcaagtggggacagaatccccttgtgtctgaggttctcagggattccaaattggctctagtgcgcacttggcccttaaagtttgttaaaatttcagttgttttgtggtgacgtctcatttttctgtgctctgctgaagctgaaggggttcatgtggttcatctcctcagaggggcgtgtcatcctttggaatttagatcatctggttgccttatgacctcacctctctgatgggctcaaaattttatgattttttaatggattgtctgccttgttgttaagggtgagagcagtgttttcttgtggccttctactgttttcccactttttaaatttttgttttttattgacacgtaattgtacatatttatgggctaccatgtgtcrttttagtacatgtatacattgtgtaatgatcaaatcagggtaattagctattgatcacctcaaatatttatcatttctttgtgatgggaacgtacaatctacttcttaagtttattttatcttaatgaatctttgcagctgacttgttttggaaaataggaaatagccaagagcggaaggactcattggctttaattttttttgccatccaggtgactaacagcaaaggtagttaagtgctgctaactgtcactgttaaacctaaggcatagacagtcaggaaaatgaacccatgaagttgaaaagacatggaggaaggcagggaaactgatttttttttttaaagagaatacttgtgtaatattgatgtaagttgtaaatccgatttaattattgtaaatgtggctattgctaatgacttctagtctccctaggagaagtttataatttttttttcaaaacatttagtatgtaactgattgcttagattactgattaattttttatgcttttactggtcaatttccatttagttaaatgtcagggctgtttttccaagtagtaataacgtcacataagatgatctttgataattatgcctagttaatcttctgaagtgcttagagacctttatcacattctgtttattaaggaggtagtatttaaaaatatttctcctcctgcattggcatcaatattgggccggtctactctcactaagaagaatcctacagtcatctgcaaataagtgtcctgggagctgtttaggaatgggtggtggtggtaggaggtagatcataatgttttgacatgcagtctctttgcttcttgtttttagttcattctatttcctcacttcaagtatgtctgtttccctgagtgtaatgtctctctggtttatcttctccagagagcacacctacacttctcatagggttgggtaagagggttgttccttggttatgtgagatatgccacagaggatttggggattatactgcctttttttctttttctttcttttttttttctttagagacagggtcttgctctgttacccaggctggagtgcagtggtgcagtaccagctcactgcagcctcagactcctgagctcaagtgatcttcctgcctcagcctcctgagtagctgggactacaggtgcatgttaccatacctggctaatttttaaattttttatagagatagcgtcttgctttgttgcccaggctggtctcaaacttttgtccccaagcagcccaccactccttggtctcccagagtgctgggattaccaggcatgagccacaacacccagcctcrtactgcttcttgtattgaattcgataacttcttacactatgactttcggagctgcctggaatctaattcctgtaccttttgggggttctgttgaacaaattgttttttatggaagttcctctccaccttatacataagctttagtttcacctttcttcattcttctaagtatgttattactcatctgtttggttttcaggcttccagaacttagttgctgtcatctcttctgatttctgtagctctgtgattttatgtcttatttatcctttacagccattttagaaagttttcagcatgtgggagacaaatgaatgcttttaattcggaagtcctaagttctctgttgtcctagcagcttttaagcctttttagttaacattcttgaatataccgataccacatttactttaaattattataaaatcaatttgtctttcattaatttattttccatttgtcttcattgaagttggmaagttttattgccgagtgctctaaaataatatgcagagtttcagtgattatagctgattatctcctgttagatcaagactccaacaaatgccaactataaactcagaccacatattttaaaatactatctaaagatactggtgaacaatcaaaactggtgaagatgactggtgaacagtcatctatatgtagaagaagggatgtcactgtgtgagtttcccatttcttatggcattgaacttgaggttatgtgtgtgtgttcgtgctgtgaaggtgaaaactcaggtggagactcaaagtcttactggcttgaataactagatgtcagaagttggggcatctgcggtaactggaaggggagaagatccagaaaaagattcagagaagggtataaactgtctaaatcttgtatacgggacagactctatgctacctgaaggctgaaaacgttgaacagaggcttcatttttcaccccagcaaaggggaaccagtttggagttgtgtccagtcgagttaattgcctactaaaacagtcaataatctttgcaggaatattacagaatccaaagtttctacaacatatttataaggtcagaatataatccaaagttactagatatactcaagagaaaaggcagttattggagtctgactctgagatgatccagatgttgaacttagttcacaagtattttaaagcactatttataactgtgctaagtaagtaagtaaaagaatatatgatacaggcccggcgtggtggctcacgcctataatcccagcagtatgggagcccgaggtgggtggatcacgagatcaggagatcaagaccatcctggctaacatggtgaaaccctgtctctactaaaaatacaaaaaattagaccatgcctgtagtctgagctactcgggaggctgaggtaggagaatcacctgagccctggaagcagaggttgcagtgagccgagattgcaccactacactccagcctgggtgacagagtgagactccatctcaaaaaagcaaacaaacaaaggaaagtatggatataatgaataaaaaatagaaactctcagaagaatagaaactaaaaaatagaaatttagaattgaaaaatacatgaaataacaaatttgttgaatgagcttaatagcagattggtggcaacatagacaagacttaatgaacttgcagatagatgaatataaatgtcaaatctgaagaacagagaggaaaattatcagaaataaaatgaacagggactcaggggcctgtcagacaaaataaaaatgtttaataaatgtgtcattggaattctagaaggaaaggaatgaaagaatggggcagaaaaatatttgaagaaatagtggccatatattttacaaatttagtgagagacataaattgtaaattcagaggcttagcaaatctaaacataattaatacaaagaaaataacatctaggcacatcctaaactgctaaaagctaacaaggagaaaatctggaaagctgccagagaaaacacactaggaaataataaaaacgactgctgaaggaaaagtaacaccatcaaccctgaattctatacccgyagggagacagaattcttgaaggataaagatgaaataaagactttttcagataaaccaaaactggaaatttattacctgtagatctgcaatataagatagatgctaaaaggcattcatcaggttgaaagttagtgataccagatagaagttcagatatttaggaggtggtaaatatgtaagagaaaatactactttttgtcctcttcattttataaaaatacatataaaaaatacatgactttaaaagttataacattgtattgtggagttaaaggataggagttagagagcagtaaatggttcttatattacgtgggaaggcatacaatattaactcttaagtaagcaggtaaaagttgaggatatatactasagttcctagaacaatcacttaaaaaataatttaaagaggaaggccaaaaagccaatcgattaaatgaaattctaaaaaaagtttggttaacccaaaagaaggcagggaaagagaaacagagacatataacagaaaacttggggctgggagggagattagtaaaatctcccatattaataattaagtgtaaatgaatcgagcactctaattaaaactattataaatgatagtttataataattatctatcatgtaattataattatctattgataattatcttaattatagataatatagagattatctctttgtgtgcacccatgtgtagatgtatgtattatcaagacctgactacatgatgtctataagaggtatactttaaaaacacaaataggctaaacgtaaatgtttgggaaaaagtatgctatccagctagtaaattttattattggttggactatattagtatctgataaaaaggattatgaggcaaagaatcttaccagaggtatagacattttataatgataaaaagggtcatttcattaggaaaactgtttatgcctgtgatagaaaagattcaaaaggcatgaagctaacattgatggaattgaggggtagaattaaaatccttaactacagttgcatattttaacacctttcctcagcagttgacaggaagtaattacaataatgtgcaatttcattactgaacacaagatggcaaagtagtcacagtaattgtaacaatcgacctgtgcatttcaatacagtgaaatatgccataattttatcgtgtgaacacatcttttctcctcgtttattttatagacaggaaatgaacagtggtgaataattgcaagaatgctacagtatactggcataatatttggtatatacgtkataggcattaaatgaatttttgttgaatgaatataatgtggggcttttagaattaaatatttgtttgaatttcaaaacccaaaattattttttaatcttatyacggaaataacgcttttacttaaagcagtggttctcaaactttttggtcttaaaatatctttactcttttattgttgaagactccaaggactattgtttaggacatatctattgatatttatctttcaaaaattaagaaatgtaaagaatatttttaaaataattttacaaataatgagcccactatatgttataaatagtacctatgtttatgaaaaatagaaaagtagcattgttttacattttggcaaatatctttaatgtgtggcttaatagatgacgactgtattctcatggcatcttcgatattctatcttatttgtcatgtagtatcttgaaaatgttacacttgtgaaagaatgagaatagaaaaagacaaataacatcttggtattactatgaagaatttttgaccttgagccaccaaaaaggtcttaagctccctcaggagtccctagaccatattttgagactctctgactttcagaagtaaacaaagaagaaatgaaaaattattaattagtggatgtgtggcctgaaccatggtgatacagttcactccttattggtgagccgttatggttcacatgtatggttacctaacctgaaaatttgtgggaacttcatctggaagatagattagtaggtataaaatgtcgctttaatcttgcattgtactacctttaaccaaaccctatcatatagagctgggtgtgagattaagttggagcatgctgtaatccagttctgaattcggtcttctgagctatttgtgatgtgattcagattttatagatggcttttcttctctgtggagagttggaatagtgactaaaaaagagctctctgaaattggaacctctaactattgctggtaagaatggaaaacagtctggcagtgcctcaaaaggttaaatatagaatactctgtgacccaccaaatttacttttagttgtatatactcaagagaaacgaaaatataagtccacacaaaaacgtgtacatgaatgttaatagcaacattcttcatgatagccaaaaactgtgccttagttcattttctgctgcttataacggaatacctgaaactgggaaattcataaagacaaggaatttatttcttacagttatagaggctgagaagtccaaggtcaacaggccacatcttgtgagagccttcttgctagtggggactccctgcaagagtccyratgcagtatagggcatcccatggtaagsgggctgagcatgcaagctcagttctctcttcytcttttcrtaaagccaccagtcctactcccatgaacccactaatccattaattcatgaatctgccctgatgacccaatcgcttaaaggccctaccattcagtactgccacattggggattatatttccacatgaactttagaggggacaaatatttaaacaatagcaaagtggaaccagctcaaatgctcatccactgataaataaataaaatgtggtatatccatagaagaaatattatccatccctaaaaagaaaaaatactgatacatgcaacattatggatgcatcttgaaggcactatactacctgaaagaagttagtcacaaagaccacatattgtatgatcccatttgtatgaaatgtccagaatatgcaaatctatagagacagaaggtagactagtggttacctaggggtagggtggatgggagtaatgccatgtaaggatgtttctgtgtactgttaaattgtaatatctgttatgtggttagtgttccctttatgaggactcataattcttcacaatatcaagagttactcccttttaaagaactaatgagctagcaagtcttctttgttttatttttaataaattttaaaattagataatgagaccactgttactagtgcctctgttggctttggctgctaggaagttcaggactatattaaatgctcacagtaacgctgttagtgaggttagacaattggtatactttcttttctaatacacattttgttgtgggtttttaagtttttacacacagactttcacaaacttgaatttaaatattttattgtaggatgcccacagtctttatcagaggcaattggggttaaattgaaaacaaataaatataaaatgcacaaatgaaaaactataggcagtgtctttcaagagagaaagaattctttctgtataaaaaggcaatattcgtttttaggtawaaaaatgatatccttgaactgagctttttaaaaaagtggtgagytactaggcactggatctgttcaagcagatgctggatgatgctttgtctgtaagatattatagagrtaaagcctgtgctggatgaggctaaaaattgccttaaagttctcctagtctttaagactatcattctgtgattttgaagtttacatttctgacaacacaaagtactaaatggtaattttaaaatgggtaatttttattcagagaacttgtttgagagctcagaattccagatataacacaaaagaggtaatttagtatgaaaagatattaagaacaggtactaccagtacattgcctagagaaactcagtgtagttattgttctgaatatgtgttttaaattgtgctgcctctctgctatgatgaattagctatacagtgtacccctaatattgctagggcatttaaaaatgatttatttaaacattggagtataccttcctaatacaaccgttgtattttagttttaataagtggctcttctgaacagttctcagtcagtccttttttgggtctgttcctggttagagtttaaaaaacaaaacacacacaaaaataaagtatcagcataaaggaggggatgggtgggtgggtgaatggatagatggatggatggatgggtagatggatggatagatagatattctccctaaatcccccctttgccactgaagagcacccatgtcaatgatctaaaaataccagttggattgtgaccaggagtccttatttacagtccagttttacaccatggaggattggtgtttcatgaatctgtttaagcccatttttgctgttaattattattaggatttaggttttgcagaactcactaatagcctagtatcaatttgagattatatctgctggcccataattattatttatttatatttagtgagtaattggatgctcagatctgccagaccagagcaattagagatgtgggaataacttaataaaattgcatcactggaaaatttagatggtttcaaaattagtttctaaaaaccaggtggaactcatagaaggctagaaccttacacatgagagattttatttctagaagccatatatagtacaaatagagtacaggcataccttgttttattgtgcttcactttattgtaccttgcaggtaatggattttttacaaattgaagattcgtggcaactctgtgtctaacaactttttggcaccattttcccaagagcatgtgctcacttcatgtctctgtgtcacaytttgatagttcttgcaaactttttcattattattgtatctcttatgatgatctgtgatcttgatgttactattgtaatagttttggagtgccacaaatcgagcccatatgagatggtaaactgaatggacaaatgtatatgttctcactactcccctgactgacaattcctgtctcaccttcttcttgggccactccattccctgagacccaacaatattgagattaggacaattaatatccctacattggcctctgagtgttccaagtgaaggaaatgttgtatatctctcacttcaaataaaaaactagaaacgattaagcttagtgaggaaggcatgttgaaagctgaaaaacgctgaaagctatgccactagtgccacacagttagctaagctgtgaatgcaaaggaaaagttattgaaggaaattaaaagtgctatcccagtaagcatacgaatgatataagaaagcaaaacaaccttattggtgatatggagaaagctttagtggtgtggatagattaaaccagccacaacattctcttaagccaaaactgatttagagcagaatgctaactgtctgcaattctaggaaggctgagagaggtgaggaagctgtggaagaaaagttagaaactagcaaaggttggttcatgaggtttaaggaaataagccaccttcataacttaaaagtgcaatgtgargcatcaaatgctgatgtagaagctgcagcaagttatctagaagatctagctaagatcagtgatgtagttgaatacacgaaacaacacattttccatgtagattaaatagtcttctattggctraagatgccacgtaggaatttcacagctagagaggggatgcctggcttcaaagcttcaaaggacagtctgacagtctgactctcttgttaaggcmtaatgcagctggtgacttgaagtcagtgtccatttaccattccaagaatcctagggccctagagaattatgctaagtctgccctgcctgtgctctataaatgrgacaacaaagcttggatgacagtacctcagtgtttatagcatggtktactgaatattttaagctcaatgttgagacctactgctctttaaaaaagtttcttttcaaattactactcattgacaatgcaactggtcacccaagaggtctgatagcastgtacgtcatgccttctctattaagctgttcttgcattgctgtaaataaatacctgagactgagactaggtaatatataaagaaaagaggtttaattggctcatggttctgcaagctatacaggaaacagtgctggcatcagcttcttggggaagtcttagagagctttaactcatgacagaaggcaaagcaggagcaggcacatcacatagcaaaagcagaagcaagaaaaagaaagaggaggggtggaggtgccacacacttttaaatgaccagattcttcagaactctcatgaagacagcaccaagccatgagagatctgcccccatgatccagacaacttccaccaggccccacctccagcattgaggattacaattcaacatgagatttgggctgggacagatatacaaactatatcaccttctaacacggcatccatcctgcagcccatcaatccaggagccatcttgattttcaagttttattatttaagaaatacattttataaggctatgactgctgtagatagtgattcctctgatggatctgggaaaagtagattgaaaatcttctgcaaaagattcaccattctggatgccattaagaacatttgtgattatgaggagagaacaaagtatcaacattaacaggagtttggaagaaggtgattccagccctcatgggtaactttgaagggttcaagacttgagtggaggaagtcactgtagatgtgacaacagctagaaaactagaattagaagtggaacccaaagatgtgactgaaattgctgcgtgataaaacttgaatggatgaagagtagcttcttagggatgagcaaagagagtggttcttgagatggaatctactcttggtggaagatactgtgaacattgttgaaatgacaacaaaggatttataatattacatacacttagttcgtaaaacaacagcagggtttgagaggattgacatcaattttggaagcagttctactgtgagtaaaatgctgttagacaacatggcatgctacagataaatctctcatgaaaggtcgagtcagttgaagggcaaactttactgtcaacttattttaagaaattgtcaccgccacctcagccttaagcacccaacatgctgatcagtcagcaaccatcaacatcaaggcaagacacttcaccagcaaaacgtttaactcagttaaggctcagatgatattagcatttttatgaaagtatatttaataaaggtatgtacattattgtcttagacataatgttattgcacacttaatagacaacaatatagcgtaaacataactgttatttattttagagacagggcctcactgttttttctggctggagtgcagtggcatgatcatggctcactgcagcctcaaacttctgtgttcaagcgatccgcccacctcagcctcccaagtagcagggggactacaggcacactccaccatgcctggctaatttttagggtttttttgtagagacaggatctcactatgttgcccagactggtcttgaactcctagcatgaagcaatcctcctgcctcggcctcccaagctactgggattacaggcataagccgccatgcctggcctaaacataactttcatatgcactgggaaaccaaaacattagtgtgacttgctttatttgctttactgcagtggtctggaaccaaacctgcaatatctctgaggtacacctgtataataaagcacgaagaaaaagcataaagtttgtttttttatgtttgtatttctctgccacatccaggggtccaagtttttagttgttcagaaatacttttgagaaggaaaaaaagggagataaggaaggagagaaagagcaaagaagagcctctgaatcagaagaaatgcacctgttctgttttggggctaggtttaagtttcataattagcaaattactaacacagccaagtgctttttgatctaaagcatcttggactgagacactatttaacagtgttaattccttgtggtaagggatagacattcctagtttttttcgtctggaaagcatgggatactactcacgtccacggagtgatcctagcccctatcagaaagaaagataagattgtgacagtataagggtcaatgtaaagggctagcaggttagcagagaacatgtatggaatgttttaggctttatgtgctcatcatggatagctatttaagctaccagaagagctggttgctgaaactcgtggaattccatcacaaatgatcatgggttgtagatttcttgttcttgagaaactgtagaactccagtcaggacttgattgtagagaaagtttggaactcttgtttgggaggcatcctctgtcttaaaaaagcctattgggagtaattctgatcctaatcattaccactcacgtttttggtctctggattttggagcattaaacaatgggaaaaaattcttctaaatcttgtgggactctaggcatatggggaaggaaaaaagagggaacttaactagttttgttcagacttatttggaatgctgctgaaagaaattctgtgaatttacttccttttgtgcttacctttaagagactttataaagctggactggttggttattttctaatatayagctggtcaaaaaactgcagtacttttcttgggtctgaaatccaacctcttcttttcttccaagattattatataggatgaacattttaagttatctgaggttatttaaattcatggaagtcatcatataaagaggaaatagtcctggatatttaaaaaaaaccagtcgttgttattgcactttcgtgatgtctttagggctagatttgtctggtatctatctagttttcaagaatgaaaaagcaacttacttccttgggagagctgtgcattgagatattttgtgtttgttgttccctattcctttcttaaaagataaaaataaataacagttgaatagatgaaagaaatatttggagaagacaaaatgattaaattctgaataataatctttgagaatagttgggcttccttttcacagagcgtgcctaagtggtcaccattgcttaacctttgctgagatgatcagagacgtggattagagcttgattcttttttcatcagattcttctaccagggcaatatggaaatgttatgtctgtagtagtcactttctctctctctcttcctctctctctctctctctctgtgtgcgtgtgtgtactttcaaaaattatatacacagtatttcatttctttgtgttgggagacaattttcttttgcatttttgcatgtcttgagagtagaggcactgtctttttgtacagtcttttaaaggatatttgcattgtgaacaaccttgaatgttagtgtctccctctagaagaaaggacagctttgcttactcttctgtataataaatatctccctcaggagcaagggcaggcatgcttataaaagattccagtttcctgagctcagagttcctcttctgtaatgcagcgcattaagtgtacaggtgttacctggccctcttcacatagcactctagtgaattagagttcagtgaactgacacaaatgtttatattctgactactgctattgatgtgagtgctaaactcttctttgtctctgacctaggagtctcttgttatctgccaggacccatgaaagtggcaggttaagttgtttgcttgcaagtgtgatgaaatctcagatcctttacagttagttcttgatactttgaaataacagtgattaattaaatggaatgtatttggaaagatttattgaaacttatatttataagttttacaatttttgagaagttcatttaggatattatttctgyttgctttggtacaggtttcgtttataatgtcagcccttatatggagtatcatcctggtggagaagatgaactaatgagagcagcaggatcagatggtactgaactttttgatcaggtaagatgtgctgaaagtaaccaaagtattccggtggaagagtactcagatttatcagtgtgacatttgtagaaagaaagraaatagttgcataaattccagatgcattggcttgaattttgaagtgtgggaagatgctcacaagtagcagctgttcatttaatttgccctttgagttattaaaattttagagatgtttcaaatctgcgactaggggtcttcttttaagtgttcgctgcctcctttgttggtaagtgtttattcagtcttgattagttttgataatgatcggcttatgggaggtagtgacaattggaagaaggaacattgggatccgctgctaacttgctgaatcactttaaacaagtaacttagcttcttttctgttagtcctttgtcacctagggattgctatrtattcagcctactgctatatactgaatttgcatgtcatgtagaaagttagccgatggtgattaatgaatagaaacttatttttcctagcatgatggcagagattctgtataggttatctcaaaagatatttaaattagtcacttttccccttatatttactaaaaactagcattagctcttaaactattttaaagttatgcagaatgttgattactctcagtaattctgagtattctgagacaacagtctttagaaagatagaaatttgcctttgtctcatatatgctttattttgtattttaatgatgattaaccatgttgtaatattggatttttatcattcgagatacctgaatcaggttgggttatattatagctgtttttttgatcaaatataatttgatttctgttcttcctattttctcatccattttaggacttgttttttgaccatgttgccagaaatagaatttgttttatatagttgacctttgaacaatacagggattaggggtgccaacaccctcactctcccatgcagtagaaaattcatgtataacttttaacttcccaaaaacttaactactaacagcctactgttgaccagaagccttacttataacataaacagtcaattaacatatatatgtatgttatatgcattatatactatattcttacaataaagtaagctaaagaaaagaaaatgctattaagaaaatcataaggaagagaaaatatatttatattccttaagtggaagtggatcatcatgaaggtcttcatcctcatcttcatcttgagtaggctgaggaggaggaggagaaatagggagggttggtctttctgtcttgaagtgtcaaaggtagaagtaaacccatatgtaaatggactcggttgcagttcaaacctgtgttgttcaagggcccattgtgtttgagagcacttaggtgcatttgcttaaatggcaggatctcatttgctgttaatgttcttcctgggttggagaagagtcatgtttactcttggtcataacagcattctccttggaaggtttttattgctgttttaaggcaagttcccattgttatttggtatttgctttctctctgtctgcctgcctgctgtctgtctgtgtatctatgagacagagtctcgctctgtcccccaggctggagtgcagtggtgtgatcttggatcactgcaacctgcgcctcccaggttcaagcagttcttgtgccttagcctcccgagtagctgagattacaggagtgtgccatctcgcctggctaatttttgtatttttagtagagatggggtttcgccacgttgaccaggctggtcttgaactcttggccttaagtactctgcctgcctcagccgccctaaatgctgggattataggtgtgagccattgcgcctggcctggtatttgttatctagcaatgcaagctaaatagaaaggtttaggaacatttgcctaaaaacttacctgctatacttttctcttgaatctgccttgtaacctcctaatgttgaatgtactgtgccacaagaagaatttccaataaagtctagtcttatttctgttcttgagtgttatgaggtcatatagaccttatttaaggaaagcttgttttggagaattcacaagaagtgctatattgttaagttttctagtatttaaaacaatatttactagattgctagattcagaacaattagattgcattcttcttggctttaataagaccagtgatgtttaattatttatgacttgctcagcacagaagtaaactagaaactacagtgacgcttgcatttttcaatatgagaatttacttgtgcccagtattttagctgcacaaataatagtaatttccttattgtcctatttctgtttttatcccaccgctgacctcttatcttgsatttccaaatacctgataggcartttaatgccctatacttcaactcattatgccctcaaataatatcaagtcattttctttcctctttttccttctgtttcctgtttcttgtaataggggcttgaattcccggagtaatctttttcatctctgcttgtgccccagtatccaatcactggccaaatcctatgatctgtctttttctcccttcccactaccttagttcactcactgtagccatattattttaatactgtcttgatatctttaccttcattaccaatttaggtaacatgacagctagattagatttcttaaagacaatcatcttagtaccttgctctgcaactctcagtggctcacccctgacagggaagtacatttacactcattagcctggcatgtgaggtcctaaaagaatatatcagggtaaatattcccaacatgcatcttgctttgcacccttccctgcctctgatgtctatcattctattctctatgtcaatgagatcaaattttgtagctcctatgagtgaaaacatgcagtatttgtctttctgtgtctgtgtatttcacttgatgtaatgatctccagttccttccatgttgctgctagtgacataatttcattcttttttatggccaaatagtattccattgtatgcatatattataacacattttctttatttatccattccttgtttgtggacacttaggtggattccatatttttgctattgtgaatggtgctgcagtaaacatgcaaatgcaggtatctctttgatgtaatgatttattttactttggatagatacccaatagtgggattgctatggtagttctattaatattttagttttttragaaatctccatactgttttccataatggttgtactaatttacattcccaacaacagtgtgtgagttccattttctttttttttttattatactttaagttttagggtacatgtgcacaatgtgcaggtttgttacatatgtatacgtgtgccattttggtgtgctgcacccattaactcataatttatcattaggtatatctcctaatgctatccctcccccgtccccctacctcacaacaggccccggtgtgtgatgttccccttcttgtgtccatgtgttctcattgttcaattcccacctatgagtgagaacatgcggtgtttggttttttgtccttgcgatagtttgctgagaatgatggtttccagcttcatccatgtccctacaaaggacatgagctcatccttttttatggctgcatagtattccatggtgtataggtgccacattttcttaatccagtctatcattgttggttccaagtctttgctgttgtgaatagtgccacaataaacatacatgtgcatgtgtctttatagcagcatgatttataatcctttgggtatatacccagtaatgggatggctgggtcaaatggtaattctagttctagatctctgaggaattgccacactgacttccacaatggttgaaccagtttacagtctcactaacagtaaaagtgttcctgtttctccacatcctctccagcacctgttgtttcctgactttttaatgatggccattctaactggtgggagatggtatctcattgtggttttgagttgcatttctctgatggccagtgatgatgagcattttttcatgtgtctgttggctgcataaatatcttcttttgagaagtgtctgttcatatcctttgcccacttttggatggggttgtttttttcttgtaaatttgttggagttctttgtagattctggatattagccctttgtcagatgagaagattgcagaaattttctcccattctgtaggttgcgtgttcactctgatggtagtttcttttgctgtacagaagctctttcgtttaattagatcccatttgtcaattttggcttgtgttgccattgcttttgatgttttagacatgaagtccttgcccatgcctatgtcctgaatggtattgcctaggttttcttgtagggtttttatggttttaaacatttaaagacttaaaaacatttttatgtttttatggtagcgtttttatggttttaaacatttaaagacttaaaaacatttaagtctttaatccaycttgaattaatttttgtgtaagatgtaaggaaggggtccagtttcagctttctacatatggctagccagttttcccagcaccatttattaaatagggaatcctttccccatttcttgtttttgtcaggtttgtcaaagatcagatagttgtagatatgtggcattagttctgagggctctgttctgttccattggtctatatctctgttttggtaccagtaccatgctgttttggttactgtarccttgtagtatagtttgaagtcaggtagcatgatgcctccagctttgttcttttggcttaggattgacttggcaatgtgggctcttttttggttccatgtgaactttaaagtagttttttccagttctgtgaagaaagtcattggtagcttgatggggatggcattgaatctataaattaccttgggcagtatggccattttcacgatattgattcttcctacccacgagcatggaatgttcttccatttgtttgtatcctcttttattgcgttgagcagtggtttgtagttctccttgaagaggtccttcacatcccttgtaagttggattcctaggtattttattctctttgaagcaattgtgaatgggagttcactcatgatttggctctctgtttgtctgttattggtgtataagaatgcttgtgatttttgcacattgattttgtatcctgagactttgctgaagttgcttatcagcttaaggagattttgggctgagatgatggggtattctaaatatacaatcatgtcatctgcaaacagggacaatttgacttcctcttttcctaattgaataccctttatttccttctcctgcctaattgccctggccaggacttccaacactatgttgaataggagtggtgagagagggcgtccctgtgttgtgccagttttcaaagggaatgcttccagtttttgcccattcagtatgatattggctgtgggtttgtcatagatagctcttactgttttgagatatgtggcatcagtacctaatttattgagagtttttagcatgaagcattgttgaattttgtcaaaggccttttctgcatctattgagataatcatgtggtttttgtctttggttctgtttatatgctggattacgtttattgatttgtgtatgttgaaccagccttccatcccagggatgaagccgacttgatcatggtggataagctttttgctgtgctgctggatttggtttgccagcattttattgaggatttttgcatcaatgttcattagggatattggtctaaaattctctttttctgttgtgtctctgccaggctttgatatgaggatgatgctggcctcataaaatgagttagggaggattccctctttttctattgattggaatagtttcagaaggaatagtaccagctcctccttgtacctctggtagaattcggctgtgaatccatctggtcctggactttttttggttggtaagctattaattattgcctcaatttcagagcctgttattggactattcagggattcaacttcttcctggtttagtcttgggagggtgtatgtgtcgaggaatttatccatttcttctagattttctagtttatttgcatagaggtgtttatagtattctctgatggtagcttgtatttctgtgggatcagtggtgatatcccctttatcattttttattgcatctatttgattcttctctcttttcttctttagtagtcttgctaggggtctatcaattttgttgatcttttcaaaaaaccagctcctggattcattgatttttttgaagggttttttatgtctctatctccttcagttctgctctgatcttagttatttcttgccttctgctagcttttgaatgtgtttgctcttgcttctctagttcttttaattgtgatgttagggtgtcaattttggatctttcctgctttctcttgtgggcatttagtgctttaagtttccctctacacactgctttgaatgtgtcccagaaattctggtatgttgtgtctttgttctcattggtttcaaagaacatctttatttctgccttcgtttcgttttgtacccagtagtcattcaggarcaggttgttcagtttccatgtagttgagtggtkttgagtgagtttcttaatyctgagttctagtttgattgcactgtggtctgagagacagtttgttataatttctgttcttttacttttgctgaggagtgctttacttccaactaagtggtaaattttggaataagtgcggtgtggtgctgagaagaatgtatattctgttgatttggggtggagagttctgtagctgtctattaggtccacttggtgcagagctgagttcaattcctggatttctttgttaactttctgtctcattgatctgtctaatgttgacagtagggtgttaaagtctcccgttattactgtgtgggagtctaagtctctttctaggtctctaaggacttgttttatgaatctgggtgctcctgtattgggtgcatatatatttaggatagttagctcttcttgttgaattgatccctttaccattatgtaatggccttctttgtctcttttgatctttgttggtttaaagtctgtttcatcagagactaggattgcaacccctgcctttttttgttttccatttgcttgrtagatcttcctccatcccttaattttgagtctatgtgtgtctctgcacgtgagatgggtttcctgaatacagcatactgatgggtcttgactctttatccaattcgctgttttgtgtcttttaattggagcattcagcccatttatgtttaatgttaatattgttatgtgtgaatttgatcctgtcaaatgttagctagttactttgctcgttagctgatgcagtttcttcctagcctcgatggtctttacaatttggcatgtttttgcagtggctggtgccggttgttcctttccgtgtttggtgctcccttcaggagctcttttagggcaggcctggtggtgacaaaatctctcagcatttgcttgtctgtaaagaattttatttctccttcacttatgaagcttagtttggctggatatgaaattgtgggttgaaaattcttttcttgaagaatgttgaatattggcccccactctcttctggcttgtagagtttctgccgagagatcagctgtctgatgggcttccctttgtgggttacccgacctttctctctggctgcccttaacattttttccttcatttcaactttggtgaatctgacaattatgtgtcttggagttgctcttctcgaggagtatcttagtggacttctgtgtatttcctgaatttgaatgttagcctgccttgctagattggggaagttctcctggataatatcctgcagagtgttttccaacttgtttccattctccccgtcactttcaggtacaccaatcagacgtagatttggtcttttcacatagtcccatatttcttggaggctttgttcatttctgagttcccttttctttacatcctcaccagcgtctattatttcttgttttttttttttttgtaatagccattctatctgggataggatgatgtctaattatggttttgatttgcatgtccctgatgatcagtgatattgagcattttttcatgtactcatcaactatttgtcatcttttgagaattgtctattcatgttctttgcccacttcttaatgggattacttttttttttatggttgggttccttatatattctggatatcagtccttgttagataaatagagtgcagatattttctcccattcaacatgttgtgtcttcactctcttgattgtttcctttgctgtgtagaaacttttaagtttaatatagttacatttgtctatttttgtgttgtctgtgcttttgaggtcttaaccataaaatctttgcttagaccaatgtcatgaagtgtttttccagtgttttcttctagtgattttatagtttcgggtctatattttaagtctttaatccattttgagttgattttttaatatggtgaaatattggagttcattttcattcttctgcatatggatatccaattttcccagcaccatttattgaagaaggtgtcctttcctcattgtatattcttgacgtcatygttgaaaatcagttggctataaatatgtggatttatttctgggttctctgctctgttctgttggtttatatgtctagtttcataccaatactgtgctgttttggttactacagccttggaatatattttgaaatcaggtagtatgatgtcaccatctttgttctttttgctcaggattgctttggctattctagtgggtttttggttccatatgaattttaggattgttttttctatttctgtgaaaaataacagtggtattttgataaggattgcattgattctgcatattgctttgggctgtatgttccttctgattgttactaattcttctgatccatgagcacagtatatctttccatttgtttgtgtcctttcaccagttgtgttctttcatcaatgttctgtagttttacttgtagagatctttcatctctttggttaaatttatctgtagctttctttctttctttgtagctatggttaatgggattgtcttcttgatttctttttcagctattttattattggcgtatagaaacactgctgagttttgtatgttgattttgtgtcttgtaactttactgaatttgtttatcagctctaaggtatttggtggagtcttttggtttttctaaatacaaaatagtatttgttaaaagggacagtttgactttctcttttctaatatggatgctttttatttctttctcttgcattgctctgtctagaacttccagtactgtattaaataggggtagtgaaagtgggcgtcctgtcttgttccagttcttagtgaaaaggcttttaacttttcccagtgcaatatgttgttagctgtgggtttgtcatatatggccttttattattttgaggtatattccttctatgtctagtttgttgagagtttttattatgtaagaatgttgaactttatgaaatacttttttgtgtgactgagatgatcatacagtttctgtttttcattctgttgatgtgatgtatcacatttactaatttgtgtgtatgttaaaccatccctgactccttgggataaattccacttcatcatgttttattatatttttgatgtgctgtcaaattcatttggctagtgttttcttgacatttttccatttatgtttatcagtgatattgtagttttgtggggtttttttggttgttgtttttgtacacttacttggttttggtatcagggtaatgctggccttgtagaataaattggggcgaattcccttctcttcaattttttggaataatttgaggaggattttgatttactcttctttctacatttggtaaaattttacagtgaatccatctagtcctttgttgttgctgttgctgttgttgttcttgggagttttttttattactgattcaatcttgctactggttattggtctgttcatgttttctatttcttcctgattcaatcttgataggttgtatgtttccaggaatttatccattttctctaggttttccagtttgttaatatatagttgctcataacagtctctgatgatcctttgtatttctttggtatcagttgtgttgtctccttttcatttctgattttgtttacttaggtcttccctttttttggttattctagctagtggcttatcaattttgttttatcttttcaaaaatcaactttttgttttattgatcctttgtatctttttaaaaaatctatttcatatagttctgctctgacagttattatttcttttcttctcctaatattgcctttggtttgttcttgcttttctagttccttgaggtacattgttagattgtttatttgaaatctgtcaacttttttggagtaggcatttattgctataaacttcccccttagatactgcttttgctattccacaggttttggtatgctgcatttctattttcatttgtttcaagaaatttttttatttccattttaatttcttctttgactgaatggtgattcaggagcatgttgtttaatttccatgtatttgtatggttttgaaagttcctgttagtattgatttattttactggggcctgaaaatatactcaagaggatttcagtgcttaaaaatatgttgagacttgttttgtagcctaacatatgtctgtcatggacaacgttatatgtgctgatgaaaaaaaatgtgtattctgcaatcgttggataaatgttttataaatgtctgctaggtccattggtctgaagtccagtttaaatccaatgtttgttgatttttctccctagatgatccgtctaatgctgagaatgggattttgaactcccccactattattgtattggagtttctctctctctttagatcaaataatactttgcttttgaatgtgttttgtatatcattcaatgagttcttcagttccagaatttctgtttggttctttttcatgacgtctatcacttttgtaaatttctcattcatattctgaattgttttttgtattgttttttataattctgttgtacctcactgaacttctttagaatcaatagtttgaattctttttctaggatttcataaatttctttttgattgtgatctgttgccagagaattattgtgttcctttggaagtgtcatatttccttgctttttcatgtttcctgtgtccttatgttgatattgcacatctggtgtaacagtcacttctttccttttttttttgtatgtwtgttttgtttgtttgttttttgttttgttttgagatagaatctcaccctgttacccaggctggagtgcagcggtgcagcctcagctcactgcaacctccgcgtcccaggttcaagagattctcctgcctcagccgcccaagtagctgggactacaggcacgcgcctccacacctggctaatttttttgtatttttagtagagatggggtttcaccatgttggccagactggtctccaactcttgacctcaggtgatcttcccgcctcggcctcccaaagtgcggagccactgcgcccggccctttttcagttttttttaaatttgctttcatatgggagaaatttttcctgtagatgtatctgtgatgttggtggggtaggacacttcrgctttgatcctgggtgtgtgcagtagtgtagtctctatatgatttcttcaggtgtaaacagcatcagtgatgactgtgacttcctcggtgtcttagggtacaattattggtggaggctgcgatgaagttttgctggttactaggaccccaggtaggttagtctttgggccccagtggtgggagcaatgggctaagtgtgtctgtccttgggccccaggatggcatatgctggcaccagggttcatcaaggcaagctgattcttgggcctcttggtggcctagttggatcccaatagtggcaacagtgggtgagttcttgggcccctgggcaggtggtgtggcatgggtggtgacrgtggcagtcgcaggatgacctctgggtcccaggtggtacacgcttatgttggtggaggctgttatgggctgcgcaggccagtctctaaccctgcagatggcatgtgcaaggaggtgctagctgtggtgatagcagccaggttggtatgtccaacctcaggcccctgggaggagtgttcaggtgccagtgtgttggactggactgggcaatctcctggccctcaaactgtgctgtggaataggcagaggggggtgaggccagccatggcaggcatggtaggcaggggcaatccccaggctatcagtggaatgctcaggtggagggagacagcagttgtggtgataccctgcctctgggcagagtggtgctgccttcagtggtaggcagcctaggccagtggatggggaatgaacgtaccagctgttcttcagccctggtgacttgctcttgcctcagcccatggtgcggtagctggcagttccttgaacctaaactcctggggcagtagccatgcttctcttgcacttcagtctgggttctgctgggttctagtacagtgtgcagtttgttggggctagggctctgaaatgatcgtttactgtagctgcttaggtctcagggggcttgtgagacccagtgcaagcaccctccctggagcagtgccatcacacaatctcccagcagctctctattttaatgtcagggcctgcaaaggtcaaagggttcttctgtggctaggattgcatgagtccatggtgggaatgtagactgctaaagttctccaacctgagtctttctcagctcccagctgatcccagccctgtaggctgcctcacttccttttcatttcttgctttaggtatctcctgtcactttactgttgaatttcagtgttctctctggatggtctattcagaatgtaattatccattcactatcttggttcttagtggaggaggcaagtatgaaatacctctagtcaactatcwtctttctatactttacatacttactattttagtgcatatttatttactctggaatataccataaagattccagtatcaacatttttttggctggttattttaatgattatatagtattgtattgaatggcattatatattgattttcctttgccggtcttttacaattggrcatttaaattgtttccagtattttgctaatttaagtagtgctgtgatgagtatcctggtacctacatctttatatacatgcaaatattttctcaggtaaattcctaaatatgtgagtgaaagagctgcagatttttaagtccttttttttcaaacagggtcttgctcttttgcccaggctggaatgtagtggcatgatcagcttactgcaacctcgaactcctgggctcaagtgatcctctcacctcagcctcccaaagtgctgggattacaggcatgagccaccccaccttaaaattattcctggcctattttaagacttttaaggcatattgagaaggtgccttgcagaaaggttgtttaaatataatttccaccagtggcatctgacaacaaatactgtcagttcttttccttgaagcagtagaatcactttgtttcttttcaagaaaatamctgttaaatatctgagtctgaataatcagtttgtttactagcagttcttataaatggcccttcattttttttgttctttttttttttaacttttattttaggttcaggggtacgtgtgcaggtttgttatataggtaaactcatgtcatgaggattcattgtacagattatttcatcatccaggtactaagcctggtacccaatagttattttttctgctcctctccctcctcccaacctccaccctcaagtagtgtctgttgttcatttctttgttttcaggagttctcatcatttagctcccacttgtaagtgagaacatgtagtatttggttttctgtttctgtgttagtttactaaggataatggcctccagctccatccatgttcctgcaaaagatataatcttgttcttttttatggctgcctagtattccatggtgtatatctaccacattttctttattcagtctgtcatttatgggcatttaggttgattccatgtctttgctattgtgaatagtgctgtagtgaacagtcgtgtacatgagtctttatggtagaatgatttatattcctctgcatatatactcagaaatgggattgctgggtcaaatggtagttctgtttttagttctttgaggaatcaccatatcactttccacaatggttgaactaatttacagtctcaccaacagttgtataaacatcctcttttctccgcaacctcgccaacatctgttatttttttactttttattaatgccattctaactgccatgagatggtatctcattgtggttttgatttgcatttctcaaatgatcggtaatattgagcttttttcactgccggatgactgcatgtatgtcttcttctttttttaatttattttaagttctgaggtatatgtgcaggatgtgcaggtttgttatgtaggtaaaatgtgccaaatggcctttcatgaaaaaagcctagttgcatttgcaaatcaaacaatcacctaagtgtctcttcaccgggaaaccatcatactttgtagcactaatctttttgagaatttcccactttgtcacacaaaatataataaaaatatgtacccaagggtcaaaatttaattaataatttttctacttcatgaaggatattcttaagtattcttaaatatcttcctcatgctccctcccctgtccatggtggtgaagaagataataattactagtactgtttggacccactgccttgattaatgcaagatactagcagttttacccaccattgcttttatagcatcagagcaaatgtcaaaactgaaaaaaaagtgagtaactttttattagtattatcatgaaacaaattgagacctcatggagacctgaaagggtgtcaggaacttccaaaggtcccaacactttgagaatactattctaaacaatctctatctgtgcagcctttctatcacaccctggtagactaattgaatatgcttcttagtttttaggtgtgtgttgagagtggtttcagaaagtttagttttgctcgtactaaaatgagagcatcctgtggagttagtcatgttgcttttccatcatttgttttacataccaggttcatcgttgggtcaattatgaatccatgctgaaagaatgcctggttggcagaatggccattaaacctgctgttctgaaaggtaagtggtgctggtgctaaaccagcatggatgtgtggtgcacatgtatttttttttaacttggatttaaacaactaggtctatacaaatcactatggttttgtaattttcattggcctcctggtctagccactccagaggttttccttcatttcttctctagaatcatattgtgactttcccttaaaagttcgactgttgtttagagaaagttcagtgtgaggagtacaacacttagggttgatttttagattagttttttagaatttaattttttgaataatatagtcacatgattcaaacatttaaaaatacaaaaagttatacagtgaaattttccctcccagctttttctcccatttgccatggaccttccgactctgcgccttcactatagataacccctattcttactttaaacttcttctaaagtataaccagtttcttccccctagctctgagatggaagagggatttagagcagtttaaaagtgaagatactgaggcttgtaggtattgtatcttactaaaaactacagagttatttaattgaaaaagcccacttgaagaaaccatgggtaaacaaaccttttgtaaggcagagagttgcctcattaaatggtacctgcttttttgtaatgtattttcttttagtatatgccagttgtttttcactggggttgattttgctcttcagggggacatttggcaatgtctgaagacatttttgttgttagaacgaaagtaaatgctactggcattctaattgatagtggtcagagatgctgctaaatatcctgcgttgcacaggacagacccccacaacaaaggattttctggcctaaaatgttaatagtgttgaagtagagaaaccatcttatatgcattagttttttattattaaaaatgatggtattagtggcacatacatgttaagctggtacgcatgcattggacagctctttggttcatcctaggcaaactctggcacctgtagagctgaggatggagatagacaccaggacctatagtgggctgagacattactttcaaagatttcttttactgtcacagcactgtgagcaaggacaagacatctattgaatgggctgcctgccagttggaagttcaacttytgtaaagtcagtcaaagttctttcttctagaagcctcagtttcctcattggtaaaatggagacaatttaggtagacaaagcacaagctcagagactaactgataggggagaagtaagacggttactggtggagagagggaggctgggagtcattctgaagtgggctttactagacagacaagtttgctatctcagcctggctgccttaatttgctccttctgctatagggcccgttgtctgggtaattcttgccagaaagatttaagggaaaggtaattaaaaatgggaggtagaagtaagaagtccctggttagggggcagatgcagacctaaacaggaagtgtgtcttctgtagtggtatgactgactgatgttttgtttgtgttagcatttgttttgttttcatagaaagaggaattttgaacatgtgtatattcatgtacaggtgattccagataagaaaggaatcgtaatccctctgatgataggacaggaatggaaaataactgacaaattgcagagttgattaaaaaaatgacaagtgaagccaacttggggagaaaatatgaacttctaaaaatacagcatatgctgtgattaaatgaataatggaggaaaaactgatcctaggataaattaatactctggtatttttaaagctttttaatcctcggatttttcagaatatgtggatttgaactattaagtcttcattttaattctgctagtgaactagaagtttgagagatgtataaaattgaaagatgattcagaagatgattacaaagatgaatagaagaaagtaaggtaaagatagtttaaaactgcaaaaattaagttttgtaagatttgagaaataagtatgacttttaaatcaaaaacaagaattaggcctggctaggtgcggtggctcatgcctgtaatctcagcactttgggaagccaaggcaggaggactgcttgagcccaggattttgagactagcttgggcaatatagtgaaactctgtctctacaaaaattaaaaaaaaattatatttaattaaaaaaaagaatcaggtctaagttgtgttatgaagagttctgtttagagatatggaggaatttctagaggaaaaaatggttattaaacacattatacagaaccaagaagtcttctggcaaggctaagcaggtaagggaatacagaatggtaaatttaggactttgtgagtaagatccctggcaacaagactgagctcttatctgatggtgacataataccaaccttttggaataagaaaggggaatgaggaatgtagctacaagataattgtaaaacattcaattaatgctcagcattttttttttcctagaatgcttttcttcaaggactcctgacaaatgcctacacattttcaaaacttagctaaaatactacttcttctatagagtcctttcaaatttcttccagtagaaacgttcttcttctgtgcttcaataacacctcctgtatacctcttttacagccacacgcaatcttaaaaagagcgtatcatctgggtacggtggctgacacctgtaatcccagcactttgggatgccaaggcaggtgaatcacttgagttcaggagttcaagaccagcctgggctacatagcgaaaccctgtctctacaaaaaagaaaaaaaaattacaaaaatattaaccaggcctagtggtgcatgcctgtggtcccagctactcggaaggctgaggcaagaggatttcttgagcccaccaggcagaggttgcagtgagccgagatatcaccactgcattccagcctgggtgacagagagaggccttgtctcaaaaaaaaaaaaaaaaaaaaagcctattgactttatttttaattccgtttatggtattttttgaataagtattgcactcatgtgattcaagaagaagcatccttatcatagttctgcctcccatctactgttttcctctcccatgcacacaccaaggacatgtttctgttgatgttgttgttgttgtgactctttccaaattatctttatgtatgataagcagactgaatatattttcttatttttctaactttttatccaaatggtatgtcaatgtccgtattatgtcaatatcgctgttaagatgatcaatagatgtttattaaagaatgagcatattggtaaaagaacttcctactggatctttctttattccagggtatcctcctgtgcctctgctcagcagaggtaaactagatttgggtcataattaaagatccttaccaaggaagagctgagtgctgttagatcacagcaccagccttctaaatgactctgacctctccggaaataaagattctcatcagagtaaagcagtttaaccagcattatgagaagatacaaatttgattggccatggagccaactaaatgatggaattagttaccaagagaaaacatcagatttcttttcagagaagaaagtatctcctgtgactaaaatgattcagatgtaaatatgcttgaaagtgaaaaacagtctcctccatttctgtaactcagtttttgaaaagagttgtaaaaacagagtaggagaatttttaaaggtaacccagattctttaagtggaagttctctttctactagtacttcttgtatttaaaaaagacttggtggtgggrgggaactactaattttgcagaatccagaaagttctgacagattcaaatctattcatatcaggcaagaaataatcataagagataatattttcttcttagaaataaattacctgggacaatttttcaaaatctgtgaacctcttaggtaaaaactaattgttttacatgataaatgagatttattaaactgttgaccttattgtacactgaaaatagatacatgttctgtgaatttctaagataaaacaaataatcacaactgcaacagcaaagacagataaaactgactggatgaaagtacatggccaagcagggacatcagtgatcctttgcaaactgtaatggccagatttgtatgtggcagttgataaacaaagctcattttgaagtatagtttaaatggtttttaggcctactatccttttaggaaatattaactcctggattgccaagaaaaatgggactgtgtttcaggagagacaaatctaattttggcttttttactggagtggtagatttcattcaagtcctttgacctctgattttcagccttttttaggagatcaggtgataatttgctgtatgtggtaaattcctttcagctgtaaaattattttggtaaaatgaggaaaaggaaaaggatggtcatttggcttccttaattattattattttgggwtggatgagtgaagtgtaattaattatggaatttctggtgaaatattggaacacaaaaaatttgaaagctttgattttaaatacgttagtttctttttgtataaaacaaggtgatgtcagcttaagaaatgatgtctttccatttgactacttgaatattttttgttagcttatcccatttttttttaaattttgacaacttgctgaggtgtttagtttgactataatggtataacacttgtggatattagaatataatatagctttgtgagttggccgccatcctgaaagaaaatacctgttaatttttttcctgggtttgtaacactaataattgcattgggtatacatgcaaaaatctgaacatattttaaacttgtaataacgatcattttatgcattgaactcagtaaaagggaaagataaggcatctttctttgagttgttaatgtgtgtgtttcatttatgaagtataatctaataaattctggttaacttggactaatttaaaatatgataacacggatgaaacttgacgtttacatatgctcatatagaaattaaccaagatattagaaaaaagtgaccaaagaattagaaaaaatccaaatgaaatgagagacaaacatctggagaaatatggtctggcagtcttcagagatgaaacttacttgtttaaaacaaaggccgtttctatattggcctgtttctctcctcaggccttagaagaaagcccttcaaaaaagaagggatgttatcttgaaatcagtaatgtggactgacattctcattgacattaaagtattcttatttgacttttttttctaaatcactatacagactatcgtgaggaggaaaagaaagtcttaaatggtaagtctataaatttataataaatgaatcatattcacatgcttatgaatagtattgatacacagaattgtctggggcatttaaatttttttcttttttttctttttgagatggagtattgctttgtcacccaggctggagtgcagtggcaccatctcagctcactgtaacctccacctcccgggttcaagcaattctcctgcctcggtgtcctgagtagctggtattacaggtgcacaccacacacctggctaatttttgtatttttagtagagatggggtttcaccatgttggtcaggctggtcttgaactcctgacctcgtgatctgcccacctcggcctcccagagtgccgggattacgggcgtgagccactgtgcccggcctagattttttttttttttttaatatgaaagatagctttactggcccaaacttaagagtcttttgtagggttttataggctccttattccagccattactcttatcgtcgtgccttctgtgacatccctgaatacatgttatcttccctcagcttgaatacttgtagcagttaggagtttcttcctcagaaacaagacaaaataagtcagttttcttagatgtgagctcacctccattgtttgcatacacatgccaaatagtttattaatstacaattttttaagctgagtggtgcatccagccattctggatgacttgcaaataatgactgacacttcctctcccccgcaaaaaagtttggcatggtggtcactactgacataaaatgcatggtgctaactctgactgaactatattgatgtacatttagaaacatttttttctttcatttgcaaaagcaagttayagaaatgcaactaacaagctagattgccagatgagttacctttttctttgttaactgaaatagtctatattgtggactaatttatgcaatttatagtacctgtagttgttcatcggataatataacactctattaaatgagggactgatctttggtttcgtctgatgattgactcttctgtggcactacaaaagcaaccattgcttaatgattgattaccgatagactaggcattttctttccaccacatgtggcttccagaacctgtacttttctgttgccttctttggatgcactgcatttgactaatttctcagtaaaaggtggcattaagtatggaatatagcactccacaagtgatttggttagcactgttacctcttgtgacctggaccctgtaagattggaacatatctgtctatctatatatttattagctgcttttcccttttggctcatttaagtctatgtggtatgtctctgtatttgcaaatgtgatctgcctgcattctatgttactattccaatagctgcttaaaatactgaatgggttggactactttcctattccactagagacccgatcccttcaaattgacgacattcaatcaaccaatacttatggaagggagaacatgcattcagtccaccttgcattacttaattattttttttcactacacattcaccccgtattctttcaacttactcaaaataatattatgtaaagtttgagggttttttttgtttttagttagttttaaattaagatatattccatggcttattattctgttttaataagatatatcttaattatactaaatagttttttagaatgtttgattattgtctcatttgctcacccatgagattgcagggaccatttcattgctattaatagttccaatttgaggaagaggaaacagtggcttgcataaaatcacagtactggcaccgagcttaagtatagattttctggtcctaattaggtcatacaagatcaatgttgacttacaatttatcaattctgtttatagcgttttcttacagaaattcttagattttgatgcatttgatttttatttatatacttaagagacttccaaaagagaaacaacattaatctctgaaatctttcagtgcttcttaatttaataagattattttgtcttgcttttaccatattagaaaaaatacatttaattcttgtagtcctctcttgttttacgtgtagttttgtagtagagcactcttcttttagtgcccactgctaattattagttcacaactctgaccttgttgtcacatctctgaggcttcctttgtttatttgaaaatagtgttctgcagagttatgtgggaagaaatggaagctgaatgagtaaggcctggactcagggctcaccatcagcccattcagaaaaatatgactgttttacatcttacttgcacttgagcttgtcttgaaacaaaacgtttgtgtctaaaaagaatcttgaaaacctctaaactgtcttgtcccaaaggtgtcttgcaactcttaaatttatatcaaatactttgatttctaatttgggcacccaagactcagcagatactaaccattaatttttgttcctgtatagtttgaaaaatagtaatataattgatgcaatgattttcaaaagtcatgtagcagcagtacttcttttttccaaactaaatcttaccatatacaaacaatgcacttctattgtaggggggaaacacttaatgtttgcaatatcttgagttcttccatgcctcagagttttctgaagtcatttaaaaaccatagcattagtgggcttttaaaatgcatcatacacccaagatgcattttgtgggtgtacatacccacaagaatgcatacccacaagagtgagtaaaatgggaaaagacagaagaccacatgttggtgaggttgtggagcagctggaactttcaaacactttttactgtggtaaaaagtgtaaattggtacaaccactttgaaaagccattcagtagtatcttctaaagctaaacatacaaacacccttcatactaaccaaaaatgtagatatgtgttctttaagaatatgcatgtacctgtaaaagaatatttatatcaacactgtgtataataactccaaactggaaacaacctgaatgttcatcaacaggagaatgaataaattgtgaactatacatataaagtaatactgctcagttacaaaaaggaccaagctgatgaattcagtagcatggataaaatttcagaamgcctagatttgatttattgcttattatttatcatgcttatttcacataagaactgtaatgtctagaatattggacaaaaagccagactaaaagagaacatgtgttatcattctacttatataaagttcaaacacaggcaaatactaaccatggtgttagtagtcagaatacrtgttactcttgaggcaggggtggtgattgaaaagggggcatgaagagagtgctgactgcaagggtatgtatgtttcactttatcacggccttttggctaagatcaagtgaaaatatattgagtagtacatttgtgatttgtatccttttatgaatatatgtgatatttcactaagaagttaacttaaaagacaaaaagttaaaaatactttgtagatgaactatagctatctttctttgtaaaggcatgcttcccaagagccaagtgacagatacacttgccaaagaaggtcctagttatccaaggtatgcattcttatttaaaatttttraagttaaatcaattatgtacaaaaatgtacacatttaaaaaataaagtagctctgggtttgatttattgcttactgttagtcatgctctttgacacaagaactgtaatgcctcatttattagatgttgttggagaatgagctgttccataaatgtgaattttaaatataactgaagtttgatccattttaaacaccaatactttaaaaaactattctaaaatatttttctgattataaaaaaatacattaatggtagaaaacttagaaaatagagaaatacaaaagaaagtgataaaatcagttgtaatctcaccatccttagatgtatactattatttatattttccagttagattaatataatacctacttccatattattctatttttataatattggtatgacagtatatgagcatttttctatgctgttaaatattctgcgaaagcatttttctctgcattccatcatatgaccatgccataatgtatttaaatattctattttttatatctagttcatttttatcaatttttaatgagaattcttcaaaatatattgcccaatagttgtctttaacagttaacagtaacttaagcaatacatatatatttcgttaatgacacttaaaatgccttcaggtgtgttctctgtagttttttcttttaccccttttctctctaccaccagtctatattattctaatatcagcatcctgctatatttgttaaattatttcatatacaattttaagttagggactaaggatgccctctgtaaattagactatataggtgataagtgcaaaaagagtatcaatttgatcaatagctgtaacaaaacagaagacttagtttcactttaagtttcactatggacccattaaacaaccttgatgagttcatttcttcactactaatatatttgtgacagggaggaatgaagataataaacgtgcattttttcatgctctttaacaaaatatgttgttttggttttgctctgataaaagaagattttagtaaagagatgtataggctctataaaaagggtcttgttgaggatattttgtttttactcaagtgggaatacatggaagtctagatattttaaatttagaaatagttgtcagctgtataatgaagaatgtaacatggtaagaccagtttatttagaaaaaaagcttaacctagagaaatacagatatgtctcattataaattttaaacatttaatgattaatatatgtgaatgcacatgattgtcaatataattattcatccttttatttatattttacagctatgattggttccaaacagactctttagtcaccattgccatatatactaaacagaaggtaaatatgtctttaaaatcagaaaagaagaaaataataaatgttaatttatgtaccaggtctttttctaaacacttttttatattatttacttctcactataattctttgaggtagatagtattgttatcccttttgtacagaagaggaaacaaagaaaagattaagtaattcacccaaagttacacactgagtggcagatctggcatttggaactcaggcagtctggttccagaacatctgctcttaacagccattcctatagcctcttaaaaatcagagtaggaagtattttatgtgtttttctgtgtgtgtgtgtgtgtgtgtgtgtgtgtgtgtgtgtgtgtaaagcatggataacaaaaaatgaatctcagttaacatcaccataagaacaaatttcctagacataaactaggattggagaaggtatttcgctgtggctgtggcttagtatgtttaaaccactaatggtgttcagatgcccatttgaaactgaagttagggaggtaattcagtaaccatcaaaactaaagttagggaggtagttcattcactaagtatttataacctgcttcatgtagaacacagccttagagatcagggatctaataggtcagatacgtagagacctgactttcaaaaggcttacagtccagctggaaaatcagataaatatgcagacaatttaaaatatctccaagcacatcctccagcaactgttgaggttcccacactttgagggatatgtagatttaaagacaagctctggcagctaggaatttttgagaatttatgctacttctatagtagcagaaccatgtctgaaccagtgggttcctctcattcttgcagcatgatttggtcattctgcaggagtgaccagcctctgcttggaaagagccaagatggccagaggcactacttatcctgttttccactccctcttgatattgtctcttcatcacacwgttcaaaacccagagcacaggctctagggaggtccacttgcactggtaatatcaatggaacacagaggatggatggctaagggaaaaggaaaggtttccatgtggaataatgtattcattgaataatataaataatatatatcttacaccaaggctatgtagaagttagagacatctaaaaatatgttagtgaattgattttttttataagctaaggtcaagaggttatgtaatttgcccaggatcatacattacaggaaagataaagatgaacaacaaatatcttggtttctgctgattgtaattttctggggggtggggggagggttccatatggcttattcaaaaaatatttattgaacacctactaggtgccaaacagtgttctaaagatagtcccttaaccttagagcttagagattagtggataaggtagatattaaacagagacaaatatgtagtaattaaaatttggtgtgtcaattgaaggagaagaactgggttgtaagagaaaaacagaagtcacatttgtttagcttggaggttcaataaagaagcaccgtatgaagtaccgcagatcaccttaaaagtatagttgtagaagtttgggggaaaattttactttctaatctttctatttttgctttctctttaaggatatcaatttagactcaataatagttgatcatcagaatgattcctttagagcagaaacaattattaaggattgtttatatcttatacatattggtgagtactttattattattaatggaaagagctctggttttctttaaatatggcaataacttggtctacagtctaggtaactgtaatattttatctgctgttaccattttggtttgtcatttttgatcagtttttttcctgtaatttctttacactaataaaagtactagcaagtggcggtgtgacctcacctttcgaagtttaagcaattagatgcaatcaaaatcaataatataaaatacttgttggcccagttgtgtaaaatctctcgtgcctgacacctacaagaagtcttccaaggcccattggtcacatgtcytactgactgtccttcgctaggtggcccattccactggtctgttccttgccagttctgccataggaagtcagtggctgcagcaaagcagcctggactacaaatttgtattgtatcctccagctgtcagtcccttcgtggctaaagaccaactttgtatttttttatcaggacagagaaaaaagtggtagaaaccagggaaccctacactagcatacatattttaaaaaactaaaaattccacagttaaaaatatgaaactcttggttgccaatattgcattggaatgactgaaatcatacaaaattgtaaattccagataaccatatgaacacagtgaaatttacagcagacatttgtaagcgtatttcttgcatcccccacttctggaatataagttccataggggcagaaatgtttctgtcttattaactgttgtgtccataatacctagaaaatacctgtcacacatagacgctcaataaaattttttttcaataactgaatggatagtcaactttggagaacaataagaaaaggtaagctagacccagacctggcctctgttcacatacatacacacacactcacacactggggcttgcgtgcttcaggtgctgcctctccgtagcctgctcctctcttggtttgtaggattcccagtctggaaccatccatgcttggactagcgtgggttacccatttatgggcaattgagtatttgctctttagttaaaagggagaaaaatgaaacaattgaaaatgtatgtatttaaatgatttgattctttattttgattgtgtaaaattgttttggtctttcagaacacgttttgtcttgagggatttgaaatagtacataaaagagccatttaaatgacatatggtgttcaaaaactgtatgaattgaagttctattttaactaaataaatttgtctgtcctagggctaagccatgaggttcaggaagatttttctggtaagctaccaaaaaccaaaaattatgtatgtacgtacatatacacatacctacagagagagagatacgaaaaaattgaaaaattagcatttgttttatttttcatgtctatattttcacattgcaaaacaaagatgtgatgttttctcttttttttttaaacttttaagttctgggatacatgtgcaagatgtgcacgtttgttacataggtaaatgtgtgtcatgggggtttgttgtacagatacaaacaaatacattaatttttaaatatacccctccctctggttttgggttttttcctattttttcttccccttattccttttttgtgtgtgagatggggtctcactctgtcacccaggttggactgcagcagtgtgatcttggttcactgcaacctctgcctctcaggctgaagtgatcctcccgtctcagcctcctgagtagttgagatcacagtacacacaccaccacacctggctaatttttttttgtagagacggggtttcacatgtggccccgactggccccccttattttttttctctctttaacctttcttttttttctccttaaaaaaaaaaaaatctgtctcctttttattcttcattcctcgtatctgccctactcctgacatgcagcttatagaaatatactatgttagacaaatttttctttcatctatatatttaaatgtttaatgttgagagagcatactaaattatgaatgttgctgcatataaacatgcagcgtaggttttacacagctatttaataatagaagactcatcatagaatggtatattcttgttttcaagtactgtcatggtaccttacactggtccaatgtttcctcttttccgtatatcattataggctctgtaaattgtataaatcaggctctttaaagacaaagaccatggttttattttggttaagcttcaaatcagtgctcattgaattgaattcatttgactcatctatctttaaaagttaaattgttactgggtgttgtgttcactataggggrgagcagaacattgtttctgaagaaaaattaaatatgctttaaatctttaaaagcatgttcaattcataaaatttaaatcagcatatgaaagcacatattttattattttacccatatattgtaaacattttaattattcaataaataaaaaggtaatctaaaatatttttatcaaagattcacatgcactttatcaatttactctattgactaggaactcattctcatgaggctcttcttgtgtttagtaggctcagtattagtctactgaatttagtcatcagaatccttcagattctaaggaatgttaacgaaacaaattagaggctgacatgggcggatctcgaggtcaggagatcgagaccatcctggctaacacagtgaaaccccatctctactaaaaataaaaaaaaaaaaattagccgggcgtggtggtgggcgcctgtagtcccagctactcaggaggctgaggcaggagaatggcgtgaacccgggaggcggagcttgcagtgagccaagatcacgccactgccctccagcctgggtgacagagcaagactccgtctcaaaaaaaaaaaaaaaaaaaagaattaaatttgcttttgtgggggcattcgatgctaatttgtacatctcaacctttttttttttttttttgttagctttatgtcaattagttgccatggctatatttgagcttgtttgaaaaccagcaacacatagtagtttggcccttaataaattagtttgaaagaacttaatctgaatctattaataaaataaagcatataaggataaacaattatgattgtgattgaatatgtaagcaaaatcttatttatcccactaataatcagtaccattcatattagatcaggacacttgtactatttgagaaatactggttttaaaataaaatcttgtatttagtatcgatgaacacaaatggaatttatcttcttttcagtgcgggttgttgagagtgtgggaaaaatagagattgttctacaaaaaaaagagartacttcttgggactttcttggccatcccctgaagaatcataattcacttattccaaggaaagatacaggtatgctgtgttcttttgttacgttaatttcacattcatgaaattgttgttagttgtacagttgtaccagagtttggaaggctgctttgaaatgagctgaagggtccttgtatctactgctaggaagtttgaaagggacaatgtgtgttgtcctgcttttttttcccatagaagttaaatttcagactctactatctaatgtttaggcatagcaaagtcattacgtaatgatacctgaatgaagaagcccacttgtgcttagactgttgatcaaccattttctctttcaggtccccttttgtgaaagatacaaaaacaagtttaagtttatgctttgtatgtctgcttgatatttttcctaatgaggaagacatgtttactatttttcttcttaattaaactggtttctcagtttacttcttgtattagtctcttctcacatggctataaagaaatgcctgagactggataatttataaagaaaaaaggttaattggctcacagttccacaggctgtataggaagcatggtcctggcatttgcttggtttctggggaggactcaggaaacttacaatcatagcagaaggtgaatggaaaacaggcacatcttacatggctggagaaggaggaggagagagatgggggaggtgctacacacttttaaacaaccagatcttgtgtgaactctgtcacgagaacaccaccaagagggtggtcctaaaccattcatgaaggatccgcccccatgctccagtcaactccaactaggccctacctccaacactggggattacaattcaacctaagatttggaaggggacacagatccaaaccatatcttttctaaaagatgataccattcatttcttttcatttttaaaaagctttttatctaagtttaacatatatatagaaaagggtgcatattagaagtgctctacttgatgatactttgcaaaatgaacatatcctgtattttctctttggaaattggtagtattygctccttgttctaagtgttttggaatttcacaatgatgtgccagaacatggatgatttttcatccttcatgctgggtatacattttttgtgctaatcttttcaatatggaaacttaatgatcttcagttcttggaaactattattggtttttcttctccccatggtctgttttactttctacatattgaacttccttaactgttcttctaattatcttatcttttctctcttattttcagttttgtccttttgttctactttctgcaagatgtcttcagctgtgtcttctagctcttctattgagttactcatttctactcatatttttaacttctataaatcctttgatttcttttcctttgttttagcatcctattcttattagcttatcttttaaakaatgactggtaatgttttcttctcactgtataacttctgtgtccctcaggtttgttgtttttcatttgttatggtgtctttaatattaaatgctttctttgaatgtttcctaatcttttactatctgctcatatttcagggtgggactgtaaagctaattggaaactgtgcatgtgggtgtggcttgtcaacggttatattcactatatggctggaacatttctttgggaaaagtccaatgccaagagtccctagagtgaacaatctcctaccttgtacccagcatttcagaagccatgtggggaagaaggctgggcctagcttctggtatatctgtaagcgtcacttaattttttctttctttttttttttttcttagaatgttatattagtttgctaggactgcagtaacaaactactacagactgagtgtctttggcagagtcggtctcttctgagacttcttcccttagcttgtagatggcctccttttttcctgtttctttagatggtcttccttctgtgtgtctgtgtcctaatgtcctctttataaaaataccagtcacaatgaattagagccaacttaattaccttttaaatgaagaccccatttccaaatgtcgtcacattctgaagtgttgggggttatgacttcaacatatgtgtttggtgaggggacacaattcagtctatagcatagacccaatccaaagaccccttgtttaccctctagagtgcaaacttcttatattttgctcatgtggggaagtgtcagtcatgtggctgtgctaagtaggggaggacttcaaggggatgggaagacctatccaagcttcttaaatgaacttgtattgagaaagtaattttaattctaccttgactctgatgccagaggtacttggtcctgccagtttctgggccttaaaggaattttgtattataagcatgttggttcttggctttctacacttctggcttagcattcatctgtcttgggtctgttgagtcatttaccagtcttctctctgccttgtcagctcctaaagttttgttgcttttgtctctgatttccgttcttcctgtctgtgtgggcttatgccttaaaaatcaaacacacatacaaaaaccctctttgttgttattttaggggattcagaaggaactaactgcatgtattcagtttatcttctttaaatatgtaaaattatcatatataatttattgcatgagataggaaaaaacaaactttttcctagtcttaccgctccactcagaacactaaaatgtgagatttcttctcaccaacaaccaattctacagcaaactgtctatcctacaatttaactcaagtctgatacatcctggagtttagggcagaccccacaggttaagggcttagtcccacaagactgccccctacttcacatgccagttgcaaattccaggttgtgatctatcttctgaccagctacctataaatcagtgttatcacagcctccttcttgggttcaaaaatttgctaggatggctcacaaaactcagggatacatttaagtttatcattttactataaaggatattacaaaggatacagataaatagctggatggaaggaatacatagggaaaatatgtgaaaaggggcacagagcttccatgacctcagtgattgcatcaccctccaaacattttcatgtgttcagctttccacaagctcttcaaaccatgtcgttttgggtttttatgggggctttattacgtaggtgtgattgattatgtcagtgaccattggtgagcagctcaactttcagcctgtcctgtcctcagaggtctaggaaggggcctgctggttccaatcctttaatcacatggttggtttcccaggcagacaggtcccatcttgaggctatccaggagcccaccaggattctccccattagaacaaaagatgctcctatcacccaggaaatttcagggatttaggaattctgtttaagacacttgtagtacttaggagattacagaaagttttaggagctcaatgtcaggaaccagggttaaagaccaaatattagaatagaagattcttttagtgtctttttacaaggattttaggagttctatgtcaggaaccagggacacagaccaataagtatttctttttaattcacaattacgaaaatatatttgtagataattttcagaaaagtatgaggcagccttattttgagtacaccttgtgtgtaggagactgtttcaggcactggaatgaaacagagtatgggaaatttagtttcccaggtggaagatagaaaataagcaaacatgaaattgaagaatacttttataaggaaacaggccgacaaggacaagttatacagtacaaactaaacatgttttgtggtggccccaagtgaatagacacagatgaatttggtcttgaatgactgcctcaaggaagtgaatttgaagcagtattttcaaagtgaggtccatggctttcagaaaaaaaaaacaaaacaaaaactatatgggactttccaggtggagctacagatcattactggttgcatattgtgccaagcattttgctgggtgtagagagagaaaaatgtaagtggcatatataggaaagttcaaatgggttaattttaccagagcargaagtctgaattttttggtcatagagaaatgatagtgtgatatagcagatcagaaaacaatagaaaagggacaatggaaatgaaaaggtatttttagagtgaagtctctttccctgaaattatctgacttatctagtgactgaaaaatcatagcaaactaggtaaaagccaagtccaagaaataaatgatactgagaacctgggctgacctccatttggaaatactagttagaacgacatcattcagatattctctgtaatttcttgaggctttccatgaattcttttatttctgctgtaaatttttccttgaatcctgaaacaccattaaaaaagaaaggtttagctttcttgtttgaaatgggagctataatgtgtttttcagtgaaggtkttccactttggaaaatgacttggagtttaggagatatttttgtttatttcactgcattagcaaagataatttcatctttctcttttctcctccttaactcatgacaaaaactaggttattttattcactagcaaagccgaatgcttacatcagcaaagtattataattaacttgctttgagtagccttaaagatttacagccaattatgtggttcctagattttcaatatgtattgctgtaattattgactttatgataatagtatgctggctccatcttactagtttcttagctaaaagaacttgtttgaaaacaagtgtataagttgaaaaacttttaatataatgttttcacatgtcaaatctagaatatacttacctgaaggattcatatatcagaaagaacatcaatcagagaagagaaactttcattttttaccttccatccaaatgtagtaggtcagtattttaaattgtatgaattgaaccaatatgatttataagtgtgatgcttccaattaatttttttcttcccggaaatgaagattatgagtgagtagctctggggggtgtgtgggagaaagaggcagggggagagaaagctatagagaaagagatggctgaggaacttctctattagggttcagaaatcaatagataattgaattgctatttctatacccaaggtaacattagcattttatcttaattgatactgtctttaatatggagtcttggatcaccaaacaaaggtaattttaaagatatgccaacaaataacccagtcaattagtcttaggaaacaagatttaaaaaaaaaattgtctcacaattttgatatgttaacagccacttacaggcacatgttggagatgttgtgggttgggttccagaccaccacaatagagtatcacaataaagcaagtcacacaatttttttggtttcccagtgcatgtaaaattatatttacattatactttagtctgttaagtatgcaatagcattatgtcttaaaaacaacttatacattttaatttaaaaaacagtatattactaaaaaatgctaacaatcatctgagtcttcagtgaatcataatctttttgctggtggagagtcttgcctcgatgctgatgattggtgactgattagggtggtggttgctaaagcttggggtagctgtggcaatttcttaagaaaaaatgaagtttgcccacatcgattgaccctttctttcacaaaagatttttctgatagcattttattcacagtagaactgctttcaaaattgaagtcagtcctctcaaactctgttgctgttttatcaattaagtttatgtatcattctaaattctctgttgtcatttcagcaacatttcacagcatctttgccaggagtagattccatctcaagaacctacattttttactcatccctaagaaacaactgctcatctgttccaagttttatcatgagattgcagcaattcagtcaaatcttcaggctccacttctaattctagttctcttgctgtatttccaccacatctgcagttacttcctccactgaagtcttgaacccttcaaagccatctgtgagaactggaatcaccttccaaattcctattaatgttgctattttgactgcctcccataaatctcaaatgttcttaatggcatctagaatggtgaaacttctatatttgaagcccgctgttgagacttactatgtgaaaaaaaaaaaaagattcctttcaaattgttatcattcattgacagtcacccaaaaactctgatggagatatctgtcatgaagatggcttctttccttaaacctcttaaaccaacttctagcttccaacttttcttttgtagcttcctcacctctctcagccctcctagaattgagaagaggtaggaccttgctctggatcaggtttttggcttaagagagtattctggctggtttcatctatccagaccactcagactttctgcatatcagcaataagcctatttcgctttcttatcagatcattcatatgctcactgaagtaggacttttaatttccttcaagagcttttccattgcatccacaacttggctatagtgattggctactaataattactaatcatgttctcaaacttttaaaacaaggcctactgagttgggacaagaaacgctaatagcgtcttactccatcccacatcttttccagctgccctgagatgttggacaagctttttaacttctataagcttctgtttccagcagggaaaataagagtaactaagtgcttcaaaagtgcaagaaggagaagccagttgaaggcagtgtggactcctagtgcagtcttctctttctcttctatctcccattgaagactttacctgtgttttctgttttggccttgtgaaattctattttttaaaagggaaaatacagtttctttttaacattaagaraaaagtatgcccaaatagtcttattatcctcagtatttcacccttaccctgagtatctcaatattaattgtatgtatttaattcaaataagttaggtatttggggcagtaatgtttctgtcttatgtttttgttttactgtctttattttcagtttctcattttttagcataattacctgtgcttagaaagccaaaaagtggacagttagataatggcattgtgcaggctgaagtagtcagtgccatctgctttatacttcttttttgtttatatatatatatattttttttttattatactttaagttctagggtacatgtgtacaatgtgcaggtttgttacatatgtatacttgtgccatgttggtgtgctgcacccattaacttgtcatttacattaggtatatctcctaatgctatccctcccccctcccctcaccccacaacaggccctagtgtgtgatgttccccttcctgtgtccaagtgttctcattgttcagttcccacctatgagtgagaacatgcggtgtttagttttttgtccttgtgatagtttgctgagaatgatggtatacttcttttttcttatcttatatactgcagttcccatctgtctgtgctttctccttgatgcaattgaaagatgaaaactttcttaaatctttcttaaaatccttggaacctatagttaggctgttcttttgaaattatagtcaggcttctatgggtagaacattgaaattatctcagtagtgttaaataacaagaatgctgtgtcaactctctaacaaggaaagtcagtaaatcactgtaacccaggatttccttgtgttttaaatatcattggagagttgcatagttactatagcaaacttttctagsaaatgctagagtagaaattgtcaatccaraaggtgagcattttcatacagctgtaaagttatcaagatgatatgcactagattttattagaagaaaacaacactgtggtccttagacctgtgcaagagggtcacctgccctgggttccacacttggagagccccacgtgactgtctccagccacacccctcccacaaggtgaggagtattgcaaggccacgaagtatccacctggagctcatcctctttctttcaacttcaccctctgtatctagaaccatgattccctgcccaaatgaccccaaatctacttctatccaaggagtggccagggctgtttatgtgaaaagctagtgcatgagcttgagcctttacgttaatgtatccacacccatttaagaccctactcattgtcagacagagccaaggatgagaagacaagggggacaggcagtaagagtgcaggtctcattcctctgccatctcactgatacactgaggagtttaagaatcccgaatttgaacctagccttctaggaccttgtaaaggtatatattccaagatgtagcatagaacatactttgacagttatttgcgtgatttataacgttaaatatttatacatatatagtatgtgggtctctagttgtattcttactgtaggttccagaaagggtctggagaaagaaataaagagatcatttgcaccttcatttctccttgtgcatgggcctatgtcctttgaccctttggttagtccagtgcttgttaggccttccgggataactttagggtgggctcttagccgtaatctggtccaagcctgtgccctggcactagagtgaggtgacctctagtgatactccaaggtctttgcataaagcgatatagtctaagcttatatacttactgctaccatgataggtggaaaattgagtgactgatctgttgggagcaaaagggagaagggaagttggattcatttgtgactaaaatgatttcttaggattataggtgaatttcagttttctactaagcattgattattagctgttggcccttcactttctaagatctggagaaaatatttctgcacctacttgaatatttttagcttaaaaaaaagagaatagagtaagaaatatattatcagggtttattcatttacatctctgtaaatactattttatgagagaggaaataaaaagttaatatcttcacgttattctgatatgctgtttatgttcaaagataatttacaagtgaaaatcttaattctttcagaaattctgtaataaattcttctaatccaaatggtattatttgctctgtatacaaacaatattttctgagcttgggatatttcaaatttctctagtatttataaaaatatttgattccttttatctatttgtatgttagtaccataatcctattcctaccatcttcagcttttcacttgaattaattttcagataccaaaacctacacctttaagcataaatgtttttgttttaatcatttttgacagttaaaatrttctctaatcatgtatataaaatacatacacacaaacatagagacacaagaatgtctatctttcttgcctttgtcaaagagatattctaaaattgcttactagtgctactgttgttaagccttaaaggcttgagtttcaggacttttccatggtgtaagaaaagattttagaatgtaccgtggckcatgcctataatctcaacactttgggaagccaagatggatggattgcttgagtccaggagttcgacatcagcctgggcaacatagtgaaacccaatctctttaaaaaaaaattaaaaaaaaaaaaaagactttagaatgtaagtttcttcattatcaaataaaattaggttattttttataacataatggtttaacatgctataataacagatatgaggaaataacactcattaagttcatttttcaagttatagaagtatttacaggtcttggtcaacacatatctcaggaaataaaatggaaaaattaaccttaaaatattgattaattttttaaatgtataggcattttagtgaaattgaagctttctagaaaacagaagctgagtatatgctttctcttagtggtttagtattacttcttattactttatgtatcaataagagaaaatgaatcactttttaggtttgtactacagaaagtgccagttaatttccaaggaagatgttactcatgatacgaggcttttctgtttgatgctgccaccaagcactcatcttcaagtgcccattgggcaacatgtttacctcaagctacctattacaggtaaggtgaatagaggctttgggacacaatttattcttttataagcagttcaaaatcagtactattctctctagaaaacaaccatttaagttattaataaatgtttccaggcagctagatttagtgatagtcagaatgtaggtttgtgactgcaacgtgtcctacatgttggaactatagctgtaccacattatcatatggaacaaagatattgccagtagtttagacagatgattccaccagcattgtaatttattactaacaaaaccctaaaggaaagagatgagagactgcacaaatagtcctccatgaagacaactactagaagctcatactggtgtctcttagcagctacttagggttgtatcatttatgaagttgaatctataaaatttaaaataagtgaatgattggaaatgattttattatatgtgctaccagtataagaagctctataaatgtataaatatgaattcttttttctttcattttcatcctaaatttacctcacttgttttgaatacccttcttattgacgtccaacattttcttggccttttgaagctgcaaacggtaaaattctcctgtcagctgtagtgtttctggcagtcgtctaaaatgttaccacctaggtctcagaagatatgatatattatgatgaggcactgttaaggttttctgtttttcatcactaatggctggttttctctttttcatcactaatgcctggttacctaattcaagagctggtatcttctccagttattgccaatgcattttaatttatatatgtattttgtatacattgaggagccatgcgtaaaatttttggtctttcaaacatgcaatgattcttctctttggaatttggctacctaaaataaaatgagttcttatttattttactctttaagaaaataatatattcttagaagtagctggattaacattctttttattcagttaccaaagtaatatgtaatatgttaaaatattaaaacaatttaaagtacataaagtaaaaagtgaaatttcttcctttttctccgccaaatgatcccattggtcatcagtaacatttttaaaaatttggtgtataattaaaattattaggtaaatagtttttttttacatctccatggtaacttttgatgccgtttttgttgtagcccattacaaagtttatttgctgatggaatagatggttgtctaaaattattaccatatatttctattaaattagactatacatcataaaaacagattgtttatattatgggtacagtattgatttgtgaaaattgtttcggcacacataggcttggggtatatatactatatacatatagaaaaataattagaattatatgcccattaggtatatagttttaaatatatactgatagtgtcaaaatttggatgtttcattttcattgagatttttggatttttagaatttaattattttgctgtgatttttttttctaggtacagaaatagtaaagccatatacacctgtatctggttccttactctcagagttcaaggaaccagttcttcccaacaataaatacatctactttttgataaaaatctatcccactggactcttcacaccagagcttgatcgtcttcagattggttagtatttttacattttttaaacctcatttgtgctctagattggatcacattgtcctctagttatctccatgtaggagtctatcagatatctttaactcaacatgtctacaaccaaagttatcttctccttgtcctacacagcgtggccatgctccatattccttatttttattatttgcagcatcactgttcatccttgatccaatctggaaactcgagtcggccttgattcttcccactttctctttcccagtccagtcagccgctaagttctgttgagtctacatctcagtgactttttcagctacctcttctgccactgtcttayagtaagccttcatcatatcttcattggcttctgtttccttacaattgaccctactgcttcgcagctttgaaacctctgatgggtccccattatctgtactgcatgacctacaaagactttgataatctctccagcttcatatcttgctatacaaaaatacttgtgctactcagagttccacagatttgtcatcctcattcacaggtacatgcagttgccacacccaagatgcccatcaaccttttctttacctgtcaagtacttttttaaaaagacccaaacatgggctgggtgcggtggctcacgcctgtaatcccagcactttgggaggctgaggtgggcagatctcttgaggtcggaagttcgagaccagcctggccaacatggggaaactctgtttctactaaaaatacaaaaattagccgggtatgatggcgggcgcctgtaatcccagctacttgggaggctgaggcaggagaatcgcttaaacccgggaggcggaggtttcagtgagccgagatcgtgccactgtactctagcctgggcaacagagcgagactctgtctcaaaaaaaaataataaaaaataaaaataaataaaaagacccaaacagaatatcactttatggagccctcctcttcccctgaaaccctcaataactaacatttgttcatagctcttttataagaataaatatatttcttcattacaagactttgagtttaagagcagaaattgtcttacttatctttgtatttccaccacctggcatggcagttggtacataataggctgtcagtaaatgtgctttgtttttttgtttgtttgttttatttttgagatggtctgctgcccaggctggagtgcagtggctcgatctcagctcactgcaacctctgcctcctgggttcaagtgattcttctgcctcagcctcccaagtagctgggattacaggcacacaccaccatgctggctaatatttgtatttttaatagagatgaggtttcactatgttggccaagctggtctcgaactcctaaccttagatgattggcccgccttggcctcccaaagtgctgggatcacaggtgtgagccactgtgcccagccagtaaaggtactttgaaggaatgaataaagaactataatgagatctattaagatttaaaaacttctcttgcttctgctcccttttggtgtcacctcctttttctatattttcttttcactttttacctaatagcaaaagtgttcctctttccaaggcagcattagcaatacattgggataccagtgaagtggattactaaaatttggaaataaacaaaattacattactttctgaaatgtagtagatatgattctgctaattatgtctacttcacataatagatatgattagtcatccttggttacgtaaaccaaaatattgtatatgaatttgaacctgaagtattttggagtacctacaaatctaatgaaggtgattatcaccttgtgagagaaggactgacgcatgattgtaataaagtaagtggaaacttaaggaatggtattatagcctatttacggagatttttgcgaacatagcagggtggagagttgtcctagagcatggaaagggaaagctcaaagaacaagatgaagtattatttcaacttcatttagggaggcttgacatggcacaaatatttgtgtcacttagagagttgtacactaaatgaatgaacccatacaattattcatctctttgtttcaatcccgtgttcactaagcaacatgattttacatgattaatttggctttccatgtgttctgatactggaaacaagatatcctcaatgggacatgtaatgttcaggtcactagatacatgtaaccccagctgtaagtcakttgccattctggcatgtgtgctttaatctcttctgaatttgattagcatcagttatcctatgtgagtctaatcaattttgttaacattggaaagactgggctgtgggtaaaagttaccaagttaatactctcctctgaggcttctttagtaaacaactatctggctttcctaaagacactctaatcttatggtctttttcaaactataatgaggagcttctattattattatttttttttttttgagatggagttttgctcttgttgcccaggctggagtgcagtggcatcgcaatctcggctcactgcaacctccgcctctcgggttcaagcgattctcctgcctcagcctcccaagtagatgggattacaggcatgtgccaccatgcctggctaattttttgtatttttagtagagacggggtttctccatgttcgtcaggctggtcttgaactcccgacctcaggtgatccacctgccttggcctcccgaagtgctgggattacaggtgtgagccaccacgcccagccctattttcaaatacttatttcatcaactactgcaagattcttactatcctgcaatggaaaacaggaaaaattatgagcatccaagcattttaaaatagagtattttaaatcatttaaaaattatagcagctttatttttcctttttaagattacatttcaagtttctgaatctagtcctaaaggtaattttctcatatgaatggtacatggtgattatatcaactgggctgtagaaaatgggcactgatttctcaactgtgttgattctagattggtaagtgrcatgctccaagtatagttgactgcatttctgatcttgctttgtttttatgggaattaaactcagaatagcccttcttaataggtcttttcaaaaatttggtagaagagaagttggtgtgttaatcaacataagatwttagaatgcatttctatttcaattttctctcctactaatcctgttactgtggttaataatcaatgtgtaaatagtgaatatctgttctttactctgtaccaggtaagacaaatatatatggactctgcttttgaagtacttagaatttagtttagcaatcaatcctttattgataatttgtggataagtactttgcagtagtttgtaaatttcagacttcagatggtttggcaaaatagtggtgggaaattatatcataaaacctcattattaatttgactgtaatgatataattcagacatacttaggggcctaatgagtatccttaagactacttacatatcttaaagactgataaatagtctgcaagttaagtatttatactgttactcctcagtgttttaaattcagctagttttggcttcttagtttccccgctgggttttttgttttgttttttgttttttttttttctgatttagcttatgtttcattgtttaggagattttgtttctgtaagcagtcctgagggcaattttaaaatatccaagttccaagaattagaagatctctttttgttggcagctggaacaggcttcacaccaatggttaaaatactgaattatgctttgactgatatacccagtctcaggtatgtaattttgtctctaattacgatcctttttgaggctgttatattagtataaggtattctaaattgattactcactggaccttaatagacatgttaccatttcctcattcatcatttcttactttgcctcctctaatcctagctattttattaactaggttcttttatctcatttcagtttttgatgatttttagttacctactgggcactaaaacattcacactggttcactttagactttccatttgtgcatattttaaatgtaattaattagttatttctgagtttttttttttctcttaaggaaagtgaagctgatgttcttcaataaaacagaagatgatataatttggagaagccaattggagaaattagcatttaaagataaaaggtattaaactgatattagctctgcgtttagttatttatacctgkgtagtaagtctatgccttatcttctctggttgaagctttgattgtccaggaagctccttcaaagaaaaaaaataaaccaataattctctaactagaaatcatgttaaatgttccccttccctcaaagaaacactgtctggcaagatctaggcaaccttatatatgtgtcactaagatgcatattgggctttatgatcatgttatgtgatttatactgagttgggtttcactgaaaatgttccaatgtagccagtttggtaatgcaagatttttcctgttatactggggctgataaaataagcatttggtgagaatggattaagcaaaattaaacatgatatgggatttctaaagcctttaatatgttagtatcctttgtgactttccaagagaggaattttttatgcattgcttagcaaaattccttttatgtttgtttgtttgcattaacacttcttcgctctwtcactagtgatccttggtacacactttgggaagtgctggtacagataatagaaaaaagttctagtcaagctgaactcagtagtggaatgggacagaaaggataacaaaagtgaaaacttattttattgattaaagagctcagcccagtaaactaaaataagaagataatttaactgaatatatgctccatttcccctaaaaagatttgaaagcagtaggaagttcagaacaatcttttcacaaaaagtgaattcaataagttatcatactttctaaagcatttctataatcattaaaagctatttctaagaattttagggctttataaattacacaaaagatctgaagtaaatatgtatgtatatgaaaggatggtatacataaaattctaggccttttaaaagagtaaagcccttagaactttgttagctgtccaggggctcgaggttcttctgaatattttctgaatgtccataataagaaaatgctgtggtcttttcccatttttccctccctgctgtctcccatcatcctccactttgtcttttaataaatgactttcaaaattaaggatgacacctgaatttatttatccttgaagtatttactattctttacatactaaaaacatagacctaagaacatttattataagtagttgtgtggcattttagagaattatttaaagaagttcaagttcttagtttttcaagtattttttaacacattttcaaagkggaaaattggaagcgtttatcaagaagcctaaagacctaaattccagttgccattctgctcctcaccagcatgaaactttattcacaaattacttacctctgggggcctctttatcttcaaaagaaaataatgctgtcttttctacttcataaagtattgtgagctttggagaagataacgtaaatgctttggaacctgtgaagccctccctcagacatttgaattgtggttatagaggacccctatgtacatgtttgttttctgtcttcaccgttagagcttctgtttttgtaagtaaatgtttaaaagaatttaaactggtcgattcctgggcaagatagccaaataggaacagctccggtctgcagctcccagcgagaccaacacggaaggccggtgatttctgcatttccaactgagatacctggttcatctcattgggactgattatacagtgggtgcagtccatggagggcgagcagaagcatggtggggtgttgtctcacccgggaagctcaagtggttggcactagccaagggaagccatgagggactgtgccatgagtgactgtgctatccagcccagatactacgctttttccacagtctttgcaacctgcagaccaggagattcccttgggtgcctacaccaccagggccctgggtttcaagcacaaacttgggtggccatttgggcagacaccaagctagctgcaggagtttttttttgtaccccagtggcgcctggaacaccagagagacagaaccaytcactcccctggaaagggggctgaagccagggagccaggtggtcttgctcagcggatcccaccccaacggagcccagcaagctaaaatccactggcttgaaattctcgctgcaagcacagcagtttgaagttgatgggggacacttgagcctggtggggggaggggcgtccaccattactgaggcttgagtaggtggttttccactcacagtgtaaaaaaagccactgggaagttcggactaagcagagcccaccacagcaccgaaaagccatgatagccagactgcctctctagattcctcctctctgcagggcacctctgaaagaaaggcagcagccccaatcagaggcttatagataaaattcccatctccctgggacagagtgcctgggggaaggggcagctatgggcacagcttcagcagacttaaatattcctgcttgctggctctgaagagagcagtggatctcccagcacagtgctcgagctctgctaagtgaccgactgcctcctcaagtgggtccctgacacctgagcctcctgacggggagacaccccccagcaggggtcaacagacacctcatacaggagagctctggctggcatttggtgggtgccctctgggatgaagcttccagaggaaggaacaggcagcaatctttgctgttctgcagcctctgctggtgatacccaggaaaacagggtctagagtggactcccggcaaactccagcagacttgcagcagaggggcctgactgttataaggtaaactaacaaacagaaagcaatagcatcaacatcaaaaaaaaaaggatgaccaagcaaacactccatccaaaggtcaccaacagcaaagaccaaaggtagataaatccacgaagttgaggaaaaacctatgcaaaaaggctgaaaatgccaacaaccagaatgcctcttctcctccaaaggatcacaactcctcactagcaagggaacataactggatggataatgaatttgacaaattgacagaastaggcttcagaaggtgggtaataacaaattcctgaaggagcatgttctaacccagtgcaaggaagctaagaaccttgacagaaggctagaggagtatctaactagaataaccagtttggagaagaacataaaagacctgatggaactgaaaaacagcacgagaacatcatgaagcatacacaagtatccatagccaaatcgatcaagcggaagaaaggatatcagagattgaagaccaactcaatgaaataaagtgagaagacaagattagagaaaaaagaatgaaaaggaatgaacaaagcctccaagaaatatgggactacatttggtgtacctgaaagtgacagagagaatggaaccaagttggaaaatacacttccggatactatccaagagaacttccccaacctagcaacacaggccaacattcaacttcaggaaatacagagaacaccacaaagatacttcttgagaagagcaaccccaggacataatcgtcagattcaccaaggttgaaatgaaggaaaaaaatgttaagggcagccagagaggaaggtcaggttacccacaaagggaagcccatcagactaacaggggatctctctgcagaaaccctacaaaccagaagagattgggggccaatattctacattcttaaagaaaagagtttttaatccagaatttcatatccagccaaattaagcttcataagcaaaggagaaataaaatcctttaaagacaagcaaatgctgagggatttcgtcaccaccaggcctgccttacaagagttcctgaaggaagtactaaatatgaaaaagaaaaactggtaccagccactgcagaaacatagcagaatgtaaagaccattgaaactatgaagaaaatgcatcaactaataggcaaaataaccagctagcatcataatgacaggatcaaattcacacataactatattaaccttaaatgtaaacgggctaaatgccccagtgaaaaggtacagtctggcaaattggataaagagtcaagacccatcagtgtgccgtgttcaggagacccatctcatgtacaaagacacacataggctcaaaataaagagatggaggaagatttaccaagccaatggaaagcaaaaaaaaaagcaggagttgcaatcctagtttccgataaaacagactttaaaccaacaaagatcaaaaaagacaagggcattacataatgctaaagggattaacaagaagagctaactgtcctaaatatatatgcacccaatacaggagcacccagattcataaagcaagttcttagagacctacgaagagacactttcacacaataatagtgggagactttaacaccctactgtcaatattagartcaatgagacagaaaattaataaggatattcaggacttgaactcagctctgcaccaagcagacctaatagacatctatggaactcttcaccccaaatcaacaggatatacattcttcacagcaccacatagcacttattctaaaatcgaccacataattggaagtaaaacactcctcagcaaatgcaaaggaacagaaatcataacggtctcccagaccacagtgcaatcaaattagaactcaggattaagaaactcactcaaaaccgcacaactacgtggaaactgaacaacctgctcttgaatgactactgcagaaataacgaaattaaggcagaaataaataagttctttgaaaccaatgagaacaaagacacaacgtaccagaatctctgggacacagctaaagcagtgtatagagggaaatttatatcacaaaatgcctacaggagaaagcgggaaagatctaaaatcgacaccctaacatcacaatgagaagaactagagaagcaacagcaaacaaattcaaaagctagcagaagacaagaaataactaagatcagagaaaaatgtaaggagatagagacatgaaaaacccttcaaaaaatcaatgactccaggagctggtattttgaaaagaataacagaatggatagaccgctagtcagactaataaagaagaaaagagagaagaatcaaatagatacaataaaaaatgataaaggggagatcaccactgatcccacagaaatacagactaccatcagataatactataaacaactccacacaaataaagtagaagatctagaagaagtggataaattcctggacacatacaccctcccaagactaaaccaggaagaagctgaatccttgaatagacccagtaacaagttstgaaactgaggtagtaattaatagcctaccaaacaaaaaaagctcaggaccagatggatttacagctgaattctaccagagatacaaagaggagctggtaccattccttctgaaactattccaaacagtagaaaaagagggaatcctccctaactcattttatgaggccagcatcattctgataccaaaacctggcagagatgcaacaaaaaaagaaaatttcaggccaatatccctgatgaacatcgatgcaaaaatcctcaataaaatacttgcaaactgaatccagcagcacattaaaaagcttttccaccacgatcaagtgggctttatccctgggatgcaaggctgattcaacatacacaaatcaataaacgtattgcatcacataaacagaactgatgacaaaaaccacgtgatgatctcaatagatgcagaaaaggccttcaataaaattcaacaccccttcatgctaaaaacactcaaactaggtattgatggaacatatcttaaagtaataagagcagtttatgacaaacccacatctgatatcatgctgaatgggcaaaagctggaagcattccctttgaaaactggcacaagacaaggatatcccctctcaccactcctattcaacatagtattgcaagttctggccagggcagtcaggtaagggaaagaaagaaagggtattcagataggaaaagaggaagtcaaattatctctgtttccagatgacatgattgtatatttagaaagccccatcatctcagcccaaaaactctttaagctgataagcaacttcagcaaagtctcaggatacaaaatcaatgtgcaaaagtcacaagcattcctatacaccaataatagagagcgaaatcatgagtgaactcccattcacaaatgctacaaagagaataaaatacctaggaatccaacttacaagagatgtgaaggacgtcttcaaggagaactgcaaaccactactccaggaaataggacacaaacaaatggaaaaacattccatgctgatggataggaagaatcaatatgaaaatggccatactgcccaaagtaatttatagatttaatgccatccccatcaagctaccattgactttcttcacagaattagaaaaaaactattttaaatttcatatggaaccaaaaaagagctcgtatagccaagacaatcctaagcaaaaagaacaaagctggaggcatcacgctacctgacttcaaactatactgcaaggccacagtaaccaaaacggcatggtactggtaccaaaacagatatatagactagtggaacagaatacaggtctcagaaataatgccacacatttacaaccatctgatcttccacaaacctgacaaaaacaagcaatagggaaaggattccctatttaataaatggtgttgggaaaagtcactagccatatgcacaaaactaaaactggacccttccttacaccttatgcaaaaattaagatggactaaagatttaaacataaaatctaaaaccataaaaaccctagaagaaaacttaggcagtaccattcaggacacaggcatgggcaaagacttcatgactaaaactccaaaagcaattgcaacaaaagctaaaattgacaaatgggctctaattaagagcttctgtatagcaaaataaattatcgtcagagtgaacaggcaacctacagaatgggagaaaatgtttgcaatctatccatctgacaaagggctaatatccagaatctacaaggagcttaaacaaatttacaaggaaaaaaatcccatcagaaagtgtgggcaaaggatatcaacagacactttccaatagaagacatttatgcagccaacaaacatactggtcattagagaaatgcaagtcaaaaccacaatgagwtaccatctcacatcattaggatggcgatcatttaaaaagtcaggaaacaacatgctggagagggtgtggagaaataggaacacttttacactgttggcaggagtgcaaattagttcaacccttgtggaagacagtgtggtgatttcttaaggatttagaaccagaaataccatttgacccagcaatcccattactgggtatatacccaaagcatgataaatcattctactgtaaagatacatgcacatgtatgtttattgcagcactattcacaatagcaaagacttggaaccaacctaaatgtccatcaatgatagactggataaagaaaatgtggcacattacaccatggaatactatgcagccataaaaaaggatgagttcatgtcctttgcagggacacggatgaagctggaaaccatcattctcagcaaactaacacagaaacaaaaccaaataccgcatgttcttactcataagtgggagttgaacaatgagaacatatgggcacaggaaggggaacatcacacaacagggcctgtcacagggtgggggccaaagggagggatagaattaggagaaatacctaatgtagatgacaggttgatgggtgcagcaaaccaccatgcacatgtatacctatgtaacctgcacgttctacacatgtatcccagaacttaaagtataataatttttttaaaaagtaaacagacataggtaggcttaagattgttttttagaaaagtatttctgatggttttttggctaaggtattcttttagatagttaccttataaaagcaattttgtaaaattttatttttttaggaatagacattgtacttttgacttcaacttgatttataaattaattgttaaggaaagtgttgacagtctctgaacataaagtatcttttaatagagtcaactgtgttttttctttcgttttgatctacataatttgggttggtgaggttgcataggctggagttttgaggatgaggaaaggcccctttttttttcatgtctggatgcctggctctaacagcactcatcaggtgagtggtactctccagcttgctgacggaagtgatagtgttccaacctctggcctgcctttatcctccctctgctgttccttctctttctcttcttgctctcccttgctggcttgggtgtgctctttctctctcctccctaacctctttctggagactttgttgtccttgcttgaggcactgactcctagtattgtgtaatttatgatccccatagactcctggcgttttgggctttttttttttttttttagtgaggtcaggtcaagccctagctagaaaacaaaatgaccatgcctgtgtatatggctttggaagatttagcaggaattttaccatattctgaggcttgatgtaaaacataggagaaccctggccttaaaggcttattgattgcatttgctagtactattcagccaaaacataattattgtgtcccatacaaaaaaggaaagtaaaagttaagatttaagttgagatgattttaattagtcacagttgtattttagttagcatttaaggatcttcattttctaatatagtaaatcatcactctttaccatatcttgacyctctctatatcactttcagttttagtagtaaagttcctgatgccaaaatatgttactggaacacatttctgtggttaaattattattgaattgtaaatattaaaaaacaaattttgtagttaagagaaataccctactgtctatataattaggtcccagtcttctactccatcctttgtggaacaaggagagggataggaattatggattctgaggctgacatatgatcgaatattttcagcaagtgtgctatgcttgtccgcagagtttatctagagaatatcattagcaaatggaattcttcaaaataaaattgtataatggaaagttattaatctcttggccttgggcaaattactttatctggctgagcttcagtttttccatctataaaacaaacattaatacctacaccacagaatcatttggacatgggaatcaatgagttagcatatgtaggttcctagcccagaattagtatgtttgtagcagacattcattcattcattcgtaaaatatgtgtaacatctattatgtacctgtacacatggatccaacagtgacacgatattgtgtttacttattttctcatgcagcccaaggaatgaatctcttcattttccctaattactgccctcaggagaattgcaaaaatatagatacttcatgaataatttttagaatactactctttctatttcaatctgattttcatgtcattaagtatgaaatctgaacagaaaaaaaaatgtgtacccaaattttatccaaatgtgttattaaacttgactgttctagcaattgggattcaattcaccacattccaagtctagcaaaatcttatcctttttttcttacgaaaaatgagacaaaacataaggcaaatatgtgcagtagtggatttaactaattatgtaaactgaaatccaaactaaattccacttatccttctcccaaatatgtgatcagtgtatgaggctcagttcattcagtacacattggcccacctgctcccatcagcagaatgccctagctctgtgatgtctctgcttttgtagaatgagttttgtggggtgggacaggtggtacagtttgacaatgaggttgacttctagaaaacattttgtggtatataaatataacaggtattttccttttgtttcaaatgagtcgttcttggagaccattaatcttattttagtaaaggtagtggtacatttttttataaacagcatttgttgattttcccttctttttataaaattaatacatgtttatatagaaaaggtataagaaaaaaatcacccataatcctaccacccaaagaacaattattaacattatggtctgtatctttctattcatatgcatacctacctttttgttttgtatatttaaaataatgtagtcatactaactataatttttataactacatttctactcattgtattgtgtgttttttacataaagaatattttcaacaggtggttttcaaccttaagcaactctgccaccccagaaacatttattatcacaactaggggaagacgtgttacacctagtcagtagaggccaggattgctacaaaatatcttacaattcacaggagagcccccctacaacaaagaattatccagcccaaaatgccagttgtgccagttagtaaatcctgcagtataccatgatttttaataactgcattgtgttcagtcatgtgagcataccataatttagttaaccaattctctgttatttgacatagtgactagaaattgttcaatacctctctaactattcaggataaagaagaattattaggtcaaactgttttaaggctcttgatacctatactttaagttctgggatacatgtgcagaacatacaggtttgttacataggtatacgtgtaccatggtggtttgcagcacccatcaacccattatctacattaggtatttctcctaattcatccctcccctgcccctccaccgcccaacaggcctcagtgtggaacgttcccctccctgtgtccatgtgttcttattgttcaactcccacttatgagtgagaacatgcagtgtttggttttctgtttctgtgttagtttgctgagaatgatggtttccagcttcatccatgtccctgcaaaggacatgaactcatccttttttatggctgcatagtattccctggtgtaatgtgccacattttctttatccagtctaacattgatggacatttaggttggttccaagtctttgctattgtgaatagtgctgcaataaacatacatgtgcatgtgtctttatagtagaatgacttataatcctttgagtatatacccagtaatgggattgctgggtcaaatggtctttctggttctagatccttgaggaatcgccacactgttttctacgatggttgaactaatttgcactcctgccaacagtgtaaaagtgttcctgtttctccacgtcctctccagcatctgttacattttgacaaatgcctctgacaatgaaaacacttagcagagaatactatacccagcctacattgtcattgttgatgacattaacactgacagtgtcattaacagtgatgttgttagtgtcattatttttacactagagtggattgggaggttagttggggcaaaagagagaggggaaataaagggattctaagcagcatggaaatgggtcacaaaggaaacgggactatttacccacttatatgcaccaatagaagatagaagacaatttacatcactttaaagatttgtgtgctcactccctgcaaaatgtgcttgacattacaaaaagataagaaatcagtaagactaccctagtggtggtgaagttctaaagtacataagtgactgtaaagtctgtgccttgagagaaacaaaaaacataccatagatatctagtgaaaagaattttattccatttttgtgagggtgggaatatcagagcttcatggaagaaggggcttttgagctgggctttgggaaatgattagcatttcttggagcgggaaaataaatctgggtagtaggattgcataagacatgagggccaggatattctagtgttttaatgacagagtagagttgttttgttgaaataaatattgtgcatgaaggagaatgatgcagaataactaaaaataaacccattaaaccttatatcagttttagaaggaatcttaatagttatcatttctgatctttttgtttacaattgaggaaacaagataggctaaaatcaggtgctgaaagaccttgaatgtaattaatatgtgaagtaaatattatatatcagatagacataggaagaaggcacagtgacactctgtggctcatctccctgtagtgctgacaggctctgtggactatatgtttttgtcttctgatgtcagtattgggactggcaatgtggcagttccatttaagttagcaaaagctgatgatgccagaagcagaagtaaattgaacagtatacctgaaactgtttctttttccccagcctcttatgctgacagatatgcagcccactaatctggagccttatagcactttcggtttcttccaggagatgttcctcagatgttgtgttgctcagaatgtgttctttgaaatgttaatgtgttccccggaatggactctgtgattgaataaatttgggaaacagtatatgccttcctgaagatttactctgaacttagcatatataaggctttctgaaattctacggaaatatatttaactttttttaacccagtatgtcacagacttatttgatagttagcctgctttcatggaataactactaacatctggaggcatactagtgtttcattagattcattttaagaaatgtttccatataattatggaaacatatataattatatatattttatctaattttgattcctagttttgtgagatttttttcctttgagcacatagcaatttttactacagttgcaggcattttctttagctagaaaaaaaacaaaaaacaaaaaaaacaaaagyaggaaaagctggggccccaagtactctgaaataccaatctgtgggcagtgaggaatcactgaagcttttaagcaaaaaagttgtaaagttgtatcagagtttttaggggaactaatatggcaatggtatatcaaatagattaagggctaaggctgttaatgtaatattttagatgagatataagaacctgatctggagttgtgacagtaaaaatgggaaggtaagggactttgtgtgagaaaatgaaggaggcaagttgctgaagctgattggctagaggaggagggaataagtcgttggatgactgctaatgatttagactaaatgaatacatttgtatttcaagacttgtcatctcagatcactatcagcctactttaaaataaaatttttgacaagcttacttagattgacgtttgagatcacataggcactcatcagaagcaggtctgttctcttcctctttcatattactttgtattttatgggttatctgaatttattttcaggtaaccttttcaagggtcccaaccccttctggcacttttgaaattataaaagaatttcaggatgtttactgtgtgccccccacatgtctccagcatctcaaagctgtaattttttagacagtaagttaaccttcattcagaaaacccaggagagagtattccacaggaattgtctatattttgatataaaaaatctttcattaaagaattattgagtcttaacttgggaatgctcctgttccagtttaagctcttttctcagcgtatgaaaaggagataagcargataacagcctctttagaatatccttaaattgcagccagagattaaaatgcatgtgtcactggtaattgctatttactgtgatttataccagcatattattattgtttattttgggttcagggggtacatgtgcaggtttgcttgaagggtatattgcgtgatgctgaaatttggatttctattgatcttgtcacctagacaatgaacatagtacacactaggagggttttcagcccttgcccctttccctacacctccctccttttggagcccccagtgtctattgttctcatctttatgttcttatgtacacagggtttagctccactcataagtgagaacatgcaatatttgttcttttttttcaatactagtagattattaatagaaatgtagcgttctctgagatcccttgggatctttatttcatttatatatttatttttaattaatttcttttttaagagacaggttcttgctctgttgcctaggctggtgcaatcatatctcactggatcaaacgatcctcctgcctcagcttcccaaatagctaggaccacaggcacatgccaccacacctggctaagtttaaacagttttttttgttgttgttgtttttgggtttttttttytgtagaaactaggtctcactgtgttgcccaggctggtctcaaactcctgttctcaaacaatcctcccaccttggcctcccaagatgctagggttacaggtgtgagctaccatgcttggataattagttcaatttaaaaaaaaatgccaaattacattccttatctataggaaaagctaatccttagtaaatatagatttacctatayrtttttgttaaatcttacaatttttttcagtgtttttctagcaagtaagtgtatctttatatattaaattgttcctttaggggagaaatatattcttgaacttgaaacatgttaataatatgtttaaaataataaactttaaaaagctgtttttcttttccctagactggatgttgaatttgttctctcagcacctatttctgaatggaatggcaaacagggacatatttcaccagctcttctttctgaatttttgaaaagaaatttggacaaatccaaagttctcgtctgcatttgtggaccagtgccatttacagaacaaggagtaaggtgagtaacagtgtagtaggaaacagactgcccaacactgaagtgaagatctttcataacaagcatctctcagttcttcctgtttatatgaaactgcactttaataatcttacagttttagaaaataacaaagtctttaaatcttcgtatagtttgagttggaggccaggattatgcatattgttagataaaacataraagtaagttacagccagcagtcagtgttctctgctcgtgatggctgccaatattgttacactcacaagattggtgccacaattcttatttgggacattaggcccaacctcttcttccatcaaagcttcataatatatagtaattaataaggaawgttcatctcattgtagcttttgatcttcattctctgtaactgagtgaaagtaaataatatatgtgatcaaaagccaagcagcaagacaaaaagggaagactagaacacaaataaggcaagactaatagttgaagcatggatcatgaaaaatcagtggtagtggcgatcctgtttgaaattcatcttgatgtgatttagctttaaaatggcactttaaaatatttggttaaatatagcccctattggatttctagataattttaaaatatggctgttctaagtgccctattcttatttagtaggtgactaacctaacatttctagatgttgatgaaaaaagtcaaactctgtaaaatctttgaagagatttattctgagccaaatatagtgaccgtggcctgtgacacagccctcaggaggtcctgagaacatgtgcccaaggtggtcggggcatagcttggtttgatacattttagggaggcatgagacatcaatcaaatacatttaagaaatacattagtttggtccagaaaggcaggacaactcaaagctggattgkggggggcacgggtttccaggctctaggtaagtttaaacatttaaacattttctggttgacaattggttgagtttgtctaaagacctgagatccacagaaagggaatgttcaggttaagataaaagattgtggagaccaaggttcttttgaagtcttacagtggctgcccttagagataatagatgacaatgtttcctgttcagacctttaaaaggtactagactcttagttaacctcttcaggattggactggcctggaagaagaagatctagctatgttaataggattctttacagatgcaaattttcccccacaaaggacagatttgcagggccatttcaagacatggcaaagaaacatgttttggggtaaaacatttttattttcttccttgtctcgtaatgttatgccagagtcaggttggaaagtaagtcacgatatatggggttaaataaaacccatctgatgagaatttatggtttgtagggcatgacttcccagaccccttagataggaatttgggcaagataaaaaaaaaaaaaaaaatcagagtttagtcctcatagataatcttatatcttgcttttttatttaaaattttaattgtagaaaagattgaccccccaatcaataaaaacattaaaaacttttttcttgtcatatttaaaatgtattttatttttaattaaatatatttctattttaatgctttaagaaaaatgttgttttagttaaactctctcaacttaaaaagatttttcaagtttctgtgtaaacttttgctcttttaaagctcaagcaaaactattaaaattacaatgaagactaacatagtttgaatataaaaaattttttatgaaaaaaggctaagagctgtactgtcttctgctgtattgcttctgctattttagaagtatctcaatgagtactttacagattgcaatataataatacttttaaataattagaatcatttttgcatttttaaaattgaccataaacttagggaggccaaggcaggtggatcacctgaggtcaggagttcgagaccagcctggccaacatggtgaaaccccatctctactaaaaatacaaaaattagccgagcatggtggtgggcacctgtgatcccagctacttgggaggctgaggcaggaggatcgctcgaatctaggaggcggaggttggcaatgagccaggatcgcgccattgcactccagcctgggcaacaagagcgaaactctgtctcaaaaaaaaaaaaaaaaaaaaaaaattgaccagaacctatatggctttcttttctcagttttacctcagagccaatctttcaatgctgtgctaactggcttacccagagttgctcaggagtatttattaatcattacatgtggattcctgctattactcactcctgaacatgctgcatagagttgcattctgagatgtaacttgattcaaattagtacttaaaattcatagtagctgcccttgtgactctcagttaggactcatttctttggtttccttatcctcatcatcttaatggatgtggtgtatttttcttgattagcaattatatgggtttcttattatagtttttgctgttctgaaaaatgagtctttcttgtgattgtgatgtccactcctagagtgctgcaaagttaatctcatgtctgctacatagattatattaaaaatatagccatcccagacatattctccatatttggtgaacatttgtcagtctgtatggtatgataacagagaaagactcagaaacctattttttaaaaaatacagataagcagcttatcattacttggccaataatggttctttatccattaaatatgtactttattacagaggttagtaaaacagtctctgctttccaggaccacactatctagtggtagaaacaaatgcacgtgctgataaccaaagtatgactcagaacaccacaaatatcttactagagataaaatcaagatgttacaggaattccgggagagatgggttacttttacctagcgatgtgtgtgttggagagacaggagctgcatggtcaaaaaagtcatgtgcacagcatgtggactaaaacctaccagtcaagagagatggagaaggggatagtacaggcagggagaactggcagatgcattaggggtgcagatttatacaaaagactagactggtttggctagagtgaagctgcttgcctgggagaacaggatggaatggtagcatgggcccagatactgagaggctttactgctgcactgtgttggcttcaactcctgtgccctactggccctttgtgtgagtatgtgtatgccctctgggagctgccagctggggtttaaatcccaggtctaccacttacaagcatcttacaatcatttgctgggtgtcctagggcagttcttaacccttctaagctttagtgcacttatctataaaaatgaataaataataatacctatgcatgtgaagtgcatagcaaagtgacatttataatagagtaagtggtaaaaaagtagttattatactattttcctagttgaacaatacgcagtatttctgcttttcctgttcagtagggggagaatgaagatagaatcgtaggggaatcaactcctttctttgaaaactggtgaataaaggggaaaaaaatcaaacatttattctccctttgttatatgagccatactactgaataatcacataataaatgagcagacatttttctttataggattcctcagctgattaatgaataaagaatgatagaagtagaatatcaccaattgcagtgcttaatgaactaatggatctatacatagatcataatggtagytagcactcaaaaagagaggcaaccatttattacatgcctccagatagaggaacattacctgtgaaatagtcttgtcaaaaagatttgaacctgtgtctgatcaagcctctagatccatatattaagttatggaaaatatgaggacataaagacatattattaaggaataccacagggatgtagaaaaatgaaggttttaggagactcaacaaataaaaatctgatttttgtcaacaaataaattgcaggatggagtgggggtctgggggatcttacagatcaaaggatgcctaaaagacttatcagccaatcataatgagtaaattttaattggmtattgattgaaactattttttaaaattatgacatttatgagctagttgaaaatttgagcactgcttagatatttcatgatatttaggagttactaatcactaattttttaagaggtgatagtgtttttttatttaaaaaaaactacatagtgaatggggaaaatgaaaaagtatcatgattatggtggtaaactgctcttatttcttcattttaaagcattttccctaagaaacatgtgctttttatttgtttttcargttgctgcatgatctcaacttttccaaaaatgagatccatagttttacagcataatgaagagctgtcattgtcctttattcaactagtttatctaaatttgtgattgcttagggttttttaagagaacatttttgtacataacaaaaggttaactagaatccagccttcagtttcttaaatgaaatcaaatgttccttcagtacaggtaacttcttggctttcttttgtaccacaacttattttactactgatatttgacctggaaagttaatcatggcaacaaatacatacaggattctttgttatgaatcacaaatttccttgccatttaaattatatcactgttctacaataagcacttgtgttttatgacatgataaagtaaatgatcacttcgatcatgtttcyatgctgtaaaatgtcttattagcaatacagattaaattttaccttgcactgttaactcaggaaatgatcatttatgtccttgttattaatgttaaaacatagaatgttataacttattaagtgatccaaacatttttttgtgtgtgtatggcattgatgcagaatagaataaaattatacttaagttctttttaatccttgtggtagaaatgtggttgaatgcaacaatattgggccagcgtctcaaggggaattttaaaaggcagcaataaaatatattagagacatgacacacatgcgcctttggactaggtgtgttaacagagcttgagagagggaaccttgacagctatttttactcttagccaaaaacaaagacattaggaaagagagtgaaagtatagtgtctagttccacagcataaagttattatttggtgctttggaatgggttgaattttaattctttagtccatctaaatcagctggaaaaatgaggaacattctgccttgaatggttcttcccctggttggctgctttctccacaactggtggttcagcaggaagccctcttaggttcttgcatgtgggcaacttattttctcttcctgctgctttgtgcaactgtcaaatactttcacagattcagatcagcaaagggtatcaaggatagtcattgtgagcttttcgtgaggaaactgttgaatgcataggtagctactgtataagctaactaggatttttcagtcttagtacagctgcaatgttttcacagaaataggggattgaaagagtctccaatttctctgtaaatgattttgtaaacagctaaatctttgctgaatgaataatatactcaagaggaacacaatattaatattccccaaattacagacgcccagcttgtgaagcttcctatgtgcaaatggctggttgaacactatcactttttcctgtgcctctgtcttctgtagccaattccaccatcatcattattcacaaagacaggaatctagctgtcctggactggtactgttccctggtaggtaacaagaactttttctagcttcatgccttccccctacttatttttttccatctaagggtgaggtgatttggctctgtgtcctcacccaaatctcctctcaaattgtaattcccacatgtcgagggagggtcttggtgggaggtgattggatcatgggagtgattgcccccatgctgttctcatgatggtaagtgagttctcatgagatctgatggtttaaaagtgtggcacttcctccccacctcctgctgtattatgaagaaggtccttgcttcttctttgctttctaccataattgtacatttcctgaggcctccccagccatgcagaactgtgagtcaattaaacctcttttcttcataaattacccagtctcaggtagttctttatagcagtgtgaaaatagactaatataaaaagagactatttaccacttttttttagttcatttgcgatgtatcaaatctaacttagccaacatctttctcatcttttctaagcctcttcttttttctctctcctttcccaagcaacagaatctcctattagtcgctatatgtaatgcttcctcattcctccttttatgttttatatttttgtttatattttatttatattttgtttatattttgttatattttattatattttgttatatttatattttgtttatattttaaaacaaatccataagtgtctcctgggtaatctccactgacatgattttatcaacttacatgttaattcccaaatgggagtgactaatttgagaatcagctgagcttcagttttcaatatccatttacttcctgcataccaccccaccatccacctagtaagccattctagaactattaggaatcaacatcaatgtccccttctccagtctgactcttccataccagctaaccctgtcctatcatccctcagctggattagtacagtagcttgataattcatcttcatgctgcagtcctgatctcctaaaattcattctccattccagggtattctagaaggacttggaggaaaaaatcccctaagtagagcctcagtcttccaatgaatgcaaccaaatactgaggagcacagataggagtatagtttatcactgttattctcaagcaaataactcaaagactcctacatcacatatttgcagtgaagaagaattacgctcaaagtcacatttgcttgcaaattctgctttttttaaaaaaaagtttattaattttctattgctgctagatcaaattactacaaacttagtagcttaaaacaacacccatttattatctcacagttccatggcacagaaatctaggcacaatatggctcaactgggtcctctgcttaaagcctcacaaggctgtaatcagattgtcagctgagctgggctcttagctagaggctgtaaggggaagtccctagataagagttctttcagcctcattaggtagatttcagttccttgcagttgtaggactgagttccccatttccttgctagctgttagctgtgggctagtctttgtttctagaatttgcccacattccttctcatactttctgtgtggccctcttcagcattagtggatgaatctcatgctttcagtctctctgaattcccttgtgggcttcttcagcattggtagatgaatcttatgctttcaatctctctgaattccctttctgccatatctttcttgccctagcaagagttcactgcttttaagatctcatgtggttagattggacctatccagatatccagggtaatcttcctattttaaaaatctataattttaattatagctgtaaagtcccttttcctatataatatattcaaaggttgcaggcatttgggtgttgacatctttgatgggcacattgtgtctaccacaggctatagaaagaacagagaaatttgtccaagataagatgattaggttttgtctagataggggcccttgctatgggccctcagtttttaccttaatgtaacagaacatgagaggagctttgacacccaccccaaaagagtcaacttcattatgctggcaaaggcatgggtacaacctgctctgtgatctaccttctgaaccacacaagcttgtcctgaacgaggttggggctgagtctgttgataacagacccccatttttgggcagaaaaaacagattctgtatgatctacagtatttaacattgtggcaaataaattataaaggaaaaatggaatctcaagtagttacagtctcttggtgtctttcaacattggttttattttgaagtcattttcacccagcattgcaagtttagcagacctcaaaacagaatgccaaagtgatcttaaaattcaaaaatgagtttactttctttgttaaagttctcttttgatgcatatcccccattcatggaatggaagcattatcttgggtgcagcattacacgtagagttaaaatgtggaaacaacccaaacatcctgatatggtttggctctgtgtcaccacccaaatctcatcttgaattgtactctcataattcccatgtgttgtgggaggaacccagtgggagataatttgaatcatgggggcagtttccctcatactgttctcatggtagtgaataactctcacaagacctggtggttttatcaggggtttccgcttttgcatcttactcattttctcttgcggccgccatgtaagaagtgcctttcacctcctgccatgattctgaggcctccccagccatgtggaactgtaagtccaattaaacccctttttttccccagtctcaggtacgtcttttatcagcagcgtgaaaatggactaatacagtaaattggtaccagtagagcaggtgttgctgcaaagataccgggaaatgtggaagcaactttggaacttggtaacaggcagagattggaacagtttggagggctcagaagaagacaggaaaatgggaaagtttggaacttccttgagacttgttgaatggctttgacaaaaatactgataatgatatggacaatgaaatctagactgaggtggtctcaggtggagatgaggaacctgttgagaactggagcaaaggtgactcttgttatgatttagcaaagagactggcggcattttgcccctgccctggagatttgtggaactctgaacttgagagagatgattaagggtatctggtggaagaaatttctaagcagcaaagcattcaagaggtgactcaagtgttgttaaaggcattcagttttaaaagggaagcagagcattaaaattcagaaaattagcagcttgacaatgcgatagaaaagaaaatcctattttctgaggagaaattcaagctggctgtagatatttgcataagtaacaaggaactgaatgttaatttccaagacaatggggaaaatgtctccagggcatgtcagagacatttgtggcagcctcttctatcacagacctggaggtctaggaagaaaaaatggtaaaaatggttttgtgggcaaggcctagggtccttgtgctgtgtgcagtctaaggacttggtgccctgtttcctagccactccggccatggctgaaaggggccaacatgaagctcaggccatggcttcagagggtgaaagccttaagccttggcaacttccatgtgatgttgagcatgtgggtgcacagaagtcaagaaatggggtttgggaacctctgtctagatttcagaagatgtatggaaatgcctggatgcccaggcagaagtttgctgcaggggcggggctctcatggagaacctcggctagggcagtgcagaagggaaatgtggggttggagccccctcacagagtccctactgggacaccgcctagtggagctgtgagaagaggaccactgtcctccagaccccagaatggtagatcgacttacagcttgtaccaggtgcctggaaaagctgcagatactcaacaccagcccatgaaagcagccaggatggaggctgtaccctgaaagccacagggccagagctgcccaagaccatgggaagccacctcttgcatcagcgtgacctggatgtgagacctggagtaaaaggagatcattttggagctttaaaatttgactgccccactggattttggacttccatgggccctgtaacccctttgttttggccaatttctcccatttggaatggctgtatttacccaatacctgtaccctcattgtatctaggaagtaactagcttgcttttgattttacaggctcataagtggaagggacttgccttgtctcagatgagacttttgaactgtggacttttgggttaatgctgaaatgatttaagactttggggtactgttgggaatgcatgattggttttgaaatgtgaggacataagatttggaggagccaggggtgggatgatatggtttggctctgtgtccccacccaaatttcatcttgaattatactcccataattcccatgtgttatacgtgggacctggtgggagataatttgaatcatgggggtggtttcccccatactgttctcatggtagagaataagtctcatgagatctgatggtttcatcagggggttccgcttttgcatcttactcatttctcttgctgccaccctgtaagaagtatttttaacctaccgccatgattctgaggcctccccagccatgtggaactataagtccaattaaacctctttttcttggcttaatttcttgggtatgtctttatcagcagtgattctattcctatgaaatgtctagaacaggaaaatctatgagacataaagtaattaagtggctgttcaggggatacaggaataggggataataactaaagggttgggagggtgtttttgaaatgctaaaatattctgaagtttactgtggttatggttgcacatacttatgaatatacctaaaaatgttgaattgtacattttaagtagatgaattgtatctaatttgaaccatatctcagtaaagatataaaaatgtttttgggtactaagactaaactagaaagaacataagaggaaatacatattatataagaagaaaagagtaaaaataaatctttaaaaaaataaaaataaaaaggaggcctgtgtgcggtgg

SEQ ID NO: 95940 - DNA, 47855 bp, Homo sapiens
  misc_feature (1)...(47855): n = A,T,C or G
gacgatattgaattcaggaggaaaaccaactttccatattacataaatatttttttctcctaaatatcctgcttctttggcaaacattgactgaaaagtgatatatatgcagaatgcttgtgtctccccaaaattcacgtgttgatacttaatacccaatgtgatagtattaggaggcggagacttcatgaatgagattagtgccctcataaaagaaaccccagagttgcctttgttgccctttctgccatttgaggacacagctagaaagctatgaaccaaaaaatggattctcaccaaacaccaaatctgccagcatcttgatcttagacttccctgcttccagaactgtcagaaatacatttatgttgtttataagccacctagtctgtggcattctgttacagcagcctgaacagactaagacaaaatgtaaatggcaagccatgtaatgatcaaaaagacttgtgtgcaagtttatcattagcacatgtcaccacgtatatagtttacatttccttcaagaagcaagagaaaatatagaaatgggaggataacaataatgataactgctacaatttagagctcatctattctaggccaggcacaggtttcagtaatgcacatgttatctctaaacaaccctgacagttatcgctgctccaatttacaggaaatatattcaaagacattatgtcacttatctcaggtcacagcaccagtaaaccttagggccaggaaacacatttttaaaaatacatacttcccattggttaataggaaagacaaatctactaacaaacagattccacatttagtaacttaaaaaaatgataggatttatttatctttcttatgcagaagtccatgagaagcatggaagattttcaggtggtaccttaaccatgaatctatgttcgttttatttcgtagctctgcaatccccagggctttgatgtagggcctaggctggactgacagccagaactgtcagcaggatagaagagaggacatggaaaggccacatgaaaaagttttgccagtagaatggtaaactgaagaaaggctagaaaatggagtctcgctacgcctccatgtgcccagctcccattctattaccatttaacaaaggaggcaagggtctctgcagtcacttaggcatttctacctcagcacaaattcctatgacttcaattcaacctctatgctctcgaccaccaatcttgagttttctctcaccacctcacatcccacagcttcagaagccagccatgcatttccatttggaatcctcatcatcatttcagaatcatcaagttccaaatcaagctcatctctgctattttcccctacaccaaagttaccctctaaatgtatcatctttttttttttctttttctttttttctttggagagtttctctgtcacccatgctggagcacagtggcgccatcttggctcactgcaacctcctcttttcaggttcaagtgattctcctgcctgctgggactacaggtgtgcgccaccacaccaggctaatttttgcatttttagttgagacggggtttcgccttgttggccaggctggtctcaaactcctgacctcaggtgatccgcccaccttggcctcccaaagtgctggggttacaggtgtgagccaccatgccaggtgaatgtatcatctcagtcaaagaccaatgccaaactttctattcaagaactcttaaaacccttctttgtgattcatacatttcattcacaaagtctttccagattttttcaagtaaaaattttatccatcctttctttaatttttttttttactattgtaatcatagaccaatcctcctttattagtagtataaattaaaatttgttattcatctactatgtcccaggtactctgctcattgttaaagaaacagttacaagaaaaactaaataataataactaatatttatatgatactaagtattttacactattctaagcacttaacataaactcacctatttcttaagagattttaaaagattttattcaagaccagtctgggcaatatagtgagacttcatctctacaaaaaaattaaaaaattctctgagcttggtggcactcatctgtagtcccagctactcaggaagctgaggtggaagaatcacttgagtctggaaggcgaaactactgtgagccatgatcgtgccacaccagcctgcactccagcctgagtgacagagggagatcctgtctcaaaacagacaaacacatttcagtttgtggagagttgtgcaaacaaggttgaagaattataaatacaccagatcttgcatctttttaagttgtttgaaacatttttgtattcatgctaagaggaattgtgatggttaattttatgtactaatttgactgggctaagagatacctagatagccagtaaaacattattcctggatgtgactctcagggtatttcagagaagattcccctttgaatcagtagactgggtacagaagatcactttaaccaatgtgggtgggcaccatccaatctaagtgcccaaacagaacaaaaaggtggagggagggaacatttgctccctctttattgaactgggacatccatcttctcccgcccctggacattggctcccctcattctcaggcctttggactcagactgaattacacttccagttttcctggttctccaggttaatggcagactacaagacatatatatatatatatatatatatgtatcttgtatatatatgtatatatagatcttgtgtggtgtgtatatatatatatatatatagatagatagatagatagatagatagatcttgtatatatatatcttgtgtatatatatagtgtgtatatatatgaaggcttcattttaatttttgattaatgtaagactgggtgggatgcatggggaagtctgcaaagggacagagattcattttatatggtacattttacattatttagatatttgactaaaatattttctatataagatatacataaatttatatttatatattaaatattttatatattaaatattaaaattaaattttattaagttaattaaaatattaaatatttaaaaataatatgtatttatatgttaaataaatgtatttaatttatatatttaatagatttatatattatttattgtatatatatcttttttctaggtaggtaggtaggtagatatagatggttaaatatagatccatcctattgtttctatttccttagagaaccttgactaatacaacaataaaaatttgtatgcaaaaaaatgacatcctcagattcaaattttaggatccctcaagctgttaggtgtagcatggattaaagagagatcacagaaaggtgggtagacattttgggaaaccaatatcagatgagaatagcttgagtgaacatgatgctaatgacaccacagatggagagtagcataagaattagagataaatttagaagataaagtcgatagagctggtaattgactggatacaggggtaagggagagaaagtcgtattagacataatgtctggcagttagtcctgtgtgatatgttttatggagagagggaatcctgccatggaggggtctaggtttgggagtgaagatcatgagttcaattatggacttacggttttgtggtgtcttttagctatccaaatggacaattatagcataaaattagattacgtgagcttgacatagaaatttggaaattttcttaatgattcataattattattaataattcatgctcataattcatgagcatggataattgggtgaaagtatggagtgagacacagaaggcttcatttcaattctttgattaatgtaagactgagtgggatacatgaggaagtctgcagagggacagagattaattttatatggtgtattttacattatttagatatttgactgtaaataagggacattcatatgaagataaaaatttaaaaaattagttagaggagggtggtctggtaaaggagagtagaaaagaggagctggacaacctgtatctcatttatctcccaaacctctgtacttatttttcttattttatcccattccctttattatttatttattctacataacattgtaaatgacatcttttaaaaatatgcctatctaaacatcacatcatgcatgctatttattttttgtcacagtaagcatgtagttttaataagctataatagtaaatttcaccacaataaccatttttagatcaaaagaacaatctaatatgagaatagtcaaataacaaatgttcccattattatcatgtaacattttaactattctggaaattttagaaatatctttctttgtaaagaaagggttcacagaaaagaaaacacattttcttctcttttgttgttaagatttattgttaaagcatatgcatagaaattcaataacaatttttgttatataaaagaaacccttactcaaactatttttcatttctctccagccacaattatattaaaacagacagaacaaatgtctgcatagacaaaaaaaaaaaaaaaaaaaaaaaaggacagacactgcaaacagaaaagggaagggctgtggtgaaagaaaattgatgacacagaaattaaatactaaagatcagtgtgaaatgttggaaagtgcccactgactcaatagcgcaagatgtttttgtctttctttaaaattttatctgttgtaaaatccatcccatttcaagcccacattaactggttgactcatatacctttgtctatacttaatcttattattcctttaaatacataaaaatgagctcatgaaatagattcagaattttcctccataagaagacaaaatggggagaacaaaggcaatcatatccttttcttttttcaatggccacacagtgaagaagaaaaagaaaacttaggtttgttttggcttggatttttggagatgcattgtagagaatgttcagtgtcacactgattcaacagatgaggtgctgaggaaaatgcttttcctcctcactctactccccttggctataaatggcaaattaaaatcttaatcattttaagaaaaagttttgatggctaacttgtaatgataaaggacaaaactaatagttgttacaattacctatcttcaacatattaatccactggaaatgaatataattcagcatatgtgatcatggcttcttctatgcaacattctaatcttaagtacatgttctaagtgaggacagaagtcacagaaaaaaattaaaaaggcaaatttagggccagatttttgttgttgttgttgttgctgccacggatactgttgcagttgttattgtcattattactttaatttcattatgctaaataccaggagccattaaaatacatttctctatactatgactaatgaaaaattaaagcatctaccctaacgagatcctatggaaaaactcaatctaaaacgtctatatatgtctaactgtacacaatttgaagtaactttggatatcagagagtttaaagggatataactacttcaaggcaataagaataactacaggagtatctgatgggaaaaaagacaaaaaaaaaaaaaaaaaaaggaatctgacctgagagattatgttgtagataacttgaatgagctatttgcaaaaaccttaacagacaagtgtcatgcctgatggactcaaaacaagtttcaattatgctttaaaaggcatttgaaagtacatttctctcctatgcgaaatgtgatatgatgatccaaatgatgaaggaaggtctaattttacactcaaaaccaaactcaatttagaagagggaaaactcacattggtagacagaagatcattaagtaacctgaaataacgaatcatctttgtatgtttttgttggcatagaaaactgttatagaagatgtccgagcatatggaaaagaaccttgaacatggaacaaggagacacgggttcagcctctgggcaagtaagtcttgatcttgttattttaataccatatattgaatgctttctgtgctgagagtgttgtatacattcatttaatcctcacactaactgtatgatgcaggccatcttatctttaactaccttcctgtctatctacctatatagttaataatcctagttgacaaaactgasactcaagaagtttacgaaatgtaaattcccactgccacaaaggtaaagagttagaattaatgtaagtgtgtaagattctgctcttaacatattttatatcactagtatgtaataaggcaaaaatatcaaagaytataaatctgaatatatgcatatgtaaaatatattattcagctcatattctgtgtcaaagtaattaggtaattaaatgaagaaatgagaagtacacatataaagtgctttgcatattcttatatcattgttgtctaaaggaatataaatttatgtttgatttatgagccaaaccatctgttttcttccttgaacactagtattacttgaaaggatgactgatggatagactacggttacttaaactaggatatatggcagatagatattttctcagaaatgaagtgagtcttaaatgcaaacaacagacagacagtattcaaatttaagttttcaaacaaaaattagaactttggtatatttgtatctgttattgtgagcttgaccccttcccaatacttaaagacttttcaggtaagattagtggtgatattactgatttttttaatattatataacaaaatgtatcaacatttagaayatctgcctaattcagtgaactaatattgtccaaatgaccaatgcatgatgttccaaaatctgcatgaataaatgatacattgaaagcgaaaaataaaccaatattatagggtaacagagtatcaaatgttcactgataccgtttcagattatgctctgcaactaatctttatgaaattatcatttatttagtttttgtcaaatattaaagaagamtgttcacaattatccgaaagtacaattaattatccgaaagtacaattaaaatattggtttcttttgtatccacataattgtgtgaggctggattttcttagcatacgttaataaaaataatgtattgataaactaaatacaacaacagttggagattccagttctatgaaactcaagaaagagaattgcaaatatgaaatgtgccattatttttatttttaaaataatactattgttcatgaaaatatgtaacttaacatataataagtttattacaattactttcaaaaataaatacatagataatgttctaatttctagtatggtaactatatataggtatgatccacataaacaaaagcactctggcatcttcattaactttaaagagtgcgtactatttggagatcgtgtttatgacaataactaatgatagtaaaatgtttagcctcaaatccaaacagtaaattggtaagtaaatgctaactattattaggaagtagctctgatctgccttctgtgaatgaggaaactaaggcaaggtaaaataaagccttcaaggatactcacctactgaatgaatggtgaatcttgtttagtatacaatgtgtgaagctacagataataatgctcctttcctttaccaaattgtaattgggtatacatgtctgagcagggagttaattgaaaagaagtggacaaatgagatattggtaagaatcaagaatcaagttggtttcagttgttttgcaggatccttacaaatgaacattttagtccttgcttttatccagactgaacagtgatttatcagaccatttggcaggccaactcccatgaattcgtcaaagcagctgagaggttaccatttgcagctgcaaagtaagaccctaaaacactgaaatctaacaaattaaatttgattttagtacagtattatgaaatgtatctgtggaaaaatgacctagaagaatactcaagattgttttcatttttgaaacatatttgtcaaatgttaagcattctgtgaagtttcttaatttttaaatgtcatttaaaaaatgaaaccacatagatacataattataaaattatctaggtctttattacttgaattataatgaaaaaataagcaataagaaaaataataaggagaatgtataaagtatacttgcccaaagttaatttctaggaataaatatagaattattcattaatttcaaagaccccacttccaagtccttgttaggataatttaacttaattatatttcacattgcaaaactggaaaagaacagtttttaaaacttgttactttttgatggattaaagacttacatgttagacctaaaatcataaaaaccctagaagaaaacctaggcaataccattcaggacataggcatgggcaaggacttcatgtctaaaacaccaaaagccatagcaacaaaagccaaaattgacaaatgggatctaattaaactaaagagcttctgcacagcaaaagaaaccaccattagagtgaacaggcaatctacagaatgggagaaaattttcgcaacctactyatcagacaaagggctaatatccagaatctacaatgaagtcaaacaaatttacaagaaaaaatcaaacaaccccatcaaaaagtgggcaaaggatatgaacagacacttctcaaaagaagacatttatgcagccaaaagacacatgaaaaaatgctcatcatcactggccatcagagaaatgcaaatcaaaaccacaatgagataccatctcacaccagttagaatggcaatcattaaaaagtcaggaaacaacaggtgctggagaggatgtggagaaataggaacacttttacaccattggtgggactgtaaactagttcaaccattgtggaagtcggtgtggtgattcctcagsgatctagaactagaaataccatttgacccagccatcccattactgggtatatactcaaaggattataaatcatgctgctgtaaagacacatgcacacgtatgttcattgcggcactattcacaatagcaaagacttggaaccaacccaaatgtccaataatgatagactggattaagaaaatgtggcacatatacaccatggaatactatgcagccataaaaaatgatgaattcatgtcctttgtagggacatggatgaagctggaaaccatcattctcagcaaactatcgcaaggacaaaaaaccaaacaccatatgttctcgctcataggtgggaattgaacaatgagaacacatggacacaggaaggggaacatcacacrcyggggactgttgtggggtgggtggagaggggagggatagcattaggagatatacctaatgctaaatgacgagttaatgggtgcagcacaccaacatggcacatgtatacatatgtaacaaacctgcaygttgtgcacatgtaccctaaaacttaaagtataataataaaacaaaaaaacaaacaaaaaacttgttactttttatgtgagttttttgaacatttataaatgttaaatatattgtgattcaaattaaaaatgtatatattatttgatccagcaatttcattttgggtatttttcttaacagataattgaactggcacaacaaaggtaagttaaatatattaattgcatcrttgtttatattatcaaaattatgaaaatgcaatgatatctatcaatataagattattgaaataatatattgtgaaggcaaaacattttatatgaaaatactttaattgatatttataacaatgttgaatgaaaatgtagtttaaaaaatagagtgatattatttatataacatgtttatatgcttatttctctttatgcagaaaaagatgtcggaaattgttcatcaaaaaactgagtgcttatctatgagtatgaagatttcattaattaatcttatatgttatactttttcacattacttgaatattgttcataattgcatactatctttataatataataaaatattttcattttcaaatatttaacaatttaaacaaatgtaagcaaaatattaaaaataacttgacattagtacgtggaattggrgcaattgcataagttttctcattcaaacattcatataagtacttgmaatcatgaatacaagcatattaacactagagattttagaattcctccattatttccctagttttctagctatgatttgatcaaactgtgtttataagttcctttatattaaatttaggtggtaagctagatttaaatcttttyrgagaaaaattgttatttgatattaaatgtaattatttatttcactggaaatataaaatatatagccttccaagtaacaaagggtaatgaatttattgtttaaagagaaacgtaaatacagaaaataaaagctggccgggtgcggtggctcatgcctataatcccagcactttcggaggtcgaggcaggaggatcacgaggtcaggagatagagaccatcctggctaatacagtgaaaccctgtctgtctttactaaaactacaaaaaaaaaaaaaaattagccacgcatggtggcacgcacctgtagtcccagctacttgggaggctgaggcggaggttgcaatgagccgagatcacgccactgtactccagcctatgtgacagagtgagactccatctcaaaaaaataaaataaaataaattaaaataaaatarattaaaaataaaagcttatgctctttactttstacataccattctattttctttattttcatatttctaatttatggcactttgagctacaaaatacattttaaaacatctttcaaatgccataaatatttttcaattactgtttagtgaagrcttcagtaacttgttcctttctatttattttgcgtagaaccctagctgagaggtttgcaaacaagacaaaacttcaatgtaaatttttaatttgttattttggaacaaaaaatggcagctgataagctttttcaagtaggcatattctctttaacaatttcaaataaaaatcaattcatgyatagccttcaaggacatatgattttacaaagtaaatctgacgactgtttgtagaattattcaataaagaaataattgcttatttctggataaagcctctattgaccaatattaatttattctcaactaccagacacctagttccaaacctagaataaagctattctgtcggctcagagatagcctaagcctgccttttccttgcctacaaaattagattcaaaatttttaccataagcattccactccctccatgatcttatgccaatttacattagtttgcccctagatcaaacaaacaatccctttcttcctccttcccccaacagatcaactgccctacttgcccacgtcttcctcctgcgatgaactcaggcactggtacgcagtatagacatggtacagaggattgtctcagagaggttgtgctgttcttttccctacttcaccctcccgagttgtgccatcttggtcatgttgcttaacttacctgtttcagtttttccaactgtaaaatatggatgataaacttgcctatctatctcatggagctgtcatggaaatataatgcaaagcatttcactgtctcaattttgttatttgaaaaggagtaatttgtaaacaaaaataaatcctttcaagtcattttctaaaattctgtaattgacaaatatttactaaaatattaaactgaggatttataagttttctaatattactttccaaaactagactatttaaaagggaaaatggctgataatatcagtgcagttctcaagcagtgtctatcctcttacctcattatgatcttgatgaaacacttgccaatataaaatcatgacaaagctatttcatgggtgtgcaccatgagaaaactactttaacttcaattttttttggcttggttactttcactggtcattttcttttgttgttggtttcaaaactcattgctatttccactgactactttggcctcctagtcaatcatatctttttgtaagaccataaaactttgacatttttgccaaaaagtaatcagtattgtcaatttaaaatttcccttgatttcaagattctctaatacacagtatttttttttaactttcccccattagttccatattatattttacatagtagacattcaataaaagattcttaaaaaagtaagcctgggtaacatagggagaacctgtctctacaaaaaaattgaaaagtagctgggcatggtagtgtgttccagtagtcccagctacctgggaggctgagatgggagcatcccttgagcctgggaagttgaggctgcagtgagttgtgattgcaccactgcactccagcctgagtggcagagtgagaccctgtctcaaaaaaaaaaaaaaaaaaaaagagtttttgttttaggtaaaccacatgtctctttctayatactttcaacttggaaatgatgttttgtttcaatgtaaagaaaaaaattaactattaaactaaatagtaaaaataaactcttaactattaarccaaaagaccagtttatatttgatgtgaattccatttaatactaacaaacaggccctgattaaaatttatatagtgatagcaaaactaacaacttttcactccttgggaggtggagaaaataaggtgaagagggtcttaagtttatgggaaaacttcatttttgccacaataatgcccgtttcatggcaacacctacattttcagtcaaatttcccatataaaagcaaggtgtcaatgatatgtcagtaattcattcacatttttaaataagagtgcaaatgattgagttaagtattgtctgggaaaatgataacatgtaatttgcccaaaggctgactaaagacagaatatttaaacaggacaattaaacatcatgctaagccctaatatgttcctctaagaagttaaaaattctcttaagagatttaactttttaaaaattctagctataaactaaaataaaattaattgcatttacatgcccggacacttgtattttagagctgatagttatttaaaaaccagatcaactcaggacttaagttacaaaaaaaagctgtgccctgccctgccctgcccttgtaagttcaaggcagatgtttaacattgctcaaacatagtgttttttaaggtttaattttcattcagttctacttttcagaagagcagtgatgtaacttagtattattacaacaacacaaaaaatctcagccacatggtaaaagytgatccaaaaacaaatgagtaacatcaaaaccaggccaaagakcatatccagtgaactgaaaaaaaagaaaaatctaacaatttcaatggaaacttctacactagttatgatcttaaaatgaagggtggggaaggtcattattttattaactctgtaaagcactgaaataagggaacmaaagtgagttttatacttcaccagaggaaagacagagaatttataaattacaggggtacgttttgctatttattggtgagtgctctctaaaactaacggctatttaaaatacaatcatgctaatggtcaagtcatttcctatttacttaaatcttttctatcagcatttgcttaagtaaaacctaaagaacattctcttttaatgttgccattatctgttccctcagatcatataaaggtggaattgaaattaacatttgtagatgaaagacactgtttttctcctraagaacttgcttaaaccaattgtttaaagatccaatgttcttaggctctaagttgatttctaataagagattttttttcttctactatgacaatattctaaccagagtagacatccagtaaacactgaataacttacccaaaactgtactttaggcagaaaggaacaattcccgcatgcattgatgttgttataccaaactcttttaccgacaaaaggaccacgttttctcagtctaaagaaagaaacaaagaaatgtyatttttagctcagatatctttatagctctggctatattctctaattattaagtattttatattccttatctatcccaaaataaacttggattctttacactatattgcttctgttttttttttttttttttttttgagacggagtctcgctctgtcgcccaggctggagtgcagtggcgcratctcggctcactgcaagctccgcctcccgggttcacgccattctcctgcctcagcctcccgagtagctgggactayaggygcccgccaccrcgcccggctaattttttgtatttttagtagagacagggtttcaccgtgttaaccaggatggtcttgatctcctgacctcgtgatctgcccgcctcggcctcccaaagtgctgggattacaggcgtgagccaccgcacctggccactatatagcttcttaaccctatactcataatgtaatgttgaagaagatgagattcaaagtaagagaaaaatggcaggtgatcaagcctgtggaaaacaatgccaaataaagtgggattatctcaaaaatctctatatcttgaggtggtggaagctggggtgagagagaggtaactgacaaggaccacccagtgaaaggtctaaaccaggcaaagctgagagaagataaagaagaccagatgtaaagctattgttccaacaatttctcatcttactgaaaaagtgaggaacaagagctctagaagtaatttttttctcactcactttggtgaactctgcagtaaacagcagtaagcagttgttaaggaattgtgaacgcaaagataagctcaaggtcaatgattccaaattatctgagaagcatgaagaccacataaacaaataacaaaccaaagtactcacacacaaggaaataawactaaagcactcagaagaagactttaaaacaagtgaaattaattaagctaatgttgaatttatgaaacaaaagcaaattgccataaaaaaggatccattagggataatgaagatatattcacacacacacacagacacacacacacacacacacacaccatgttgaatttaaacaaatgcatagattaggtatagatataaatatagatgtatgttggaaaaaatttatggataggatgaataaaataatggttctagatgaagcaaggactgatggtttaaaaatactatgaatagtagatactgaaagtctatgtatctgtggctatgtattctatatatctataacaatgtattctgtagctcaataggaatgccaaaagaacagaacagataaaatgaagtcaaggatggtaattatagaactgacacctggaattgaccaaaagttataggttatacctaagatgccatcaacagatggtgaagggaagtactacagaaaataattttgggcagaaatgggagataaaagctgctaagtttatcatactcaacactcgttgaaatatccttgtgtgtattttttttttttttttttagacagagtcttstactgtcacctggcctggagtkcagtggcatgatctcrgctcactgcaacctctgcctcccgagttcaagtgattctcctgcctcagcctcccaagtagctgggattacaggtacccaccaccacacccaggtaatttttggtatttttagtagagatggggtttcactatgttggccaggctggtctcaaagtcctcaccacgtgatccacccacccaagcctcccaacgtgctgggattacaggtgtgagccactgttcccggccccttgtatgtatttttacacacacagaatggtgaaagagaaggtgtcaggcaagtyccctgaaggatcatgagacatttgagtagaaaaggaaataatgagctgaatgagaagctggcaatgtaaggaaaagcactcattgtattagtccattctcatgctactaatagatacccaagactgagtaatttataaaggaaagaggtttaattgactcacagttcagcatgcttgggaagcctcaggaaacttacactcatggtggaaggggaagtaaacacccttcttcacatggcagcagcaaggagaagtacagagtgaaggggagaaaagtcctttgtaaaactatcagatttcaygagaactcacctactatcacaagaatagcatgagggtaacagcccccatgattcaatcacctcccaccgggtccttccagaaacgtgcagcttatgggaactgcaattcaagatgagatttgggtgaggacacagccaaatcatatcactcatggtaaaagatgtggagttttaaatgagctggacatgttcaaggattgttaagaacatgctttgttagctacagagtaagcaaggaagaggatggaaggaagaagaattcagagacaagaaccagatcatatagtaccttgtgggcccttaagaagatgaggccttattttacatgtaatgggaagccatcagagggttttaaatagaaagacaaatgaactatcatgtactttaagagatcactctaggttctttctagagaatggaaarcagcatggaacaataaaggaagaatattggaaatctatttttatattaattgttagaaagtcagtttgacttgtaggcatctattatttaacaaaaaaaatataaatttaatgtgaactccaatatttaaaaactaattatttctaattagcctataagatgttatttacataatgccacttaygatatatgacttgatttttttcctctcaattagctgggatagctttatactgatctcttaacaaacatatgctttctctgacaataaatagtaagactttgaagaatggtttcctgagtttagagataaaaggattacactgttaaagattgagaaaacagatgactcagaaaaacgtcttaagtttattcaatggccaactattacaacaagatgagtatttactacttgctgtagattaattataatcgaaatatgacttaatttattctgaattctgagagactaagctatctttaaatcttgcattctctaatgatagaagtttctccaattaagagtcatggaatattttcctttgtcgagtgattacaaagtgctaatcattatgcaaagtgtttacttacatactttatctcatcaaatcttcatgactatttaaattgggtattaccattcctattttacaggtgaggaagctctgtcacagaaagtctaagtcatttctttctttctttttttttttattattatactttaagttttagggtacatgtgcacaagtctaagtcatttcttayggccaaataggtaatgccaaacttgagattcaaaatcaaggtcctctgacttgaaagcagtcctagccaatgttctagactgcatcgcttacaataaaaatggccatttttatcggtaattggtaattaccaataaaattaattaattggtaattggaactgattccaattgcagttcagtcactatcyggtggtgtgatttgaagtgaattactgaaacagttttatctgtaagcgtataaacaataacatatactctaccctgtacatatcaaaattaatgaaataacctttytgaaaatcsatcacaatgcctgacgatggcaggttcaatgagatgaacctgaatatatgtaaaaatatatattatatataacatatatgttatatgcattatatataaatctattacttatgttatacatatggtatatgtatcatataatgtatacaaaactcttcccttcaaaactaaatttttttggaataaatcattccaaaacacaaaacaaatgtatctgtcgttcttgttgttgttgttgttgtttttgagatggagtcttgatctgtckcccaggctggagtgcagtggmgccatctcggctcactgcaagctccgcctcccgggttcacgccattctccttcctcagcctccctagtagcttggactacaggtgcctgccatcatgccctgctattttttttttttttttttttgtatttttagtagagacagggtttcaccgtgttagccaggatgttctccatctcctgacctcgtgatctgcccgcctcagcctcccaaagtgctgggattataggcatgagccactgcgccaggccatatctgtctttttaaccagagatacttatcctaaatttacattttttaagcatgaagggcactatcatcaacaaccattattatagaaaaggggccagggatcattagctataatgttaaatgcatgattatacttyaccatgctcttttgtgttttgaattctgcattcccagtcacctttcatgctgtccggtataactctctcctattattggttatcttcctctagttactgatgctgtttttataactttacacttctattttatgcttctaatctgtggtgagctggacatttagatgactacatttatagaatgtgttacagaagtaaaaatatatacaaacaaagcaaggattcacsaggtctattatggctgaagtcaatgaattttagtgtatggcctgtgacatttattttagttctgaagtattgctttttatttaatcaacagttcttgattttgctttgggtagatagccaaagggactaacctataaatgagacatttgttgtcttattaaaaattagtaattaaaaattaaaattatttcatatgttttagcaaaacataagaaataaaatatttcctcaayaataaattctcatatactttataggtatgagtgctgattttctctttagagtatgacagcttagtggttagcttacttagcagatagcaaaattcatatcttacaagttgtaggttgtcacaagttaatgtaatccttcaattgaaaaactctggtgatcccataatatctgacatctctaggtacattatttcattttatttcttttgttccagacccagctaatatctaatgaaaatgattgcttagcatagagccttacatggcaaagctgtttgatagacaataaaccaatagcgatgcaaatgacaaccatcagtcctattcatttccatattcttagacagccagtgcctggcatatcacaggcactcaataaatgtttcttaaagtgatgcattaatacacacatataactgactcagttacgtgggtgccccctactcaggcattataggtctgagtttaattttaacatttagaggatttaatatttagagaattgcaatgtcattggaaaagttcaatgatcgtatattagtcacatgcatcaccatttaaatatcctgagacttccctcctactaattttttwaaggagaaagaaataatagctataaatctacaaagaaatcatgagaagattcatagggaataaaatttcaactaatatgtggtcagacagaaagcatagagttggcatcacaacccataagggaaaagatggagtagttttaaatgatattaacaaaagcagttcattataagaaaaaaataaatttgagtccctttctcacaccacatccaaaaggaaaattcagatggaataaatatcgacatataaaagagaaaattatattgctaataggagataatacagagaatatcttcctggttccagagtaggggaagaatattttggcttaatctagtcccaaaacgcttctcgttttatagttgttttttttttttaaacttttatgttcaggagtacatgtgccagttttttctatcaataactcatgtcacaaaggtttgttgcagattattttgtcacccaggtagtaagcctagtacccactagtaattttttctgatcctctctcctcccaccctcattttatagtttaaatggagttccttctccttaatcaggagaaaagccagaaccaayagttgactccccatcctgttctttcctagaaaccatttttcatatatttatctgccccaagggacacatacattatcttgaatccttctgatcctyggagatctggttaaacctgacctgaaacacaatttcaggctgtgactatacagagccctcctcacagtctctgggagctgctgagacaggtcctcaggctttcttctgactgtgtgttttcctrtctgtgtggacttttgccctccacgagtacagatatgtacccagccccgtcactggttcatatacacaccttcaaacacacatcactcttaaacactcacatctactaatgacatgcatttctcagtttggtaacttcactcaacatacagcagacgatgggtggagttattttaaattccatacagctctctaccatctacctagctccacaaccctcttcctcactcctttttctarattgacaggtatattactttaacatctcacttagaacatttccacccacttccaggtccctgaagatctcatcttccactctcaatcacttgtcaagggactgtagttattttctttgtatttttccctgagcaaatacactagctttttataaaaggaattctgatgaaaggtattaacaagatttccccacctcatcacaaatatggggttatcatacctaacgtgatgccatgtataaaaatcatttggtgactcaattatgtagtccaggaaagaaagctaataaatagaaactacactgtaaatagtctagacactagaacttggttagtgacgtcatgcctaaatccattaagaactcaccgctaagttgtaagagttaagacattgcaactaagtggtgaaccagtaagtattgattttaatgaagttggaaaatatattttccttactacctgcaggaaaacactctgtttaaaataaacgaacaatgaacaaacaagcagaaaatatactggcctgaatactgtaatgaaaaggacactatgtagacctcctgggtatattcgggttaaaagtctgtcactcttctgaccccttgtcctgaggaaagctacttaggtcaaaagggacgtgtgcatctgaaaggttgtagtgacgtggagtgctgagaaagtagccccttcttcacaccctctgtaatcactcaacccaggctccaccaatgcaaagacaaccaaggtcaggccagagagaagtacaaataagactaatagtggggcaaactaattcccgggtaaatccagtatctcattttagagactcttaagtgaacatgttatggttaaattttaatcagctgatgaacgtgtaccaaccttctcaaatttacttaatcttagaaattaatttctttcttttggattaaaaaaaaaatctgtaagaatttgcccatgtgtggtggctcactcccgtaatcccagcactttgggaggccaagacaggcagatcacctgaggtcaggagttgcagaccagcctggccaacayggtgaaaccccgtctctactaaaaatacaaaaattagccgggcatggtggcgggcacctatagtcccagctactcaggaggattcgcttgaacccaggaggtgaaggttgcagtgagccaagatggcgtcactgtcctccagcctgggtgacagaatcagactccaggtcaaaaaaaaaaaaaaagagaaytcttttcatcttacacattgtaattttttttgtttcggattcaggggtacatgtgcaaggttgtgtttatattacatgatgatgaggtttgggatacgaatggttctgtcacctcacccagatggtgagcatagtactcaataggtagtttttcagtccattcctccctctctcctccccmctctagtaattcccagtgtctactgttcccatctttatgtctatgtgtttttaatacttagcccctacttgtaagtgagaacatacagtatttgcttttctggttttgcattaattcacttaatttaatggcctctacccgcatccatattgctgcaaaggacaagatttcattgatgtttatggctgtgtggtattccagggtgtatatgccccacattttcttgatccaatccaacactgacgggcacctacattgattccatgtgtttgctattgtgaatagctctgtgatgaatgtatatgagtctttttgatagaatgaattatttccctccgagtatatactcagtagttggattgctggattaaaactacaatgagccaacgggggcgggtcatgaggttagaagtttgagaccagcttggccaacatagtgaaaccccgtctctactaaaaatacaaaaattagccgggcatggtggtgtgtgcctgtagtcccagttactcgggaggctgaggcaggagaatcacttgaacctgggagacggagtttgtggtgagccgagatcacaccactgcacccagcctgggcaacagagaaagactccatctcaaaaaaaaaaaagaactgcaatgagataccatctcacaccactcagaatggttattattaagtttaaaaataatagatgctggcaaggctatggaaaaaaggaaacacgtgtawgctattggtgggaatgcaaattagttcagctactgtggaaagcagtttggattagttcagctactgtggaaagcagtttggagatttctcagaaaaaacttaataagaattttgagtaaaaatagactagttaggtaatcctaaatgaaagggagaaagacattctcagtgcaaggtgtagaaatgactcatttaaattgcargatttcaatgagttgacatttaacatgaaatccttcttccctataatctccagagtttcttttggcagtgattaaaaccatttcctaaaatccactatgatttagctattttagcattaatttgaattcttataaaccaaaagaatggcttgattaacaattttaaaaacatttctactctcagaacatggagctacaggaatgctattgtcaccatcgttataaaatgttaggaggtcctatctctctagtaacttaatcttaatgtatgtgatccmaggggaaaagtgctcaattaggcatgatgttcaaatgcctaggcattccctggggcttctggcattagtatcttggctcctggcatagttgttcakgacgaaaaaattatctgctcccctttgtcaacttcattattttatactttcaaagttctcgttatacttttggatgtcttagactatgctactgaatgtatgtttcccgcacgaaaytttgcacagcaaaggacaaaggatagtccagactctttgttaaactggctagtcccaaattttctctaactggcacacttccagaagtgaaattctttctttattgacttcccatttagagtaaatgaacccttctatttgtttctatgacagacataaaaagaatttttaaatggtatagttttacctaaatgggaaaaaaattcaataagttcaattaataaaaaaattatcattgaacataaaattagttcctcaaccattttatgtcattgtataatgagggcacctaatttcctacaataattatcttagtctatttctgctccgataacaaaataccttagacwgagtaatttataaaaaacagaaatttatttctcacagtttttgaagctgaaggcccaagatcaagatgtcagcaggggcctggcacagtgrctcacacctgcaatcctagcactttgggaggcagaggcaggcagatcacctgaggtcaggagttcragaccagcctgcccaacatggtgaaaccccatctctactaaaaatacaaaaaaatccmccgggagtggtgrcacatgcctgtagtcccagctacttgggagactgagatgggagaattgcttgaacccaggggacggaggttgcagtgagctgagatagtgtcactgcactccagcctgagcgacagagtacagtgcactcaagccaggctcaagtgactggttcaacaaaaaaaaaaaaaaaaaaaaaaaaaaaagatgtcagtaagtttagtgtctgaatgaggcccactttctgcttcyaatatggcacctcttgcttattctcatgtggtggaagtaagcaraagggccagataatatgtcctcacatggcagaagcgatggaagaataagagtacaaaaaggggctagctagctctctccagccctttcataggcactaaacctatccatatatgcgtgcagagccctcatggcctaaccaccttctaaatgacccataacttagtactactgcattaggagattaagtctcattatgaattttggaagggacacagacattcaaatgatagctgtaacactgtagaatttagaaaataaatttttagtcaattatcttatttatgagagattatttctaaatttgtacaggaaaattacaaaattaatgaattttcttgtttttattktaaaaactaactttatttgtagaaaaaataaaattaattcaaaaattgccttaartattttttaagttaatgtggagaattctcctttaaaatattgaggtactgctactaagaaacttgaaagaccaaagatctatgaaaatgtcttcatttctaatcaactatgtctgactttggttcatggcaaagaggtattaacaaaatgaatccattgtggtagctaaaatttgtttttatactatttcaaaggcttaagaataaaaattaaatctatcagatttatattaaacctaataaaatgttttagtttattggctttaaaaaattttaattcatttttctatcatctatkacagtgccgattatgtcactcctaattaaagagggtgaggtccctccttatttaaaatcagagcrgtattttgagaatttcaatatttgaatgataaaagaaaaagccagccaaaggtctcaaacattcatttaaattatctgrcagagagaacccgtaagttctatatttgaaagaggtcttgtataaaactggagaactgtttattttaatagtataaaaaatgaccttgtatctccctgatagaaataattctrgagtcaggtataaacagactcggagaggagagacagagaaaatgtactttaactargttataggggcataaaaatgaaatggatcttgacgacatcacaagctctacagcagaaatgggagcgtttaatttgatcctataattttcttttctttctttttttttttttggaaaaaggaaggttttttaaatgacatacaccggccataaaacatttcaagagatgtrgaagcctacaatcagctacttgttttaatgaacacttcaaatttagcctattcaaaaatrtgtttttctcttgtcaatttcccttaagragctgcttgaagggctgggagtaagggcaaggttggtggtagggaccaagacggaagtgaccgagaaagaattcagaycacatgaaatctctaacatgttttaaaattaaaattaaaattaacagtttgtgttatgtttatacttatcctctggccatgttgtaataaataaataaaacctcttacaatgaagtgtgttttctaatttctctcactggctaaagggtgattctgttcagctaatagtgtgttgtttcagtggagattcaggtgtataaataagtgagaaataagccaagccaagaaagtagcacrctttgcttccttctgcttgttaatttagaaaaacagtgctgctcccaaccatcactaaatgtgctttattccatgggtggcaattctagttcttgttytcttggaatggctgtccctattttcatgggtgggaggtctgtgaaggtgaataacatggcttccacgggacgtagactcaatggtgaaaccaaatgaagaaatctgtagccyccctcygagctgtctggtggagattaggtctgatctaacaccttttggtcttgctctgtctaaacaaacactcaaatctgaaacccagccagtcatagcagtccctgcctacacatgtaatcgcaggcatttcagagcttattcttaaggcctggctgtcaagtttgtaataaaaatatgctatttaatgtttgcagaatgaggaaagctaactggccgagtggattttttccragctgtcaattattctctagaatcaagaartatttttcttttttytttttttttttttaacaaacagtgacactttgcttgtatatagctcagttggtacccactctttttgatcatctgacattcctgcaatgagtggaaatttacaactttaatgaaaactttgtcatcaccaatcaaaactataagtgaaattaagtgcaatcatccttttaagaatcatctgagagtcttttagaactagctcataatgcaaaacatctactttcaggcataactggtacaaatcagaatcatttacatgsttatcatagtaatttccagtggtgtactgctttcttcctatatcattcctacatcatttatttagcacatatttattgaaattgtagagcgtaagctccaagttacccacaattgtgtcctgggcctcaaaagatttataatcatttagaaaggtggacttgcagattctgagaaaayacacacacacacatatacacatgagataaatttctgtagatacaatrgataagtgttttttgttttcttgattgcagcckctatggtctgaatattcatgtcctaccaaaattcctgtgttaaaatctaatcccccagggtaatggtattaagagggggcctttgggaggtaattaggatcatattaggagccctcatatgtgagattagtgcccttattttaaaaggtgtgaggaagcctgtttgctccttgtgccatgtgaggacacactccctccatgaagcagggagctttcaccagaaaattcatttcactgaatcttctgacaccttgatcttgaacttcctagcctccagaactgtgagcaataaatccctattatttataaattacccagtctcttgtactctgttgtagcagcccaaacatgctaaggtattaggttggtgcaaacataattgtggtttttgtattcttgaaatttgccatttgatattggaatacattcttaaataaatgtggttatgttatatatcattttaatgtgcatttctggctttagtttttgttttgtgaatgacttatttcttgctgtttattttatattaattaaactatggaaatgatgtcagacaaaaagcaaattcaagagattttcctatttgagttcaaaatgggtcttaaagcagtagagacaacttgcaacattaaygcatttggcccaggaactgctaacgaatatacaatgcagtggtggttcaagaagttttgcataggagaggagagccttgaagataaggagcatggtggccggccatcggaagttgacagtaaccagctgagagttgccaaagaactcatagtgaaccattccatagtcattcggcatttgaagcaaattggaaaggtgagaaagcacaataagtgggtccctcatgagctgagcaaaaataaaaaataaaaaaaagttattttgaagcaccctcttctcttattctactcaacaacaatgaaccatttchcaatcdgattgtgacatgccatgaaaagtggattttatatgacaattagctacaccagctcagtggttaaacygagaaaaagctccaaagcacttcccaaagccaaacttataccaaacraaggtcatggtccctgtttgttgatctgctgccagtctgatcctctacagctttctgaatcatagtgaaaccataacatctgagaagtatgctcagcaaatcaacgggatgcaccacaaactacagctcctgcagccagcattggtcaacagaaagggcccaattctccacaacaatgcctgactacamgttgcacaaccaacccttcaaaagttgaacaaaytgggctacgaagttttgcctcttctgccgtattcacctgacttctcgccgactgactgacactttttcaagcatcttgacaactttttgcagggaaaacatttccacaatgaacaggatgcagaaaatgctttccaagacttcaaatcctgaagcactgatttttatgttataggaataaacagacttatttcttggcaaaaatgtgctgatcataatggttcctattttgatttataaagatgtgtttgagtctagttataataatttgaaattcacagtccaaaaccgcaattatttttgcaccaacctatagtacctatatgaatatagtcactcttctccaggctcatattctgttctccatagttragacccttaagatccactcccaggcaggttttcctggttataatcagtacatattagtcaggcctatcactctatgttgaacattccctttcttctcctagtaggaacatgattttcctgattaagtcatgcagagatttgtcctaygtaattggttcagaggcaattaggggaagtaggggtagaaagtaagaaagacaagcatcatcttagaagtcatcgatcttgggtgaatcctttgcacagtttcaagcaatgggaagatgctcttttcgtcatgatggagggagggtgtttattgctgctggctcatagggattgaaattcttagttcatcctcccgaatgtctccatccaggcttaatattccactcctccccaatagggccctgaactcagtatraagaatttgacagaaatatgaatttagtctccttttggctctacctctcttcctttaaaatcttgaacctgattttcaacacatttttctcttcaacacattttgcacatgaaagaaatgtgagtctcttgaaatgctgcaaagaatggcttttggcttttactctgccaccttatttaatagtgtctattttcttccttcagagcgtatgtggctaccaamaactgctaattaattttacaatctttattagtgtaatttagcccatataattcatgtaaagaactattacaaaatgaatgcattacctcttcatttgtacttcagtccatcataggtggtgagaagcagggtgctgataatctcagttggtctctttggattttggaaacaatgcatattacactgggaatattgcttttgttccatgtaataagtgacttagaaggctgacagttttcagtgtggcccatagcaaggtagattcttcagcagttttagttatggtaaaagtagctctgccwctttgtacaaatgacttgcagatcacatagtacaggaggtcggaggtctttttggtagataaaamattatgtctagtctctggagaaccatagcaaaaaaaaccacagcacagaactaggaattgaaacaaagtcataccatctttggcaaagaactagtcacattttgaaagaagctccttatgctgttgggtcctrytagagatggtgcaccagarcatggactaccaggtgacaatgtaatgaaatgtccacccagagctggatcttttcttttccatcagatcacttagaaacgtccaatctccaagcccctttccagctccacartggataaaaatcttagcaaagggagagaagtcagtgcatctgaggtaggtgtggtatgggtgtcaggtcctctgttcctatttatttgtatttggatttcctttttaatcctttgtcaagaagattagacaaagagatgtctgtccaaagataaagaaatctagaatggatgacaggaagaggaaaattaagatgttgggatcaactgcggtggtagagactatagaytgtttgatcagagcatcctagggccaggtttcttgttttgttctttcttgtttgttttggtttggtttttaagaaattgtgactggccactagtacatgttgtttgcattagtttactatcactacataacacattattactactcacctagaggcttttaaaaaaaatctcacatttctataattcagaagaccagcaagtgccaaaattaaggtatcagccaasttggacatttatctggaggctatgagaaagagcctcctcggagattattcagcttgttgggatagagtccagttccttgcagttgtagaattgacagccccgttatcttgcctgctgttggctaggaacttctctcagcagctagaaatttgttatgacctgagctgtgttccaccacaatttgtatgttgaaattctaactcagagtatctcagaatatgactgtatttagagagagaatcttcraaaagggaaataaggtaaaatgaggtcatatgaaaggacctgatccaatataattggtatctttaaaagaagaggaaacgtagacacaggcatgtacataggaaagatcatgtaaagatacagggagaagatgacctataagccaaggagagagatcttggaagaaactacctctgctgacatcatgatctcagacttctggccttcagaactgtgagaaaataaacttctgttgtttgagctactcagtcagttttttttttttttttttttttttttagttggagtttcactcttgttacccaggctgaagtatgaagtacaatggcataatcttggctcactgcaaactctgcctcttgggttcaagtgattctcctgccttagcctcctgagtagctgggattacaggcactcaccaccttgcttggctaacttttgtatttttagtagagacagggtttcatcatcttggccaggttggtctcgaactcctgacctgaagtgatccacctgcctcagcctcccaaagtgctgggattacaggcgtgagccaccacacctggccagtctgtcattttttatggcagccctagaaaactaatgcaaagctactactctctggttcttgtatatgggcctctccatctttgaatcagcaatagtgcatcaaatctttccagtaccttgaatcgcttctgctaccagccagaggaaattctattttccactattctcacaggagacaattccactacattttctgccattacctaacaagcatctccattcttcctgtttccaataacatgcccctcacttcattctgagcccttaccagaaaggctcataaagttcatattttgactcacaatcggttgaagacaatttaggcattctctatyatcagatctttcaaaatttttctcagacttcttccagcctccatccacttggtttcaaagccaactccatatttgtgtgtgtttgttatggcagcacctacttccaaataccaaaattatctacaccagtcagagttcaaccggaggtgcagaacatttaagattgtacaggtattaraattatatctctcttgatagatggatggatggacagatgatagatgatagatagatagatagatggatagatggatagatgatagatagatagatagattagatagatagatagatggatggcatggttgtggggactggaataaagtcctaaatccatagagcagacattcaggaaggcacagttttgaacctgtggctatggttgaagctatcatcyacaagaaagcaagatcacaaacaggatggaactccctgagaacaggttgaaattgtcctcaagagaaatttcttctttttctttctctttcaattactmtatctctctctctctctctctyagaaacatcaaccctgcttttaaggctttgcaactcattcacttaggcccactcacattatccagaataatccctcttgcttaaagacaatgcattaggatctttattacaactacagaattccttcacagcaacacctgtatttgtgtttgattgtataaaaaggcaagttgaaacatcacaatagccaccacagtgttagkgctctctgtacaagcctttattactcactcttacctcatgggcagaaagtgtcctactgcaagcatttgtggctctcaggccargagtcttgcctcaatctgtgcactagatggaatggaaacaytggggaacyaacatctccaggaagtattctcagcccatgaaaaatggatctttgaggataaatacatcagcttktgtacccatcaggtgctcttctccaacagaattaattatgttaccctcacccgcagactgttcatgacatcctttccttctgcctcacctgcccacttccctatcaatgattactgaagtcaccttacaaataaaccactgctactcatattcttgccttgaagtttgcttctgaggtaacttttcctaagacacctctcttctcagtattcttttctcaccaactcctaaycaaattagtcagtgttcttcactgcaaatgacacaagtcaattctagtaaattaataggtagaggctgtttgcaagaaggcaatctgatggctccagaaatgaatgaaagtctgtagcactaggttcagaatatgacagaaatgaagagagatgagtgtttgggaacatagccatgattttcccttaaaaactatctgcttagaaaatcccaatcactggaaactctctctagcactttgggatcttggctgcccctttctcaagcgatttgtctgtctttgtatttttgtgccactttctcaagtcctgagtggggtatctgattggcagacacagggacacatggccacatcttggcagccctgggtaaaggatggtgcatacttatcttcccaagatagaaagtcgatctactgggtagctaagggaatacaaatgttcactgttttcacagtagccatttgcagtaaagaactttccataggatagatcttattttagtgcatgcagtgatattagtgcaaatactgaattttaggaaaggcattccaacgtcttttttgtctttagaacattctcatgtgtgtyctgggtataaacaaatatacacacagcaagattgtacccacacatacacatatatatacaaagagcaggaactgcttgagataaaaattatttcatacgatttcaatcagtgactaatcttttcttctttactctctatgttaagcaaccttgaacaaaactaaatttcagggataattgcttcagaacttgtgtgggttctctaccaaaatgtaaccagtgaaagttagtaggacatttcagactcctcaaaatgaactagttgtgtttaaatctcatatgccaaattaacacttcaaaaagaaaaaaaaaaagcagcatatgtgatggatggaagcagagctgccattgaaaactgtttaggttgtggttaggttaaatccagggtgaggcagaagaaagggtgaaaaagagtgtaaaaggatcttttaaaaacagtcctatccctgaaaccaccccgaaacaagccattgatgggaaaagtgacttatgatgtctgtcaagcatagtgttttgtgtgtakgtgtgtgtgtgtgtgtttaagagagaaagagagtcagagacagagaaaccaacatgacctacatttcatgcgcagggaagttgtagataagcatattgtatttaatgtatgtttacatatttctttcgccaaaagctcacatgctttctacaggtggccaggataaattcttgctttattacaaaattctatactttccttcaactttcctgcatctcccaaacagaatacatgaaaccaaaagtctcacaaattattcaacctccaagaatatttaaattaatccacctttataatttaaaagggttaaatgccttctgctcatgaatttacaaaacccaaagaacagtgtttattactacaaatatacattgtgctaaggacgtggccaaatgatggggatgtaaaaccaaataagaaatgtcttctaaaagcttacagtttagaaaaacacatacacagataattacaacacagtgcaaagatattattaccaaggcatgaccagatttacaatgggagaaacacagatcaaggaacatagtgagtgcaagtgcaaagtgaatcacaagcaggaaaatgagtcctgcaatgtggaagtcctgcaaggcctaaaacataaggttgaaaaataattagagacaagatcagggagggcttcgtgtacaatggaaagtaatgtgtatgatataggcagtgaagagatattaaaagacttgacactaggaaaatatcaaatttgcattttagatcaagccatagagaatacaaatttttaagggagcaggtttggagacagagagcacaggctattgtagcagttcaaatgagaataaacmatacctaaaccaggaaaaaggtattcatagtagaaataaagtagagaatatacagtttaaagtttttaagaggtacattaaagaaaggttttagctttagtgcaagtggggatgaaaatgccctgtttaggacaatccttctctagcttgataactctttacttaggtggtgtatccgtgacgtagcaatggaatcaaagcaatcagttttgtgggagaggcattcgtctttgagcctgttgtgtttgatgtgcgtgtgcacacacaggcagttgggaaattaaaggagactagagatagaggctgagagtcaacaccgataggaagaataatttcctccttcccaaagatttccacaacctgtgaatatactactgtacatgaaaaaaaggaaatttgcaggggcgattaatttgtagatcacagcatgggaagattatctggtattatccaggaagaaaaatgtccttgcaagggtctttacmgggaaagacaggagccagtgagaggagctatgaaaagagaagcagatgtgatagagagattgaaagatgctgtacccctggccttgaagatacaagacttggccacaagcagttgggctccaaaaggtggaagaggcaagggaaagaaatctctggtagagcatccagcagaaacacagcccttggagactacttggttttaggacatctgacctccagaccagcaagataataaattggtgtttttttaaaaacactatgtttgtggtgattttgtacagaagcaaaaggaaacaaactccatataagagttggccacatctgttaggtgtggtttgagagaaacagaggataaatgctaagagagaaattgttgtaaaaatggagtgttgaagaaactcactttaagaataaaaatagaagaagaaaagtaaatgtgtacttagcttcacaaatttacacatatataaaatatatattgtatatagtacacacttgcattgcaaatatgaaaagaagagcttaaaacaagataagcaaaggaaacgtagttatttttcacgtgacattctctcaaattcatttgatgggaaaaattatggttttttttttttaacaaaaaagtaggaaaagttacttggtctcatacctcttttctatttgaaaaattaaaagaaaacaaaaccaaactaaatacttacaaaacaaacttagcaatattcctgggtgcaagttgctgggcaaaatttctagggatcatggactattgctatgtacttcttcaattggataagtatacaaagggtaggtattccacggaaaaatgaatgatttctctctggggcactctgtcccttcccagtagtctatatttaagtaaatactgtgtgttaagcaattaggagttgcttgtcctaacgtttgtgtgaaagaatgtcatgtaaaagaaactaaaggcatccaatattctcaacagtttttcttccattcctccaaatgaatccaaatattttaccatcttctgccagcacggaattcaagcatgtagtatgggcatctgaaaagcaaaatctcaggaggccaagaaaaacatgagctaatcctttaggtttcccagttatttgcaaatttgcctttcaaagtaagaaacagctaggaagaaaagrgactgggctgatggtttccacaacagcctcaaaatgaaaacatatggcatttttgcttaagagtgacatttactcaatgatttttttttcctgacacaaagaaggaatttaattaaacttttttctttcctaataggaccaggttgttgagatttagtgccataggtctgttacagggctgagaaattattggacagtggctatataggtgcagagtagtaatgaagttctctcaagtctgtttcctgctggtctccccctcctctcctgttccttcactctaggcatattgtatgtattaatccattttcatactgctgtgaagaaatacctgagactgtataatttataaagaaaaagaggtttaatggactcatagttccacatggctggggaggcctcagaatcatagtggaaggcaaaggaggagcaaagtcatgtcttacatggcagcaagcaagacagcatgtgcaggggaacttccctcgawaaaaccatccgatctcataagacttactcactatcacaagaacagcatgggaaaacccacccccatgattcaattacctctcactttgtccttcccacaacacttggggattatgggagctacaattcaagatgagatttgggtaaggacatagccaaaccatatcactgtatgacttgaggctcctcacactacacttctcaaagctttgcacatkccctgtcttggttcaggagtccctgcctcagagaggcttctttgatttttttcaagtgctagtaatcagcccttttgttgatctagacctcattgtccaatacagtagctactagctacatgtggtcatggagcacttgaactgtgggtggcccaaattgagactatgctataagtgaaaaatgtatgctgaatttcaaagactcaatagagaaacagaatgtaaaacatctctgtattagtttgttttcatgctgctgataaagacatacctgagactggacaatttacaaaagaaagaggtttgatggacttacagttccacatgggcggggaagcctcacagtcatggcagaaggcaagggaggagcaagtcatatmctacatggatggcagcaggcaaagagagagagagagagagagagagagagagagagagaacttatgcagggkaactcctcttttcaaaaccatcagatctcatgagacatattcactatcatgagaatagcacaagaaagacctgcccccatgattcagttacctcctactggttcccccctatgacacaygggaattgtgggagttamaattcaaattgggatttgggtggggacacagctaaaccatatcagtctcattgatcatttttatattagttacatatagcaatgaaaatattttttatctattccttaaatgaaatatatcactaaagtcaatttcctctgttaattcttatctgttyaatgtgactagtagaaaattttaaattacatatgtggctcatatttgtggctctcctggcattggtatcctatcgtatagtgctattctagaacttgttcaccccaatcatgaacttaacaaattctatggtacagatgatagtgatttaactgtctcctctaatagtctttttaatggaaaagggcatgtcttacttatgtcttgtctttgytacctattacaacatctagaacttactagacacccagtaaaaagtctgcaaaataaattgaaattaaagcataagaaaartrttttcaaacaattatatagttcaagttatattgttacctgtttacatattattaaaaaatattagtaatgagtaaaatagtttagaattacatttcctcatttttcttctcagttcttggtaggtatttgttaatctatgattcaaaagttatagaaagaaattctaccactaaaattatgttccaaatactttaactctaaaaaactgatgaaatgcttaagccaccaagaagtataggatttttattggcaatatagtgaaaagttagttaaccgttcctacttcatcagaaaacattgtatgttttctaattatttttaacttcactttgggaggccgaggcaggcggatcacaaggtcaggagatcgagaccatcctggctaacacagtgaaaccccgtctccactacaaatacaaaaaaaaaaatagacgggcatggtggcgggcgcctgtagtcccaactactctggaggctgaggcaagagaatggtgtgaacccaggaggaggcggttacagtgagccgagattatgccactgcgctccagcctcggcgacagagcgagactctgtctcaaaaataaaaaaataaaaaaaattaataaaacaaccttactcttggcatatataaatacagattatatataagatgtttcagagaatgtgtctttcagaatacaacacggaattgaaaattatgtaccaaaattatcaatcaaaaatcagttccattgccaatagtatgaaatggacrcatcacactctccagcccaatagatagcatctctccaactgtgatacttgaaagtattatagaaaggaaaaaataaaaataaccttagaccaatgaagtcctctgatcttaaaagaaaacttaaattgtgttttttatcttggatacatgtactaagatagaaaaactaaaatattttattaaggtaagtcactacaaaaaatgcttagttgacaaaaattatttagtttttggaatatctgatttgacccggattttattatttctttgtgccttatctgagtcacattatagaatatgtaaaggaaaaggtcaagcaaaagccaatggaggccctgcagacttcagctggccatgccagggttctgccttttaaatattaccacatattggtaaacatggtatttgttgaaaamcaaaattattccataaaatccagttgtgaatcataatatcttttttataaagttcttgataaaatatgcagttattttacgataatactactccctttcaggcatcaaaacaaactcatggtagagccactcattamccgcttgaccttgagaaaactagtggatttgtaggattctcagatttgtctatgaattcgagactttcatcctggggcctgcctgtttcacaagttgtcatgtgcctgcaagggtggtgaagttggatgcagaaaatccgagtgcacttgtgaatttaagggagtttttacttcaagaggcttcagtttctcattcaaaaatgagaattctttatttgataacttcaaaatcaatttcattttacaaatggtttttaaagaaaatgctgtttaagtaatcatatcgctcatgttatattctttaatattgctaaaatatgttgccatatacaaagtaatgcataaaatggtatttaatacagtttcaggtactatagaatataaatatttgtttttattagaagacggttgggtactttattatatctcttttaccttgaaggtgattaagactacactctctaaagtgagagtgtttgcagagacccagagcactttcttatctcaggtacagatttatttttagagtttcctctgtgtgccagtttcagatctatgtttagttactgctgtataatgtaccatggtaaaatttaaaaaaataaaaagcagttttcaaatgtcttgaaaagcaaatcaccactggaacctcacatgcttgtatttacgattgtatagctactagaatttgcaaaaagagctgggttcaaatttaatgagtgttataaataccaggataaatgagtaactacaaaaaattcctgaacgcgtatactcagttctgtcgcactgactgatatattcaaggctatgatacagattagaatacttttgaactttcagagtaggagagaacacctcccccacaaaaaaaccctcacaaattaatattttaaagagacgtagacttcattttatgaattctcayataaaattttgtaatttttgataacactgtcagagctatcttgctaagtccacagatactgggataatgcctctgctttcaagcattcagagatgaacctgttattaacaggacaagtccaaattccggatcatagcctcacagtcaaactgtcttttgacctttatctacttgtacccttctgtcacctcaaagtcaccttatgccccaaccacactatttttattacactttattttctttcatgcaactacatctgtttcccccgccttttttttttttttttttttgaatwaaatatacttctagcggactgtcccctctgtgctggaattaaattcacctgttaaactcccatcaggttcattgttaagtactctcaratctgcaractcagtaatatctctttctattctaccataatactgtgtagtagcacagggtgattataattgtgccttgaaaacaaaatgtgatcaattaatattagctgaatgttgaatgaaatcaaatgtattaactgacatatgatagagcaactctgaaattttgagcaaggcgcttcatatagccgagtattgctcttttcactgtaagtraagataattgtatctattaccttgtaagtttgctggtaaggattaaacgagatatctagtacttagaacagtgmccgctcttctaaatagccmctgtaaatgtaaagcgtaatctccaagaaggtaagataattctgtttaacccatcattgaatcacgagtaccacgaattatgtttgtcattagtagatgatgaataaatatggatggatgatgattaaatgaatgctggaatgtgttagactatgaagagagcatccagtaaatgtttaagcaatctagtggcacctttctctctctggatattgtggaaacaccaaagaaaattacttaatggtaaagagtacaccctctaaagtgggttgcctaaaatgatatctcagaatggccacctactagttgtttncctaattcatttgagttaattaaccatgagaaagtttctcatctctctgtgattagttcactcctaaaatgaaaatactttgtgacgattaatggagttaaacataaagcacttaggataattctaggatacaacaagattttaataaatgctattactattatttttgttattcaaagtattttttttgacagtgtttgttcggggcgctcccctagcttctcggacagttgcgccctgtgtgctgctgggctagcggcggcggctgcccagtcggtgtaagccttttccgcgcgcccgctggccggcggggagcctgtgagcctgggctccctgcggggcaagrgactacttatcgagaatgtggcgtccctcggaggcaccacggtccgggactacacccagatgaacgagccgcagcggcgcctcggccccggggcctggtggtgcttggcttcccstgcaaccagtctgggcatcaggagaacgmcaagaacgaagagattctgaattccctcaagtacgtccaacctggtggtgggttcgagcccagcttcatgctcttggagaagtgcgaggtgaacggtgcgggggygcaccctctctccgcctttctgcgggacgccggccagcccccagsgacgacgccactgagctcatgaccgaccccaagctcatcacctggtctccggtgtgtcgcaacgatgttgcctggaacttctttgagaagttcctggtgggccctgacggtgtgcctgtatgcaggtatagctgccgcttccagaccattgacatcgagcctgacatcgaagccctgctgtctcaagggcycagatgtgcctagggcgcccctcctaccccgactgcttggcagttgcagcgctgctctctggggggttttcatctatgagggtgtttcctctaaacctgcaaggaggaacacctgatcttgcagaaaataccccctcgagatgggcgctggtcctgtccatcccagtctctgccaaaccaaggcgagtttccccactaataaagtgccgggtgtcagcagaaaaaaaaaaaaaagtatttttttactttattattattaaaaatagagaattatctggttaatgaaatgaaaaatgatataaaccttgaaaggaggaaactatgctcataacaatagcaagagagatgagctttggggcatgctttgtagaattaatgaatttaggagcgattccatggactgatgaagagtaaatttacctagaatataagggggcatctcagaaatgaatctccccttacataattacatattgtcataaaaaagaaaattaagggacagtttaaggccttcaggtacctaaatagtgtatactggataagctgaccacttaaggctaaaacaggaatgattttaaaatcatagctaataaagctgttaaaagttttattttaaatagtgaaagaaaatgcagatagaagaattgaatctacatattagttattttcatgggtagtaactaatattattttgagtgttttacaaaatctgcctaagataaaaagccatattctaaaaggagaatctcttttactcttataaaattaaagcattcagaaaatattaataattctaaaaaagagagtacgcatctattgttcttccaaaaatacttatcacttttttgtatattggtaccataaaaagagaggcccaatagacattgataggaatgcccagatcagggtgaggttgaagttgcttaggagccaataagcacagttctactaatcagaatggacaagagctaattcgctataatagatagattagattgtgcagctaggcagacatttcctgaattagaagagtgaattgatgggaaaaccacttagaatttgcaatgttttaattcttgttgagtaggcacgagtgaagggaacatcctacaagacaatcattttttgtgaatattggggacactactaccgtgtccttagtcttcttcagttttcatgatgtacactagctccttggtgattttgtcttctcccatgagtttaaatgccatttaggcactgataattctaaattatgtatctttaagcctaagttctctacctcagtggcttcctaattcactcagagtgaaagtcaaaaagtccttactatgtccttgagggactcataatcggtgcctcgggctcctttctccattacgtctctgacttcacccagtacttgtcgttcaggtcattccagccactgttgctccttgttctatctctgacatgctaggcacatcctcagttgaggtctttagcaaagattagtccttcaccctgaaataattttcttactaatattctcacagctaaatccatcattacaattaagtctttactcaaagctcaccttttcaatgagtgctatactcagcactttatttaaaattttgtgttctaatatacatctatgcatttttattttattattttactattatttttctctcccaagtgcaagtatatttttctgtttcgttcattactatacttttgatagtttttttttttttttttttttttttgagacggagtcttgctctgttgcccaggccaccgtgcctggcccttgatagatttttttaaaaaaattattggtggcccatgcttgtaaacccagcactttgggaagccaaggtgggcagatcacgaggtcaggagatcgagaccatcctggctaacacggtgaaaccccgtctctactaaaaatacaaaaaattagctgggcgtggtcgtgggcgcctgtagtccaagctactcggaaggctgaggcaggagaaccgtgtgaacccaggaggcggagcttgcagggagccgagatcacgccactgcactccagtctgggtgacagagcgagactctgtctcaaaaaacaaaaaaattattgttcagcaaatatgtcctgctccttcccccgggaagagtacactttactgctcctcatatgttggcttgggctctgagacttgttctggtgaatggaatgtgggaagaaatgacagtgtgccacttttaaatacaggctttcctccatgaaaagagcatgtccaaggcagtctctgtttcttgggccatgttcttagggtaataaacaggtacagcagatctgaattatacccagtgcctgaattgtacccatccaaacccaacctaacccagagaagctcagcagacctacagacagctcacagatccatgagcaagacataaatgctcttctgactcacttggattcagggttgtgtattatgtaaaactcttccactaagcagttgattgatgtacatcccaggctctagaattgtgtttggagatgatcaataaatattattttaattgattaaccaattagacatgtcaaaggatacaaaattacaggtagataggaggaatatgttctaacgagctgtaccactgtaagatgactatggttaacattaattatagttttagatagctagaaggaagatattgaatattcccaacacaaagaaatgataaatgttttagatgatggatatactaattaccgtgatctgatcactatacattatacatatcaagactttactatgtacttcataaatatgtagttattgtatgtcaattaaaaataaataaataaaaagttagaagtaaatgacttttaaatcatctttttagccctattttaactgttggtgtctggcgcacaaattatgcactagaattaatttagttcgttatataattgtttaccctctttaaggtcatgtaacaactttttagtaaatcattatttaggatactaagcagtattttaataaactaaggacatgtgttttctagtaactgttcattcaaatgatatccacataaaacaaattgagttttttgctgcttttaattttttaatcactaacatcaggttattcaaacatcaagtctagtttttaagaaaataaagatgatgatgttggcagtccagtcatttcaatgatactaacaaccaggataaatctactattcagtagttaaatctggtttattacaatttggttatgatgtgacttcactttcagtaacttgcacattggagaaatttagtttaaaggaaatgataaaattttggaggatgccatttccatgttttggtaatgaaccagattgtcatatacaaccatatcaagtgtaatcacttcaaagattttggaattgctcctttctgttttgctttccattctgtttctcctttttgttttacttttcttctttactcttgttgtttttctctttgctacttgttccttttcaaagttcttgttaacacttattaaggagtgtggttcaaagctccaaagcaaacaagcagcaggagaaagggatgaaagaactggagtttaattttcctgccaggtttcaaatggaactcaacagtatctggggtaccagccaggctttgtagaagctgctacaaggctgccacccttttagtctccatacaattataactgggaattgaagaattgtccaaacattggaaagccaaattttcttagaattgagtttccacagcatcaaaaatatgtttgtattctccacaaagatcactcagctctctctactctgagtattttgcctttctccaaaagttaaataccctcacaccatggtacgggaacatactcggttctcaacattagtaaaagctataatataaaagtccttatcagaggaattgacatttctagatggtattaaattcacaaggaaaagacatgttcaatatttcatttgatcttgataatttcactgcaaacattgaatttttaatctctccttcatgaggatgagaccttaattcctttacaatgtccattgcttagcataagaagtaggcttattattatacatatgtcagagagatatatatatatagaaaagtaattcctttattcaactaataaatacttattgagctcatgctatatactagggctcattttaggtgttagggatatccaatgaataaaacaggaaataattctggccttcaaaacatatatatatgtttttcagtacttaataacatatattatacattatatttgtatatattttatatatataagggataacaaacaataaatacaataaataaatataatgtataatatgttagatagtattaagtactgaaaaaaataaagcagagaagggaaatttaaagtctgtagattgggaagaggattcacaattttaggcaatatactagggaaaaactataagacaccattaaaacaaagacttaaaggagtaaacatctaaaaaatatttttctgattacaaaaggaatacatattcacagaaggcaaaaaaagcatttcagaaaatctcagaatattgaaacaactatttgtaatttcatcattcatagttaattcttattaaaaacttgatttagattcatctcagtctttggctataggtggttttaacgtgtgtgtgtatgagagatagaggtagagagaggatatacgggttattcagagaattgggacaatactcaatttcaacactgttaacccaattcttatgcaaatagttttagaaagcagtctttaaagctttttctattttgttaaaatgataccatgaggaatataattgtacataagttcttgcatataccttggtaattatttttgtggatacaactattcaaactattgaagcataattcactactaaaagtacaacaataataacaacatactataaaaagtataattgaatatggaatatttgttcactgatgatttagtagacaacctctcatctaaatcatactttgatccagattatttattgttatcatgtttttaaagaagtttttcttgtcttctttttatattttttccttgatcacatttttttaatttcaaaagtaacatcccaagtgcaaggtcttgccatgaacccatcattagctgaaggcaaatttaaggcacttggctatcccatttaggcctgaggttgcaattttttaaatttttgcaatcagaccttggtgatgaccttgagcagtaggatataaataactcccacaggcttagtgttccaataatggaacactaggtataaatgggttaacccatttatattttcatgatcacgaactctcttttcatgatctaaaacctaaaaacacaatgttattaaattattggatagtctaacctaccagacagtttaatcttgcatattagaaggatgctactataaatgtattcttcctcatgtagtgatgtgcgctatttattttaacttattaatattataaagttttatttagacattttcagtgttagcaatatttaagtttatttaaatttaatttagcagctagcacacaccactactgaagaaaaagcaatcattctcattttcctaaaagactataaagttggaaattataatcctctctttatttctccaatttctaacctgtaattttcatggcaaatacattttaatgaagtcagtgctactcacatattcttcctgattttatgttgcaagtttacatcatctaagtgagctgtgagatacgaaaataggcaaaaaagaagatagcagaaaagccctaatgttttggaaggtgaggaggaagaagaggagaaaacccccagaagtatgcttatttttaaaaatgtgtttataaacctatagttttactgaaatacacagttgatgcccaattgcagatccctttcattttgcagaataatttattaactgttaaa

SEQ ID NO: 95941 - DNA, 25160 bp, Homo sapiens
catctatactctgcaccccctgacacacacacatagcctccccgactatcagcctcacacaagagagtggtacatttgttacaatcaacaaacctacatttatacacatttatgaccccaaatccatagcttacattagagttcattcttgatgttgtatattctatggctttggacaaatgtataatgacatgtatccacaattatagtatcataaacaatagtttcactgttctaaaaaatcctctgtgttccatctacttatctctcactcctccttaacccctggcaagtactgttctttttactacctctatagttctgtgttttgcagaatgtcatatagttagaatcatacagtatatagccttttaagattggcttctttcacttagcaatatgcatttaagttttccccatgtcttttcatggcttgatagttcatttcattttagttttgaataatattctgttttctggatgtaccacagtttatttacccattcacctagagaaagacatcttgattgcttctaaattttggcaattatgaacaaagctgttataaatatcagtgtgcaggtttttgtgtagacacaggttttcaactcatttgagtaaataccaaagagcactattgttggagtgtatggtaaaagtatgtttagttttgtaagaaattgcccagctgtcttccaaagtagctgtaccattttgcattcccaccagcaatgaatgaaagttcctattgttgcacattctcttcagcatttgttgtcagtgttttagattttggccattataataagtgtgtaacagtatctcattgtggctttaatttgcaatttcctaatgccatatcattttcaggatccttacacatgcatatttgccgtccacatgtcttctttggtgaggtgtctgtccgggtcttttctttttggtgaggtgtctgtccaggttgttccttttcttattcttgagttctaatactctgcatattttggatagctgtcctttatcagatatgtcttttgcaaatattttctcctactctgtatcatagtgttttaagtgttggtcaaccttgaggctttatagcaacaaaaaacaatttgaacaaattatatggttctaaagctttagaaccattcttgaagatgcatttaaaatgatctattggctgggtgcaatggctcacatctgtaatgctagtacctttggaggccaagacgggagaactgcttgagcccaggagtttgaaatcagcctgggcaacatagagagactccatctctacaaaaaaattaaaaattaaccaggtgcagtggcatgtgcggtartcccagctacttgagaagctgagatgggaggattgcttgagcccaggaggtcaaggctggagcgagccatgatggcaccactgcactccagcctaggtgacagaatgagaccctgtctcaaaagaaaaaataaaaataatgaaaaaaattatctatcttagattattatttcactaactactgtgaaagttgtcagaatcaaaatggagtcactaatgttaaaacacacacacacacacacacacacacacacacacacacacaaacctgacataccaaaaccagacaaggacacaataaaaaaagaaaactacaagccaatatccttgatgaacatagatgcaaaaatcctcaatgcaatattagcaaactgagtgcaacaacacattaaaaaggtcattcaccatgatcaagtgggattcatcccagggatacaaggatggttcagcatgcacaaatcaataacaagtgtgatacatcatgtcaacagaaccaagaacaaaagccatgtaatcatttcaatagatgctgaaaaagcattcaataaaattcagtgttcctttatgataaaaatgttgaacatgttgtgggtaaaaaaatacacgcaaactgggtatatatgacaaatccacagctaacatcatactcaacgaggaaaagctgaaagcctttcctttaagaattagaacaagccccctcactcatcaccgacagcctgcggtcagcgtgcgcaagccctgccactgccccgcagaaatgattcaattacccacagtcttaagtcagatgacaccagtgtcgagggtcctggctcctcatctcactcgggtttatgccaaagatgtacaatttttggttcagatgcctgagtcttaatgcttcaaggtgtagaccttttactcactgctgtagccattacaatggggccaaagggaaaaacagtgattactgagcagaactggggaagtcccaaagtaacaaaagatggtgtgactgttgcaaggtccattgacttaaaggataaatataaaaatattgcggctaaacttgttcaagatgttgccaataacacaaatgaagaggctggggatggcactaccactgctactgttgccaaggaagtcttcaagaagtttagcaaaggtgctaatccagtggaaatcaagagaagtgtgatgttagctgttgatgctgtaattgctgaacttaaaaagcagtctaaacctgtgaccacccctgaagaaattgctcaggttgctacaatttctgcaaatggagacaaagaaattggcaacctaatttccgatgcaatgaaaaaggtcagaagaaagggtttcaccacagtaaagatggaaaaacgctaccgatgaattagaaattattgaaggcatgaggccaggtgtggtggctcacgcctataatcccagcactttgggaggcggaggtgggcggatcacgaggtcaggagattgagaccatcctggctaacacggtgaaaccccgtctctactaaaaatacaaaaaattagccgggtgtggtggcatgcacctgtagtcccagctactcaggaggctgaggcaggagaattgcttgaacccaggaggtggaggttgcagtgagccgagattgtgccactgcactccagcctgggtgacagagtgagactccatctaaaaaaaaagaaaaaaaaaaaagaaattattgaaggcatgaaagtttgaggatatatttctccatactttattaatacatcaaaaggtcggaaatgtgaattccaagaaaatttctagtgtccagtccattgtacctgatcttgaaattgccaatgctcaccgtaagcttttggtcataattgctgaaaatgttgatggagaaactctaagtacactcattttgaataggcgaaaacttggtcttcaggttgtagcagtcaaagctccagggtttggtgacaatagaaagaaccaccttaaaggtatgacaattgctactggtggtgcagtgtttggagaagaggagttgacctcaaatcttgaagatgttcagcctcatgacttaggagaagttggagaggtcactgtgatcaaagatgatgctatgctcttaaaaggaaaaggtgacaaggctcaaatttaaaaacgtattcaagaaatcattgagcagttggatgtcacaactagtgaatatgaaaaggaaaaactgaatgaacagctggcaaaactttcagatggagtagctgtgctgaaggttagtgggacaagtcacgttgaagtgaatgaaaagaaaaacagagttacagatgcccttaatgctacaagagctgctgttgaagaaggcattgttctgggagggggttgtaccctacttcgatgaattggtgccttggactcattgactccagctaatgaagatcaaaaaattggtacagaaactattaagaaaacactcaaaattcctgcaatgactattgctaaaaatgcgggtgttgaaggatctttgatagtccagaaaattatgcagttcctgagaagctggttgtgatgccacggtcagattttgtgaatatggtggaaaaaaggaattattgacaaaacaaaggttgtgagaagtgctttactggatgctgctggggtggcctgttaactacagcagaagttgtagtcaaagaaattcctaaaaaaagagaaggaccctgtattgggtgcaatgggtggaacgggaggtgttatgggaaatggcaagttctaatgattagaatagcgttttactttaattaatgaactgtggcaggaagcccaaggcagtattcctcaccaataacttcagagaagtcagctggagaaaacgactgaagaaaaggctagcagatgtttaggaaatcactataacaatcagttactggtttcaagtgacaaaatatataatgttttactgctgtcactgtccatgcctacagataatttattttgtatttttggataaaaagacatttgtatattcctaatactgggtgcgagagcacctatggttccagttccagctactcaggaggctgagggaggaggatcgcttgaacccaggagatcaagtacaactctttctatatatatatatatttcatatttttacataataaaattctatatggcagttaagaggagtaacctaaccatatatcaaaacataaatctcatataatgttgactgaaaaagaaatttgaaaaatatgtccaacctagtaccagttatgtaaattttaaaatacaccgtatgttgcttataaagatatgaatgtttataaacgtataaatgcaagatccatgtttttacatggattagatggacatacactaaatccataagagccttggagagaatgttacacaattaaactgaaggcaaatagagaaagaacatccatcttatttgtaatattttagttcttgtatttaaaaaatattttaaggaaacatgagaaaatactgtcatttctgggtttaaaacttggggttttgaaatttgtaacccagccgggtgtgttaaaggctcacacctgtaatctcagcactttgagagcccaaggcgggtggatcacctgaagtcagcagtttgagaccagcctggccaacatggggaaaatccgtctctactaaaaatacaaaaattaggcagccgtggctgcaggcgcctgtaatcccagctactccggaggctgaggcaggagaaccgcttgaacctgggaggcagaggttgcagtgagcctagctcgcgccactgcactccagcctgggggatacagcgagactctgtctccaaaaaaaaaaaaaatacataagtagaaataaaataaaataaaatttgtacctcaaatacttttctgtatttttatttctcaaatttaaaaaacgagctgtaaaaatgtttcattgcgaaacaaatttcagaaattgactcaaaaagaatgcaaatacttgaatagtctaataacttacagatgttccaaaacatcaaagatccattcactcaaaaaggcaccaagcccagccagttttaaggctttctacctaatgttccagaaacagtgtcctaactcacataacgagggtagcgtaatcttggtaaaaaaaaaacggagccagattattagcctccccaattcagcagtgtattaaaccgcatcatcttgcttaaggtttataaaaagagtgcattcatgattcatcaggaaggcaatttataaagtacagtaaaaaaacgaggaaagtcttcatctttatagcgtaaagcttaaagttcagctgacaaaaaaacagtaaaatttattatgtattttttcaaatccttgcaaactaggaataaaacagaatttccaaatatcattagaatgaagaaagaacattcaccttagtcaaaaacaactcagaatgcccactatcaggttctagttcacagaataaaatttaaatgttccaaagaagaaagcaaatgtcaatagtcacggattatacaactgtctacttagcaatttcaaggagagccactgacaaatttagaattaagacccaacaacaacacactggtcgcccgggacgccagccccactcctaggcctgcgcatgagggcgagggcatgcgcatgcgcatgcgcacgccctgcgcacgcgcatggaacgcagcgaaggactatggcaggggagaacytcgctacgccgttccacgggcacgtgggccgcggcgccttcagcgacgtgtacgagcccgcggaggacacgtttctgcttttgracgcgctsgaggcagcggctgccgaactggcagggtgcgaggaggggaggggctctgacgggaaagggttgcggctttctgaagaagtgcggtggaggagggccggaacggtgactatcaccgccctgagccggagcaggcggggtccayttgcagatgattgacagccaggacgccgtaattgagaattttcctgtagctacaagtaatgagtgtgccggggacgcatctcctttgccagggggctgctctgtctcatgagctccctgactgcttaccatgcaaaggcgtatcttttcctgtcgcctgttaatctgaagaacacatgtccctgagagaagcgatagtataacacgtttggaaacaaaatattccggaaacattgcttattaatatttttaaagtattacatattaaaattgcatggtattatttgatttactcagcacatagaaagcacccttaacaaacatgaaagaaagttgtgttactggagtggggaaatatttttaaacccactgaatagcatactctagcaccagccagtcctcacatgtggctacagagcgcttgaaatgtggctagtgctattgaggaactgaatttttcatttaattgttaccaaaaaaaagttacatgcagctagcagacaatagtctaccctagcactttatttaaatggatttattgaagtgatcgccatcaattttaaattaatagcagaaggaatgaatactgacattgtgatttttaaatgtaaggaatttgggttgttagatttgtttgaagataagatgaactgggttttctcaggatggaacaaacagctttcaggtttcaaagatctatattgtatttatttatccctcttaaacttggtcatatttctccagtataaaatgtcccagctcttattaaactagtctttcattgtagatgatggaacttttggatctactggaatatacagtggaacagtactgttttataacttgtcttttcttctcaagatagcccagaaagatttacaagcacaaattgcactgcaaagtatgctgtaaaaggagctgattttgttataaagtcytgggttatttctagtttggaattctaattatttatgagaccatgatagttattttcaaagagaagccacctggtgagattctcagaccttactaccacctaataaagacttgtcagatgtgtagactggttccaaaagtttaaaacctctggagcttgtcactgggtagttgttttgggagttcagtgctaaaaattyccctaaatgccatcaagctgatctttttaatggggatgatttatgcttttgatgcatgtataacattatagagggctggcactgtggttcgtgcctatagtcctaactacttgggaggctgaggtgggaggatcacttgagcaagcscaggagttaaaggcwgcagtgagctgtgatggcaccactgcactctagcctaggtgacagagcaagagcctgtctctaaaaaagaagcaacttccaagattataggcaagaaaataaatttaatggaaagataaagtacagtagaatgaagattttatagttaacagcattctaagatggttaacattcaaagatcagatactattttcccaattagcatatagctgtccagaaaaagaatttttgtcctgctctattattggggcaggacmaagaattattattttaattctctaggatatactgatggctctatgaatgttaggtattaaaaatgatagaggaacttttttcaaaaataaattttgtaataatacaaactttattttaggaaatactaagctaggagctccttgtgcgaaggaatgatgtctttcacattaatatttccaaccctagattaacatttttccatactttttaatgtaatggtttgttgaaattaactgaaagccatgtttggtaatagataacttttatggacttatattacgtacccaaaatattagtaattttgagttatgcaatattaagtacaaagtagttgtcagaaattataaatttctattttcatatatttgcaggtgagtgatgatgctagagaaatatatatgctagaaataacactagcatgagagttttctgtgaagagtattttgattctactatactaatatttatttatttttttttcagagtggaaatatgcctggaagtagggtcagggtctggtgtagtatctkcattcctagcctctatgataggccctcaggctttgtacatgtaagtatatcatattcatctagatcttccactgacaggttaactatgataactctaatgaaataatttttaaagagacagtatgtatcttatagtatttaagcatagcaaaaactcagattacaaactatgcttccctaaaaattattcatgttcaaactgctccatcatactacgtaattgtagaagcagcataattttagatcatctctaaatttgatttcttagctaartaatttgatatcataagacatttaaagttgcttaaatttatagaagattgggaatgtagaaaagtataaagaagaaaattaaaatcacctataaattttaccatacatggtccaactgtgtttccttctgtttttttttcatttcctgtgtttttaatttaatttcgtctcataaacattttcctatcaaaaattccttttaaatttcatttttggtggctgcatagtactccttcattggatgtataattcataaattccttcagatgtctgtgcatgtatgtgtattcttctactcttggacattgtatcaatataacagtctttttcatcaatagaacaaatccttgttctctttttctttgccattattgaatacrttctaatttttttttttctaaatctgttctgtgtagaattaatggaacataccttgatattactcartaacagatttgccttatggacataggatatagtttccttccatttctgtttataggtgcactgatatcaaccctgaggcagcagcttgtaccctagagacagcacgctgtaacaaagttcacattcaaccagttattacagatttggtaagataatctttgtccagtaataattttcttttcaaataaagttaagatgctttaggtcaaagaaactttggtaagtaattaacttttgacccactaagcagtataccatgtacaaagtaaattctttgttgatgtaatccaccttttccacaattcaggcctctttcagtcagaagtgatagtgaacccagttcaaactggcttaaatttaaaaaattagtccgggtrcaaaggctcacgcctttaatcccagtactctgggatgctgaggtgggatgattgcttgagcccaggagttcaagaccagcttgtacaatatagtgagaactcgtctctacaaaaaataaaaattaaaaaaatagctggacatggttgtgcgcacctgtcgtgccagctacttgggaggctgagatgcgaggatcacttgaccctgggaggttgaggctgccttgagccrtgatcgtgccactgcactccagcctgtggaacagaacaaagccctgtctcaaaaaaaaaaaaaaaaaaaaaattgatggcttcagcacagctacttccaggaactctaagaatgctatagacatctttttcttatctctgaacttctctctggtggctctattcctaggcagtcttcccttcatggtaacaagatgtttgcatatctgtatcttatttctgaacaccttcccaaggaaagaggccctttctattcagttactctagaagaggccccagaatgagtgttatctggatcaacttgggttatgtgcctatctctcaaccttttgctgtggccaaaggagatttgaatgtggagatgattggcttcaaamtgcctcatagttccatcccaggagctggattgggataaaccctactcaggccacttagattgagaatgatgggaggtagagcttccctaacaaaagtcaaggaaattaaatcagaagaaaggggcagtgggtcctcagtaggtaaaaacaacaaatgacaactgcacaaccattgttttaagaagttaacagcacacattttcaagtggcagttttaaatttgtaggtttttaatttatatatgtcaaatacctttttataggcaaaaataataatagcatgcaccaggtagacatatgaaaggcaaaatacttctgtgctccttaacttgcacttttcttacaatgacgagggtaggtagctttccggtttyttttttttttttttttttttaaataaatgattttgtagcttagaaggaattaagccaaagagataagaaattattttcatattattagaagttgttactgctaataaaagctagaatatcaagaaaggtactccagtgatttacatgagatcaacgtggtgatttttttttttatttaaaaaatttctttctttctttttttttttgagacacagtctcactctgtcgcccaggctggagtgtagtggcgcaatcttggctcactgcagactccgccttctgggttcaagcaattatcctscctcagcctccccagtagctgggattacaggcacccaccactgtgcccgactagtttttgtatttttagtagagactgggtttcatcatgttggccatgggttggcgaggctggtctcgaactcctgagctcrgatgatccgcccgcctcggcctcctaaagtgctgggattacaggcatgagccagtgtgcctggcctaaaaatttctttaatgtttccataattagtataagtaagtgtttttgatagaatggtgaaacaccagagatagaagagactatagaacagtatccagtaaataatggtaggtatctgtacagatatcggaaaaattgtgaaaatgttagcatatatagttgtaaacttatatccaagtctatacagattatacagaattagagtttgcyttcttatttyattttctaaaagtgaacccagaatataaatatatgtgctgttgaggagtataggctttttaatattcattctgatagtttaatttccttatttttatttaattgcatgtattatttttctgaatgaaaacataaaaatacttcatttctgtctacaagcgtmgcccgtaacacattattttcccaaaaacatgggagattatttttaaagattaatttgtcagttatttaattcagagtttaatgtaaaattcttactgttgttgaatacatttaggtcaaaggcttgctaccaagattgaccgaaaaagttgatcttctggtgtttaatcccccctatgtagtgactccacctcaagaggtaaaacwtacaacaaaatttaattattaatattttcaattattttgtttgtaaaatcaaatgaatgtcatcctatgacatcagtcagctgctgctatcacagwctactctgattttactcctaattgtcagtaattgagtcctattaaaagacctaggaaaggaaccttaaatgatggaaatacaaactgtgacacatatctatccctaaaaatcacattcatatcaggccatggtatttatattcatatattcaaatataaatgtacatatatattacatgtatcctttatcatgaataaaaaatttgcaaaacaaaaggttttaactggccgagtgcaatggcccacgcctgtaatcctgtactttgggaggccgaggcggcagattacctgaggtcaagggttcaagaccagcctggccaacatggtgaaaccccatctctactgaaaatacaaaaattagccgggcctggtggcacacacctgtaatcccagctatttggagactgaggcaggagaatggcgttaaccctggaggcggagcttgcagtgagctgagatcaagccactgcactscagcctggacgatagtgcgagactctgtctcaaaaaaaaattagccaggcatggtggcttgcgcctgtagtcctacatacttgggaagctgaagtgggaggatcacctgagcccacaaggtggaagctgcagtgagccatgattacaccactgtactccagtctaggtgacagagcaagaccctgtctcaaaaaaaaaaaaaaaaaaaaagaaacaatmtacaatgataaggatctaaagattttttaatattatataaactcmtggatattatttctaaaatataattagattgttagaggaaacatgcttcagtgtgcctttatataatatataataaatatatatatttaataatatataaatataataaataaatgcattccttagaaaagatctatgtgtttcacactttaaactacaagagggccagatgcattgggacattttgaaactttgtttctgtacagtaggtctcttataaaacaagctgttccttstagcttctttctgtgttaagtacaaaagctacccatgtctctcaatgttaagcattgtattaatagtaataacttattaagcccttgatataygcagggcaatgttctcaaaactttaaatatacttccttatttattcctaacagtggataaaaatatttttttattaataaaaacattttttatccacttattatttttctaattgtacatatggaactattctttttctaattttacagataaaagaggaaagtaattcacaaacaggattactaatttatccaaggttacacactaraaaatgatgaaacttagattcaacttgactgctccttcgtcagcagtaaaatgcaaaatatatacttttttggtgatattacttgtcaaaaagattcagtttgtgatctaaatcaaacttgagttaaaagaaaacattctttctaattgttcacaggtaggaagtcacggaatagaggcagcttgggctggtggcaraaatggtcgggaagtcatggacaggttttttcccctggttcyagatctcctttcaccaaraggattattctatttagttaccattaaagaaaacaacccaggtaatacagaccaatttattgtttaagcatttatgttgctgaaatcaaaagttaataatgtaaaatgctttaatttataagataacctggcatgttaatgaatcacttaaaacagttaatcactgacagtarctaatacaggcataaatttatgttgaaagagaaaagaggttttcagaggtaaatwtttctgattttaaaaagtattatcttctcttttccccgtttataacctaatattcaagtataaaaatctctaatgtttttttctaacacctcactctcagtattatgaattttctctctaccctctagtcttcatgcccttgacaattgtgctgtactctttagttcgttaggagttttatcatgaaagctatttaattgtatagatttttatatctttgttttcagattgctttataactaaattgaccataatctttcctctcwttttctgtacacttcaagtttgattttcagcttatactaaaagtcctcagcccttcaaatcacatgattgctagttttctcttgtctttctcccttccttccttcctatttctctcttttctctttttttccttccttctctccatctttctttcttcctttcttctttcctttccttttctttttctttatctctctctcttctcttctcttttcttttttccttctgtccatctttgtctctttttctttctctttctcttctcttctttttttccttccttctgtccatctgtccttccttctctctctctttctttccttcctttcttcttttctttttttcttcccttccttccttctttcttcccttcccttctcttctttcttttttttctttccttccttccttctttctttttctttctttctctctttctctctctcttccttccttccttccttccttccttccttccttccttcccttctcttcccttcccttcccttcctttccttccttcccttcctttctctcccttccctcccttccttcctccctccctctctttctttctttctttctctttctttctctctctctcttctcttctctttttttcttccttctgtccatccatgcgtcctttcctttccctcccttcccttcccttccctccctccttccctccctccctccctccctccctccttccttccttccttccttccttccttcctccctccctccctccctccctccattgtcttagttcagtcttcttagttttatttatttataaggaaggttttcttttttcaatatgcctgaaagaaataagctacttctttcactctcactgtgcaatgtcactattcagtttgtccacaccttcattggcttttgtcatccaaagagaaagacatagggcagagattggagccaatcaactaaaaaactgatcacttgctataataacaatgacaattaatgtttctgctgagtcaaaagtaggctgtgactgcaaagcaagccatttattctgattagactcaccagcaacactttgaaaataccaagtgctcccatttagctgaagaccaagttcactttagtagacatttatttgatatacattgttttgtcagatgaatacaatttataaatcatctgtgtttaacttattaaattgcttattgatcatgcacactrccaaatggcttaatggattttaccttttgatttttattttagaagaaattttgaaaataatgaagacaaaaggtctgcaaggaaccactgcactttccagacaagcaggccaagaaactctttcagtcctcaagttcaccaagtcttagcatacagtgtgtgcccagaactactggaaactgaatgcatttagcatattttgaaactgaagtcattcattaggtaacaaggaattttatcagaaatttgtcattaaaaaaaggtagaaaggtggaacattccctttcagtcaggcctatagaattatttgcacaagtacaagtaaatatgtgtattatatttatagtttgcattttaaatataaaaattatgtatgaaatatttatttcagcattatgtggtaaggcaatggaattgatctggcaaatgtcttttttttcataccagtccataaaggcagtttgctttcagatggcagggccagcaacacaccttcattgtcgtatctcmggtgtgtatcagctctccaactctatgtcataattcagttcatggggatcttgattacctttcccttccacaaaatattacactgattggttatatcgatgacattatgctgatttgacctagtgagcaagaagtaggaactacattagacttagtggaaagacatttgcatcagagggtaggaaataaatatgactacaattcaagggccttctaccttagtgaaattggtagggayccagtgacatggggcatgttaggatatttcttctacggtgaaggataagtacttgcatcttgctgctcttaaaaccaagaaagaggcacaatacttagtgggcctctttgggttttggaggcaacattttccaatttcattatgttayaccagcctgtttaccaattgactcaaaaagctgctagttttgagtagggcccagaacaagaaaagagtctgcaacaggtccaggctgctgtgcaagctgctstgccacttgggtcatatgatccagtggtgtttcagtggcagtggcagatagggatgctgtttgaagcttctggcaggtccctataggtgaatcttggtttaggattttagagcaaagccgtgccattaccaacaaataactagtctctttttgagaaacagctcttggcctgctactgggccttagtagagactgatacttaatgagtcaccaagttaccgtgcaacmtgagcttcccatcatgaamtggatgttatctgagccaccaacgcacaaagttggatatgcacagcaacactctgtcatcagatggaagtggtatacacatgattgggcctgagaggccctgaaggcacaaggaagttacatgaagaagtaggccaaatttccrtagtccccacttctgctacctgccttctctcttccagcctgcatcggtggcttcatggggacttccctgtgatcagctgacagagaaagagaagacttaggcctggtttacagagkgttctgtatgatatgcaggtaccaccctaaagtggatagctgcagcactacatctcacctctgggctaccttgaaggacagtggtgaagggaaatcctcctggtggacacaactttgagcagtccccctgttgactttgcttagaaggaaaaatagccagatattcaattatatgccaattcataggccgtggccagtggtttggctggatggtcagggagttcaatataactggaaaattggtgacaaagaaatttggagatgaagtatgtggatagacactgaatgggcaaaaagggtgaagatatttgtgccccatgtgaatgctcaccaaagggttagcaaaaaaggattttaataaagtggacaagataacctgttctgtggatactagtaggcctctttctccagccacacctgtcatcacccaattgtttcatgagcaaagtagccatggtgayaagaatagaggttatgcatgggctcagcaacgtggacttctrctcaccaaggctgacctggccaaggctatctctgagtgcccagtctgccagcaacagagaccaacactgagcccctgatatgacaccattccccagggtcatcagtcagttgcctagtggcaggttcattacattgatccacctctatcattgaagggatagtgttttatccttactgaaatagatcttactctggatacagattcactttcccttcgcgcagggtgtctgctaaaactaccatccgtggacttacagaatgtctcatctatgaccatggtattccacacagcattacaagaaactcagttcacagcaaaagtgtggcagtgggcccatgatcatggaattttcttaccatgttccctactatcttgaatcaactggctacatagagcagtggaatggcattttgaagacagtaataacaccagctatatagcagtgccttgtagggctgggacaaggttctctagaagactgtctatgctctgaatcaacatccagtatatggtgcatttctcttatgactgggattcacaggtccaggaatcaaggggtcagaataggaaggacaccattcgctattagccctggtgacccactagcaaaatttttgcttcctgttcccatgacttatgcactgctggcctagaggtcttacatagggtggaatattttccactgagagacgcaatcatgatttaattgaactggaagtttaagactgctcctcagccatttggggcttcttatgcctctaactcaatagacaaatgagttacagtgctggctgggtgattgttcctgactaccaagtagaaactggactaccccgaatggtggtaaggtaaagtatgttgggaatacacaggattccttagggcatctcttagtgttatcatgccctgtgattaaggtcaatggaaaactacagcctaattcagacaggaccactaatgatccagacctttcaggaatgaaggtttgggtcaccaccaggtaagtaccatgaccagatgaagtgcttgctgaaggcaaagggaatacagaataaatggtggaataaatactagctttgatcatatgaccagttacagaaacacagactgtgattgtcataagtatgtcctccatattttgctataactacattttgtgtgtgtgtagctttgttttcttctcatttccttattctgtaacataagatgcattgattttatagcatagtgtttaaatattgttaatttttttaactggctccagtgttcaaccttgattaattttacatcatagtatttaagttatgggatatcaaggagagagtaaacatcacatgaagactttaccacctcttctgggaaacgggttaragtgtttctggtggaatgctggattgttaatcgtgttagatggaattatgaccttgttgttgtctttatgtggcagttaagtatggtttaargagatgtttatgggtgccaagttgacaagggtaracttgtgatggttaattttatatgtcaacttgaataggccacagggtgccaratatctgtttaaacattattctgaagtgtcttgagtgtgtttacagacragatttgcatttgaactgggggactcagtaaaggagatagccatccccaaggtgggtggacatcatccagtttgttgagggcgtaaataaaataaaaggcagaggaaggaagaattcmccccccttttttttcctgcctcattgtttgagctgtgacatctcatcttctgtcctcagatggatttacatcactggcttccctggttctcaagcctttggattcagactgaattataccacaggccttcctgggtctccagcttatagatgrcagatcatgggacctcttagcctccataatcatgtaagccactttcttgtagtactggtaaaagatatattaraccaatctataaaacagmtagctatgaaagagaarggtgacaggcacaagcctaggcaaatagagaagggttcctggagagcctctgacttgccyaggtcattgtgcacacgtggcttgcctgaatgaacatgcccactgtgaaagattccatttctcaacacatgtgcagtaagggaaataaatcaatgtggctcaractaascgcccacacatggggtggagccacraggagtttgctccttatgcaggggagaagccgtgcctcttcagctcgtgtgtggtggcctggcattcaatttgtgaggtgtaaaacctgcatgaaggacccctctttttgtggagarctttccttttgcctaataaattctgccctcctcgcctttcagtgtgtacgcgtgcctaattttttctggtcatgtgataacccaaatttaactgaactaaggagcaaaaaatcctgcatcagctacattaatagctgattgtactagattgagtagtgtccccccaacaaaattcgtgtccaactgaaacctgtgaatatgctcctatttggaattagggactttgcagatgtaatcaagttaagacaaggttgtacttgattaggatgggccctaaatccaatatctctgtgtccttgtaagaacaggaaaatctgaacacagaaacagagacatagggccatatgaagacagaggcagaggttggagtgatgagttaatgagtaaaggaatgccaggggttgctagcaactgccagaggctggaagaggcaggcaaggattcttccttcaaggcttcagagggagcatggtccagcccacacctttatttcagacacctagcctcaagaactgtgagagaatgcattggttttacaacaaacagttgtaaaactgtgagaggatgtgtttgttttacaacaaacagttacccagttggtggcactgttacagtagctctcagaaattaatacgctgagtacaaagttaaaagctaattaggaatagacatggacactgatatggtttggatttgtgtccccactcaaatctcatgttgaattttaatcccctagtattggaggaggkgcatggtgagaggtgattggatcatgggggcagacttgctccttgctgttgtcgtgatagtgagttcttagcgagatctggttgtttaaaagtgtgtagcactccctcttcgctctcttcctcctgctccaaccatgtggacgtgcctccttcctcttcaccttgtgccctgattttaagcttcctgaggcctccccagccatgcttcctgtacggcctgtggaaccgtgagccaattaaacttcttttctttacccagtctcaggtaattctttatagcaatgcgagaacagactaatacagacactaaagaatgataaaggtttacactttactaaaattgtgtccaggaaaattgcttcatactatgtaaaataaagaaaaatacaagtataaatttgcaaattgatcatacaggaggatttcaaattgtctgtctcaattagtactacatcaaggagaccaaaaaggcaaagaggagatttgaacaatagcagtgaatttgatataatagactaatatagaactctgaaactaacaatcagggaatgcatattctttctcaagcacccatgggatgtttacaaacataattacrtattagaccaaaagtaagtccctgtaaaattcaaagaatcaatatgatatagctaatcttctctgactataaagtgtttaggttataaattaataacaaaaataaaattttaaagtccccatacatttacaaaatttaaaacatgcttctaaacaattcatatgtcaaggaagaaataatgacattttaggctgggtgcgatgtaatcccaccactttgggaggctgaggcaggcagatcacctgaggtcaggagtttgggaccagcatggccaacaggatgaaaccccatctttactgaaaataaaaaaattagcgagtgtggtggtatgcacctgtaatcccatctactcgggaggttgaggcaggagcattgtttgagcttcagaggcggatatggcagtgagctgagatcatgccattgcacctccagcctgggcaacaagagcaagactccgtctcaaaaaaaaaagaaatgacattttgaaaattaactgaacagagggtgaaccctaatataaactgtgaactttagttagtaatagtgtatcaatattggttcatcagttgtaacagatataccacactaatgcaagatgcaaataattggggggaactgtgcttgtgtttgtgcagtcagggagaggaggtttgtgtaaagtccatacttttttttgttttttaacctgtgtctacaacaaaactctctgtacttccttatcagttttcctgtaaagctaaaactgttctaaaatatatttgaaaagtcttttagtataagagaaaaccaaaacaaagcaaacaaaaaggcaacaacataatgataaacaaaaaattcaggctagtgctaaccggttggatgagaggaggtaaggatgactgggagaaaggctagaggagaaccaggcacccagataaacagcataaagggactggcagtgttccagttctgaagttggccagagagtttcttgggtatacattttattatttcaaattcatgtgaactgggccacgatcttacagtctatgttattctcatgtgcagaggttcaactgatgtaccaagttctttattagtgacacactaaaaatttattgcttatgcattttataatctaatgtgctttgtccagagcatagaaagtgttctattccatttagtcattcggagactgaggatccctctgttttgtgccaccatcacagtcagcctgaaacctctaagtcagcgtggatatggaaagaagaggaagattatgcatgagagattttcgagccagtcctggaagtagcataagtgacttcaaattccagtggccagggctcattcaggtggttccaatatagttgaactgtatgcccaagaagaagaagtggttcttataattctttcccctaaataattgtgttagacaaaaaccttgataacaaaaccaggtaagggttatataagaaaggaaagtgacaggccaaccacattcacatagaggaaaaaaagaagaaaacttcaacaaactaaatctagcagtatatataaaacagatgatacactatgaccaagttgagtttatcccaggaatgtaaccacggtttaatagaaaaatctataaattccatttatcattctaataggttaaagggaagaaaaataacacattatcacctcaacagatgtggatatacgtttgttgaaattcaatacacttggcaaactaggaagagaaggaactttcttaacccaacatggtctgtatacaaaaaactgtggcaaatattctgaaagtagaaatactggaagcattccctataagaatcagaaacgagaaaattgccacctattaccactcctattcaacattttcactggaagtcctagccagcaaaataaagaaaaaaaaaaatgaaagggaaaaggataggaaaatacgaacaaaattgtcatcattaacagatgatattatttaccaagaaaatatttaaaaaaccactgacttattataataagagggcttaggaaagtggttgcctgtaataacaatattcagaaatcatttgtatttctatgcgttagtcccccaaagcaggaaaatgtattttaataatatgactaaaaatgataaataaggcatcatggaataaatataacgtgtacaggactaacatgcaatttgattaaaatacttttttgttttttgagacaaggtctkgctctgtcacccaggctggagtgcagtggcgtgaacttggctcactgcaacctccaccccacaagcttaggcaatcctctcacctcagcctcttgagtttctgggaccacaggtgtgcaccaccacaaccagctaattttttgtatttttagtagagacgggggtctcaccatgttgcccaggctggtcttgaacgcctgagctcaagcgatccttccacctcggcctcccaaagtggtgagattacaggcatgagccaccacgcacagcctaaaagatattttaaatacctaagtaaatggaaagttattttatgtttatgactaggaagattcactgttataaagataccaattgttcctatacttacagtaaaattccagtcaaaatctcaaaagtgtttttcataaaaccagaacaaatgaccaagaacagcctagacactcctagataataggaggagcatgagagagcttgagctactcagatgccaaatacttattattaaacaacagtaattaagacagttttatattgacccaaagataaataaactgaaacagaatggaaagtccataaagaaacatgtacatatatagaaatgtgtatatgatgaaatggaactgcagaacaaatggaatagtactgtataagtgattatacacaaagggaaacaatgaaattagattcttacctcacaccatatacaaaagtccactaaaattgattaagttgtaaataaaaaggttgaattttaaatttggaaaaaatataggagaatatttttatgacaatggaatgggaaagagtatctataaaataaaaaagaatcacagaccctaaaagactgataaatccagttgcagtaaagggttttgttcgtcaaaaggcattataaagaaaattgaggctgggcgtgatgtaatccctgcactgtgggaggccaaggaggtcagatccatctgggcccatccatgttacccccataagacttgaggcaaggggaaactgatgaaacatgctgttgctcatgctaattgttgtatgaatactatgagtaataaaattccttgtctctgacccaaaagccttgtttttttctgccaacagtgaaactgtggcagactaatttgggttgcaagtggagtaaaatctcagatcctttacatttctcgacagtgcagtgtgctgcaattttcccttgttagaacttcctttagttctgcctcactggagtcaacaatttttcacttgcccttggtgatggcacattgggatttttttatagattataaaaagatttttataaatgtctcaaattgagttttctgcttaatatttttgtgcaacttctccatgttgaagagttattcactcattttcaccaatatattccactattcatttattcatactttggtcattgaattttaggttgtttccagttttcactattatgaataatgttgctataaacatctctgtacatgtctgttggtactctagtcaatacctagaagtggaatttctaaatcatacggtacaattatgtttcattttacctgataatgccaaattgttttccagaaagatgccagtttacttgccagtagtatatatgagtttctgtagtgccatatcttcaccaatatttgggactgttagacttcttagattttgccaatctagtaggtctaatatagtattgatttgtattttcctaatgaataatatggttgaaattttcttatgtttattagccattaggtatttttgctttattgtcatttaagcattttatatcagatttctgttgtctttttacttgttgatctgtaagaactaattattcatatattctggctactaatctctacattttgcaaacattttctactcaatcgtgtcaattttctttctttcctttttttgttttttgagacagcatcttgttttgtcacccaggctggagtgcagtagcgcaattttggctcactgcaacctctgcctccgggtttcaagcaattctcatgcctcagcctcccaagtagctggattataggcatgtgccatcacacaagcctctggagtagctgggaccacagatgtgcaccatcacaactggctaattcgtgtattttgagtagagaggggagtttcaccatgtgaaactaatgcttattagactgtagagaagaatgtgtgctctttatttattttttgagatggagtctcactctgttaccaaggctggagtgcagtgacatgatcttggctcactgcagcctctgcctcctgggtttaagcaattctcctgactcagcctcccgagtagctaggatcgctctgttgcccaggctggagtgcagtattgtgatctcggctgtctgcagacttgacctctcaagctcaagtgatcctctcacctcagtttccctagtagct

SEQ ID NO: 95942 - DNA, 52083 bp, Homo sapiens
ttcaagtctaaaagtaatagaaattaattttgtcagacattccccaaagtagagttagattaaatcatataaacccatatttacattccatgttaaaacaccttagtacaggccaagtacagtggctcacgcctgtaatcttagcactctgagaggccaaggcaggtggatcatgaggtcaggagttcaaaaccagcctggccagcatggtgaaaccccatctctactaaaaatacaaaaattagccaggcatggtgacgcgcacctgtagtcccagctatttgggaggctgaggcggatcacttgaacccagtaggtcgaggtttcagtgagctgaaattgcaccactgtactccagcctaggcaacagagcaagactctgtctcaaaaaaaaaaaaaaaccccacagtataacacctcacgttaaattaaaagttaccaaataaactatttttcataaaacagttaacctggagactactacttttctgataattctttccacaactaatgcctgggttaaaaataaattattaaacaccaaaacttactttgaattacattaagacatgtttcactaaattctattaaaataattattccctccagctctcaaatcatagcaaaattacttttaaactacttttgtcactgaatatatttcatgttattagttgctacagtttctattaaaaatacccacataatataatttttgcgattattaacccttgtttatacaggaagcaacatggcactggctctggaacagactgccacttttgaatcctcaatcagttcatcacttactaggttaatggtcttggccaaattactgacacacttgtgtcttctagagttagaggataaagtgagttaaaacatgcaaagtacatcaaataatgcctggcacagaataagctttcaacaaaggttagtgattgcttctacagagtataaaaatatctgaataacaaatataaaatattcatagagaactcaaattttaccttatcatgcctacgttacattctaataaaaataatattttcccccaatactattctgaaaccactaaaataactttttaaatgtttctgttttagaaaaggatactgattttagagaggaaattcttagtccttataacttaagaaagtttgaatttacataccctaaagagataacattttcccccaatactattctaaaaccactaataaataacttttcaaatgtttctattttagaaaagaatactgattttagagaggaaattcttagtccttaatttacaacttaagaaggtttgaatttacataccctaaagagatgggagtattcaactttaacaaccagatgggatttatttactctaatgccaatatcaaattagataaatcttagggacccccaaaaaagctcatcagaaatctgagccattaagactacagaaaaaaggccgggcactgtggctcacgcctgtaatcccagcactttgggaggccaagacgtgtggatcacgaggccaggagatcaagaccatcctggctaacacggtaaaaccccgtctctactaaaaaaaaaaaaaatacaaaaaattagccgggcgtggtggtgtgcgcctgtagtcccagctactccggaggctgaggcaggacaatggcgtgaacccgggaggcggagcttgcagtcagctgagatcaccccactgcactccagcctgggcgtcagagcgagactccgtctcaaaaaaaaaaaaaaaaaaaaaaaaaaagactacagaagaaaataaatcaacacttgacataggccaaagcaaaacttaccattttctattaattgtttgtttcataatacaaaatgttagataagtcatacttcaatgaaggttgttagagccatgaatctaagcaagtctgtttgagagtcatgaatctaagcacagctaaagttccccccaaaaaagaggacaaaccaaccatattacaaacttgattccagaactaaatcaaggtaatgactgttatttttgtggctaaatccttcatttctaaacatcaattaatcaattccaaaaacgctaaatattcaagcaatgattcctctccatccactgcagtttaagtgggatgggtatttttacacaactgtttaataaaaatccatactcaaattcctgatactaagaaacttaatcaagccgggcgcggtggctcacgcctgtaatcccagcactttgggaggccaaggtgtgcggatcatgaggtcaagagatcgagaccagaccaccctggccaacacggtgaaaccccgtttctactaaaaatacaaaaaaaaattagccgggcatggtggcaggcgcctgtaatcccagctacttgggaggctgaggcaggagaatcacttgaacctgggaggcggaggttgcggtgagccgagatcacgccattgcactccaggctgggcaaaaagagtgaaactgtctcaaaaaaaagaaaaaagaaaagaaaagaaaaagaaactgaatcaaataaactgaaactaagtcaaaaataaaaattatattctaccagcagagtaaacaagtacatcaatgtttgttttccagtggaagtatggaaggaaaatttaaacaagaaagtcttcattaaatcaattaaacaaaagcttaaatttactgaaaaaaaaatttttttttgagatggagtttcattcttgtcgcccaggctggagtgcaatggcgcaatctcagcgcactgcaacattcgcctcctgggttcatgcgattctcctgcctcagcttcccaagtagctgggattacaggcacccaccaccacacccggctaatttttgtattttcagtagagatgggggtttctccatgttgaccaggttggtctggaactcctgacctcaggtgatccacccacctcagcctcccaaagtgctgggattacaggcgtgagccatcgcacccagcctaaagtttttaatttaataaatatcttaaatactgaagtcaaaaactaacattaaccttcaaatttcaaaaaaatcttaaaagaaaatttttgagacagttaattatctccaacttacctggcttatatcgtagttctgtatctaagaccccagaaagtacttcctctatcttctgcactatttcttcatttggtagactcctggcagaggcagctgcatcacccgcctggtttccttcaatgggtgtatttgtttcaccattcagctggccttcattccttccacttgacatgaaaagttatcgaaattcattaatattttatcataccattaataaaaaaatccaattaattacaataatcatatgttgtactgactgtcagatgttttacctttttcctattttagatattcaccactaataatgcttcttaccatgatctacttatattttggacatttcatttttatacaattaaagttttcagaactatgaaaattaagaaaacaggtttctaagtacactctttgttaaacaaaataatttcagaaatctaactttaggcttttgggatacccacatatttctttcaggggagaaaaattaataagagcccggtcacaaatcaaaagaaaaacatgtggcctaacattatggtagaaaccatggctacattaaagccacagctgtgcataaatcacaatcaccatcaatagtatcaaggaacacaaaagttagccacaggcacactgaataaaaagggtaacctgtaacctctgtccaggcttacattgctactgaaatgccactgaacttaaaaaggaaaataatttatgtaatttttacacaattatcaagaactctggtttataaaactcacataaaacaagtggcatttataccaacagtaaaagcatagatggcttaacacatgttccattcacagggccagagaaatttttaaataggtaagaacatatcattcgcccagtaatttttactatttttgtgtgaatttgcaaaattttgaaaaatcaaatactttcagcaacagtttgattttaacttcaattttagctaaatgaaaacacatcaattatgctccactacctgataaaagtctgaatggtcaaaaaccaaaaaaaattcagtagttacctaattattattaaggaacatctggctttctaatacaatgaattgtataattatagttataataattatcatttattgactactagtgtcatactgttctacattaactcatttaatcctaacaaaactctgagatcaccactattattcttttataaatgaagaaacttagctgaaggtcacacagctactaagaggtgaagctggtactcaaaccagaggccatattcttacacaccatctataacagaagttcgataacttgttttaactatctaaatgtcagcctcattactctaatttacataaaagcagatgagaaaaaaaacagctcactgaaatggcaaataatcaaaaacttgtttgcagactgataacgcattatgtgttgaagagaagctgcatattcctctagtaataaactgcttcgtctaatattatttttagatattccttctgtagcactttattttacaattttcctaagcatttatacataattatgacaaatttgaaaatcagaaaagtaattatggttttaaaagttaatctacaaggaagtaatgatttcatcttaaagccagcaatcgttaaccgcatttactgaaaagcaatgaaaatttcaaaccacctaaatatgcaacagtatattcctacaatgggattctatgcagccatgaagaagtccaaaagactgagactgagagggataaacctgttcacaacgtattagctggaaaaatgatcaatacaaaacaagatgatcacatatcacacaatacatggggggggaaatgaaatgacatgagaatatcaataacgtgagttttttcttttctcctttttcatgtcttctaaattataataaaacgctcattttctaaaggaaagactagcttttaaaagctacaaaaacacacctcgttaaactaagcaaacaactacttattgcagccagagatttgtcaggaaaattatattctcttagctcgggtctcttctcatccaaaacactactagcaatatcacaaaaatttaaaaagcaatgtgagtggatctatttccacttaaaaaacaacacattctgcaaaagtgataattctagcaataatacatcattgccctaataatcctgtattactttgggcacttacaactggttttcggcccattttcaaattcacgtactgctcttgctctcaacttttaaaatacaattaaaaacacttgaactcggaacacttacgtttcaagatctctttcctacttctgtactttaaagaaatgagtatcttatacaaaagcaaatatcgagagacaaccgctgaacatgacacactattttcctaagtaaacaaccatttctttaacaatctcttcgccttcaaattttgtgaagccaagcgcaaattatgtaaagtctaccagcaatgacaaaaatagcgtgtcaactggggcaggggtagcaagaaaataatagacctacacacaaagtccactttcacttgctgtaattaatcgcaaccatttcaaagtccccttccatctttatctcgagtattttaacaaactagcaagtgcatcagtttgagttcgttttaattgaaacatttaactatcagaacggctgacagatactacaggacactaggccccgaataatcttattaatagatccagacccccaagcggtctgaagctcgcaataataaagaggatttaagattaaccaagaaacggccgttagagaccctttccggtcataggcaccggccggcaaaatccgcggaggcgagagggggaggggatacgcggcggcggaggaggagctgaggaaggaactaggcccgtccctggcggacaaccgggcctacgagtagctaaacggcaggggggacccaaacaggggagaagggtgaacatcttaactcggttctgaaacagggagtcttgggttacctcggaaaaggcgaagttcctcgagggaaaaggaagggagcggctgggggggcggttggggggggcccggaaaatggatcccaggcccaggcggggccctagcggggcctgagccggggaacgactgcgtctccgaagaaaggtgccaaagaaggctaggtgagggcctaacggtccgttgggagcagaagaatctgggaggcgtttacctggaaagctcctgttgaatttcccggaatttactgaccacgaaagacctaaaaatctgctcgatgttggtcgccatggcgtccgctccgttctctcaactcctcctcgctagtcctccaggctcccagcatgcctcgggaggaggcgcassggccaattcggtctctcgccttcctgattggctccaaagggaatgcccggtccggcccgctccaccgagggaccaatcagtgagcacggccctgctctcctctgctgtttctgagcggctggggtagaggtgctgacgtttgcgccgcgcacgactatgtccgccatgttagtgtctgacgcaggcgccattacaggagccgyctctcttgaggcgaccgtgtccgcataagttgtcagtccccagcagtgtttgggagccttaacaggcttgctaagtgcctgagattaaaggcgaagaggaagaagagcaagaagggcaacccggtgtttaacacacggctttcaggcgctctcaggtggcgccaagttcagtttcgacagggatatgcatccgggagagaatttttcagcccccgcccccactggcatgtgagaggaggarctcgctgttgccctgtgtcttccccagtgcgttctataaccagcctcatttttttttttagcaataggccggatgtcctaagcgaccggcattcaaagcccggtgcattttagtctcatcaggagtcaggcgtgtcacgagatttttccgcggtagctgctcagctctgactcgtgagcggcgcacaattggctaagaatgggtttagcattttggcgctcccccccggcgctcctggaaacactgcgtggcaccccgtaccactgtcacattataaacgtgctaaggcttgggtgtctcggctggggagcagtcaggcagcgcccagggcgggagggaatcagactagattctcgycgcggagacccagggccgcgcggaccaatggggcagggaagccgtcgtagggcggggcagtgaggggcggtgccgcgctggtcccgcgccggtcccggtgggccgacttccggcgagcgggcaagcgggaaccaggtggccacccggtgtcggtgcgtaaaccccctccgcttttacacggagcgcgcttaggctttggtttggggatttaagatcgcgaactgagtgaaaccatagaaactgatttgtagaaattttcctgttgtttgtaaatgcggtgggtgggkgttggccatgtgcttttcacttgctactgttagctggtttctatttgctcttttacttttcctgttttctaagatgtcaaggcctttttgtgtctttatacatttttaggacataaccctaaattggtgtactttctctttatgcacccgttgtctctggcagattacttggttaattttgtagttggtttctactttattctccatatcctctgatacggctttatttgcctgtcttattctgcttatgttacccattctgaggaatgaggcccaaggttagtgaagtcccccaaggtcttcctgctagtatggggcagcgtctctacccaggccaaggcgctgtgtgagactcaggagcccaggcgtcctcaccactgggtagtaaggctattttcagtgatccactagagtaaacagaattttcccacactactgctatattcaaactaaagatgtaacatttgctctagatttaaagatctgtttatttctggccggatgtgatgtaatcccagcacttgggaggccaaggtgggttgaccattggaggtcaggagttcgagaccagcctggccaacgtagtgaaaccccgtcgctactaaaaatacaaaaattcgcctggcgtggcggcgcacgcccgtaatcccagctacttgggaggctgtgaggcaagagaatcgcttgaacccgggaggcggaggttgtagtgagctgagatcacaccactgccctccagcctgggcgacagagagagactgtctaaacaaataaataaataaataaaataaaaaatctgtttatttcagatacacatggcaagtaaaatgtgttttcccgttacactaaagtagctgttccttccgagactgtaatttaacagggtttttttttttcctttctcaaattttcaatgatcatcgtttcacttgttgagagaatctgaagcaaaattgcttctgttaggctccaccccctcttacctgtgtgacctccagcaagttatttacctatctgggcctccttgtcttatctgcaaattggtgatagtaatagtatctccctcataggattctttcatgacaagcattttaaatagtaccctgcccaaggttaagtgctcaaaaaaatgttagttttgtatattgtcagcttacatttttcttaaaatatgtaatcccaacatcatcaaaataagttttcaattttctttttcctgttaccagtttgtcttgtggtaagtaaatgtaacaagttaacatttactactgctgagtgccagattgtacttatttataaatgtcatttcagttaatctcctaggttacactgctgttgtatccatccttctaagtctcaggtgccagaactaaagtgaaatgagttggaatttgatttttgccttctctaccaatattctagcatattgcgctatttgaattaggagtcagcaaactatggcccacataccaaatccttctgctgcctgcttttgtacagctcaccaaatatgaatgattgagaaaaagaacaggaaataaatgaggtttttgtgacatgtgaaaattttatgaaattcaaattatagtatccgtacataaagttttattgaaagcgagtcacgtttatttgttacaaacctttgatggtttcctgctacttaaagtactgataggcaacagtgatctctgacccactgcctgtttatgggtccattaaatttttctggacattggcacattgattcatcttcgtattatctttggttgctttcctgctaaggtggccgagtcgagtagttttgacagaactatgtggccctttttgtgtaaagtttgcttaccccagttttcagtatatcctttaatttatgataacctaattatctgtaagatttcaaggtttaaaaattgatattttataatacattttgagtctaaaacaagattcatttcataactaaggcatgatgattattaaatctttttgaagtgaagcccagagaagggagattatcacataaggagctgagagtcatcgtttgactccttaacctagctctctaggccagcctgccttctttttgaaatacctcccttatgcttatgacgacagtcatatttctcaaattatgaatcccagtttttcaaaaatgaatcattggatgaaaatgtcatttgtatgagtacaaatgattacttaaattatatttacaaatctggatttcttttttttttttgagatggtcttgctctgtttcccaggctagagtgtagtgacgtgatcctggctcactgcgatctcctcctaccaggttcaagcaattctcctgccttggcctcctgagtacctgggattacaggcacccgccaccatgcctggctaatttttgtattttagtagagatgaggttttgccatgttggccaaggctggtctcaaactcctgacctcaagtgatccacctgcctcggcctcccaaaatgctgggggtacaggcatgagccactgtgcccgtccctgggtttctaaaatgtgcatcctaagatataaactgtggttttctttctgcaggtttcattttcctttggaatttctgctttacagacagaacaatggcagcccgagtacttataattggcagtggaggaagggaacatacgctggcctggaaayttgcacagtctcatcatgtcaaacaagtgttggttgccccaggaaacgcaggcactgcctgctctgaaaagatttcaaataccggtaatcatgttttaaagtggggagtaatagttattatttgttattaatggtatgctgtcaaccatatctgtactttatgttaataaagataggctgggcacagtggctmatgcctgtaatcccagcactttgggaggccgagatatgcggatcatgaggtcaggagatggagaccatcctggctaacatggtgaaaccccgtctttactaaaaatacaaaaaattagccgggcgtggtggcgggtgcctgtagtcccagctactcgggaggctgaggcaggagaatggcttgaacccagggggtggagcttgtagtaagctgacatcatgccactgcactccagcctgggcgacagaatgagactccatctcaaaataaaataaaatatagactactattcagggttgagtgctttccttgaccttaaaatttatttggtaatttgaatgcttgccaatatgttataaacttaaggtaacctattgttcagaatatggcatttccttatcttaaactgttttaaacctgataaaacacatccattggaaaagtagtaagtgcctaatacagattaaaggcattttgttgtgtatttttgtaaatggaaagtttagtattgctattaaatacaacttgcggccacgtgcagtggctcacgcttacaatcccagcactttgggaagccaaggcagaaggatctcttgagcccagcagtttgagactagccagggcaatgtagtgagacccgatctctacaaaaaaaaaatacaaaaattagccaggcatggtggtgcacatctgtagtgccagctacttgggcaacagagtaagatgagaacctgtctcacaaaacaaagtttttaacagttgttactctaatagatctcaacccttatctctctctgactttttttttttttttttttttgagacagagtctcactctcacccatactggagtgcagtagcgtgatctcagctcactgcaacctctggctcctgagttaaagcgattcttctgcctcagcctcccgagtagctggtactacaggtgcatgccgccacacccagctaattttttgtttttttagtagagaccgggtttcactatgttggtcaggctggtctcaaactcctgacctcaggtgatctgcccgcctcagcctcccaaagtgctgggattacaggcatgagccaccgtgcccagcctccacccttatctctcaattggcaaaaatgaaaaaatggtcagttcatatactacattaagcttgtcagtggcttcagaaactcctcagtattctaataatactcagaataaaactcaaattccttaccatgcctttcaaagccctttgtgcagtctgtcttctgcctgctcttccagcctgatcttttatatccctttttctcttttcastataccctatccatgctgtcctaccaatttcccaagcagaagcttgctgctttggactttatatttgttcccaccccttactatgactgtctcctcattattcagagctccacttaaatgttagcctccttaattatatctctcctacagtttcttactaaaagcaagtgtccatccccatttcatttgtttatgatcatgaatgtctgtgtttatttttacttcactattgtctgtcttctatgttcttttcctccactagaatataatctctagtagaatgtaagctccatgagggcaaggaacttgtctgtcttgttttgcatggtgtgcacagtgcttagttccctatgtggcacataatatttatggaaagaagagcatggacccaacaagccacaaactgggagaagatagtggcatgtatataagaccaaaaggaataatacaaattagcaaatacctccttttctgggatcttaattctacgggtgagatatttgtttattagagaactaggacagtttatctgcgattgaggtcatacaggcaagcccatcaaaatctcttaagatcatcatgagactactacaagtagtcttgtaagactactaaagagacctcttcctcttgttgccctctgctatactgatatagttgacgctgctcagcctagttgtgttcagaaccactaacccacagtgcgtggtactccatcctaatcacattcaggcagttgctgcagattgaggaccctaccttttctggacttggaccctatacagtagtcaccagcctatccacaattttactttccacagtttcagttacccacagtcagctgtagtccaaaatattaaatggaaaatttcagaaataattcataaattttacattgcacaccagtctagcatagcatgatgaaattttgtgccgtccaacctgagacgtgaatctttttgtccagcatatccatgttgttacttactagccctgttggttatcagattgactatcatattatctcagtgcatgtgttcaggtaaccctgttttacttaataatggccccaaagctgatgctggcatatagttataattgttctattttagtattagtgatagttaatctcttactgtgcctaatttgtaaattaaactttatcataggtgtttatgtataggaaaaaacatactatatatatagcgttcagcactgtggtttcaggcatccactagggatcttagaatgtgtcctctaaggataaagagggacaactgtacatcacaaatatcacttcttgtactctgtaccaatggcagagtgattgcacacttcagctgacttaacgaatggtggtccaggcacagtgaagcaggagagcccctatggagccaaaccatgttcagtatgtggttgatcctaccactagttacttagaactccacagaagaaaatttacctgacttgcaggttggagaagacaggttcctcttaaaagcgtcattgagttcttaacttaaacagctctgccccaaagagatccctcctgacccaacccaaaatagcctctcaattcacttcatatcaaatttgcttaatttgttcatatttgctgtttttttgtttgtatgtttattacccagcgttcctacagcgtattgtaaacatgttaagtatagggaccctgcttgtgttgataaatttttttttttttgagacagagtttcgttcttgttatctacccaggctggagtgcagtggtgcgatcttggctcactgcaacctccgcctccccagttcaagcgattctcctgtctcagcctcctgagtagttgggattacaggtgcatgcccccacacccagctactttttgtatttttagtagagacggggtttcatcatattgttcaggctggtctcgaactcctgaccttaggtgatccacccacctcggcctcccaaagtgctgggattacaggcgtgagccaccgcgccccgccgtgttgacatcttaataccagtgctgaggacagtacttagcacatagtggattttcagtacaattgattgattgacattaaaagaccaatttctgagtatatcttacgttttttgtttaatatacagtcaatattagtgacgtgaacaatatcatggaggtgatactttatggctctttgggaagtttattggtgttttcatctgtctacaatgataacggagaactgagctctgttggttagcctaatgcactctcctctgaatttcacatgttgaaactgtcatctctgccaatataagaaaaccaacagataacaagcatactaaagtatagaacttagtttttttagtgagacacttagtttacttaagtggaatgtttttgtaaatgcagtggtttttttttttttttttctgtttacagccatctcaatcagtgaccacactgcccttgctcaattctgcaaagagaagaaaattgaatttgtagttgttggaccagaagcacctctggctgctggtaaagtttgtttctgtttattgttacagtatattcagtgcaaacagaagcttagggatcatctaatccaattcattttacagatgagaatttgtaatattatcttggaaaaagagcttccactctcgaaatttatggagtctagattttttttcccaagcatcagttatatgatgagttagagatcaaatttgcagccatggaaaacattttatatgtctttattctgctgtattctggtgtgtgtttaataatccatatatgcaaatataacaacttttgatagatttgaataacatgttaatagcattttatctctatccagtagacaacatgaaaaagttagttatcctctgccaccagtcatctgccttgtctagatgtagatatagtctgatactaattcgtcttcaggctgaaaagcccctggggagaccttggttcacctaaggctactgttttcatcaatagggattgttgggaacctgaggtctgcaggagtgcaatgctttggcccaacagcagaagcggctcagttagagtccagcaaaaggtttgccaaagagtttatggacagacatggaatcccaaccgcacaatggaaggctttcaccaaacctgaagaagcctgcagcttcattttgaggtaggtaaatggttgtctgtgaaggacagttgtttagttttgatatttaaatacacaggtcagtggccaggcacagtagctcacctgtaatcccagcactttgggaggccaaggcaggtgaatcacttgagctcaggagttagagaccagcctgggtaccatggtaaaaccctgtctctacaaaaaatacagaaaaaaaaaagccgggcatgatggtgtgcacctgtagtcccagctcctctaaaggccaaggtgggaggatcacttgaacccaggaggcggaggctgcactgagccaagattgtgccactgcactgcagcctgggtgacagagtgagaccctgtctcaaaaaaattaaataaatatacaggtcacttctgtgttgaaaatgtaatgctaggtctttaggctgtctcaagatgtagtaagataattaaggaaaaaactttctcaataaatattatgtgggttgtcgttttccagaaccaaaataaaatgggatcctatgcatacagagtttatatgatcttgtggccttgcaggaagatgacatttttaataaaatctgagtagttcctcaggggaaaaatacacttggttctgcagttgtgcgctcttcacagccatgtttttggtttttggttccccgccccccaccaccaccccccaacctgagacggggcctctctctgtcacccaggctggagtgcagtggcgtgatcttggctcacagcagcctctgcttcctggactcaagtgatcctcccacctcagcctcccaagtagctgggacaataggcacacaccactactcccagctagtttttatattttttgtagagacrgagttttaccatgtttcccaggccggtctcaaactcttaagctcaagagatccgcctctctctgcctcccaaagtgctgggattacaggcatgagccgtaacrctaggcctcacggtcagattgacaaacgcagtggcatcttacaacataaagaacattgattttttttgtcataaataattaaccagagtgagtaatcatcacttggtcatctgccaccactattgccattttattttatttatttatttatttatttttatttttatttatttatttatttttttttttttgagtctcgttctttcacccaggccggactgcagtggcgctatctctatctcggctcactgcaagctccgcctcccaggttcatgccattctgctgcttcagcctcccgagtagctgggaatacaggcgcccaccaccactccaggctaattttttgtatttttagaagagacggggtttcactgtgttagccaggatggtctcgatctcctgacctcgtgatccgcccgcctcggcctcccaaagtgctgggattacaggcgtgagccaccgcgcctggccactattgcaattttaaatttcaaaattaaacatcctttgttctctattatgtggaaagcattgagcaattaatgagtgttagtagacacatgcatttgccctttttttgttggcacttctgcttcctggttatgttttcctttcagttgtgtcagtttcatttttttttcattcatatcctaaagagtttcttaaacactgaatattattatttcctagcagccagatgccttgagcaagtaacagttttgttacttactttgggtaagtctccttccagacccccaggcccacttgataatttcatatgtgtactcccagaaatggtctgtgtatgcttactgttgttatacagccgcattttctacctgaatgagagtactatttgctactttgtatcttagagattatgccatatctactctatacatctacttattcttccaaagatattgcctatgtaatctcatgataaatgaaaaaagcaaaattgtaggtactgtatgattggaactacaaaggaatacgtaggggaaaaaatcctggtgggaagtacatcaaaatgtgttggaatgataattaatttttttctttctgcttttcagtcattgctatagcatatcgttacaaaatcccacagcattttaaaatcttgagttgtaatggtttattggatgttgacgattactctgtctttacagtgcagacttccctgctttggttgtgaaggccagtggtcttgcagctggaaaaggggtgattgttgsaaagagcaaagaagaggcctgcaaagctgtacaagagatcatgcaggtaggctgggtcttctgaaaaaatttacttttctattcatactgaataaataccgttttaagtttaaaaaatgttcctcacaataaggaaaatctattttgcaaacatatgggtaagttattttttataatcccatgtattataatccatctctataaaatagttatggatttacactgtaaattaaaccatgattgtattattttgaagtaaattgtaacatcctttgttgtctgccactgaaagaaaatcctcagactctagaacatataaataaattatcaagccatccatgaggwcaaaagtatttgtcccacatgtcccgggtctaagagaagtaaattaatgaatgaatatgccttgtctttcgtgatcgatctttgttgttgtgggttttctgtccttgtagaagtctactttcacaagcatgctttagtatagttattacagccaaacatgtataattataatcggaagtaaggattaagtggcgataatgaaaacatctgtttttcccataccttatttgaaactggatcaccaaatcttcaggagaatattagaggtgtgtttattccgtctgtaccagtgttagctacactattgccacattaaaaataggaaacatttatatgttccctttgagtctttctgaaagggaaagaaaaattacagtactcactggttcataatacaaatgctggataatgctaaaagtcaactaagtatcaaaaacttaccaagcctctttttttaaaaaaaaaaaaaaaaaaaatcttacaatcagsagaaagcctttggggcagctggagaaacaattgtcattgaagaacttcttgacggagaagaggtgtcggtatgtatattcatctttttggcttttgtagtgtataagaagctgtcatctgacctgtgtaccccagaaaagacttgatatactctggttgcttcatctaaaaacataaacccagcagttacaaaggaatttgtatacttttattgttgggggtgcaaatgaaaaaataatcgatcctctgttagtcatccctagtgtgttagtgggggcacttggacttacacactattgaggttctggattaattcaagcattcatgctttttctttcatatacagtttattgcacaataaataaagtcaccttaaaccaagttttaatgcctggaagcttaaagtgggggaaaggttgaaatcttttactttgagagtagcttgattttttctgacttccctcaaaaattacaaatccttcagaagttgagtacattatgattcttgatgtatgtagcttaatgttattgacgtttcggttcatttctctgcaaaaaaaaaaacaaacttttcctcaaagaagaattaagggacatatagtttgcctcactaaatttttttttttagtttttgacagttaacataaatggactattttgttttctttatagtgtctgtgtttcactgatggcaagactgtggcccccatgcccccagcacaggaccataagcgattactggagggagatggtggccctaacacagggggaatgggagcctattgtccagcccctcaggtacttcccgaagactctgctgaagtcttgtagtagtttggttttctcagagaactcttagatgatactttctattttgttttgttttctgtttgtttgttgctatgaattatgttactaatcagcaattaaatgaggagtatcttttctggtctctaaaactaacttttcctaaaagccttttttgaagaactaaaataagccaatctaaagtatagtatgggttgaatagatcctcctattccctcctctctgcagccaatttttaacacatgggagcctgtcgtggtcttggattcatctttggatatccgtggttcagcacaaaagtgttgtctgtgtgtatctgtgtgtgtgtgtgatatgaattgagaaccaagtcacatcagaatttctagtgtgcgtgtgatatgaattgagaaccaagtcagatcagaatttcttgtgtgtgtgtgatatgaattgagaaccaagtcagatcagaatttgttctgatctttctacttcataacagacaacacgtttccaaacaatttckgcacagtttttgtttttgttgttgttttttgagacggagtctcgctctgttaccaggctggggtgcagtggcacgatcttggctcactacatcctccacctcctgggttcaagtgattctcctgcctcagcctcacaagtagctgggactacaggcacaggccaccacgccaggctaatttttgtatttttagtagagatggggtttcaccatgttggccagtatggtctggatctcttgacccgtgatctgcccacctcggcctcccaaagtgctgggattacaggcgtgagctaccatgcctggccttctgcacagttttttttaggaatttgtgctgttggcatataagtaggttaacaatccgaaaactcacctattcttttcattgaagatagtcataatgtttgtgctaatgtagtgcccctttacatatttttcttgcttaaaagattaaaaataggccaggcgcagtggctcatgcctgtaatcccagcactttgggaggccgaggcaggtggataacctgaggtcgggagtttgagaccagcctggccaacatggagaaaccccgtctctactgaaaatacaaaaattagctgggcgcgatggcacatgcctgtagtcccagtcccagctacttgggaagctaaggtaagagaatcacttgaacccgggaggcggaggttgtggtgagccaagattgcgccattgcactccagcctggacaacaaaagtgaaacttcacctcaaaaaaaaaaaaaaaaaaagattaaacataaacttcattttttttaaaagacttcataagtgtaggccaggcacagtggttcacacctgtaatccaaacacttgtattaaaactaccatttggtaatagtgtattctaagaactatatctgggtctaatttttacaattaaattcataaacccagaatcttacatatatagacttatgaaatatgcagcgtatactgggaagagtacaaagaagccttagggtaggagagaacttgtttcatttctattacgtttcgggaagttatttttggctagttcttttaagagtgtattttttgaaaatcataaagctaaaatacctrcttgacagagtcattgtgaggattgagaaagtttaaatctttcaagttcaaagtgttcagcatgtttcaggtagtaaaaaaatgagttatcctcatcatccccttctgttgtcccatgtaatactacttagactttttaagttacctgttacatttaactgtttctgcacgttctccaggtttctaatgatctattactaaaaattaaagatactgttcttcagaggacagtggatggcatgcagcaagagggtactccatatacaggtaggcccacccacattactatggaagccacctatagagtaactttctacttttgataaaacttattttccattcccttttttttttttttttaccactttttaatggaccattttttaaatgtttatgatttttccaaaactttgattattagaagtttatgtagtagattttatatttgtaatacagtgtcttcatcatagattttctttctctcttttttttttttttcttttttaatgaaggtattctctatgctggaataatgctgaccaagaatggcccaaaagttctagagtttaattgccgttttggtgatccagagtgccaagtgggtaaaaataycaaagtattacttggtagaagatatgtggtattttaatcttggaatttatcagcctggaagtaattacctttgggaaattcatgcaagttctgctagtacaccagtgaataaaatgtttaaggaaaactaaaatttatcccacctgccatgtggattatgtttttccaggtaatcctcccacttcttaaaagtgatctttatgaagtgattcagtccaccttagatggactgctctgcacatctctgcctgtttggctagaaaaccacaccgccctaactgttgtcatggcaagtaaaggttatcctggagactacaccaagggtgtagagataacaggtgagtgtcagggagcaagaggttggagtacaacgtgacaagtgccagcaccacagcagacccccctctcacamtaaggcttgctctcgataagagtgtgaagccatcagaaacctttcagagggtcttaaccatgttgcttattggatatgtgtgttcaaatatccgcaattactgtattcagagaaccrttgatttcccttcctgtgcaaggaagacataagtggcagaaccacatctcccgagtgtcacccagtgcagccttccacttccacctgcctagagccagggtaataatgagattctctgagagtcagaggaacattagtacaaagtatatcaataagatatattttagaggtgaggactctgaattatcacaaatgcatacagttttgtgtggtttgacccccagtttacagtgcaccccatagtcacttggatggcaaaattcaaacagtttcaaagtttatccttctcttttttttctctctctctttatataaagtaggtgaaacatctcgttaaatgatgttaaatctaagttccagtgccgtaagtccaaaggcagacctctgtgacccctagcagcctatagtttggccactctccgtgctccagtagtgtatttggggggtttcctttttttttcgagatagactctagctctgtcacccaggctggattgcagtggcacgatctcggctcactgtaacctcctcctgggttcaagcgattcttctgactcagcctcccaagtaactggattacaggtgtatgctaccaggcccagctaatttctgtatttttagtagagatggggtttcaccatgttggcccggctggtctcgaactcctgacctcaagtgatccgcctacctcatcctcctcaagtattgggattacaggtctgagccaccatgcccagcctccagtagtgtatttaattcaacaaccccataaactgtcttgcccagacaccaagtccattgccttatgaatcccacgcatggcagctaggcaggcagttaagaattgattccttttgaatatggacaaagaaagaaatgggccagaaccaagatcccttgcattggtaaaatttccctaagattgaagtaacaagtgtataatagttctgccaragcaatattgagttttaccagtactggcaggcagagtagccattcagaatcactaaatggctttgtgttgtaaaaacactcagggaagatgtatattaacaaactaccaaataggatgctaacaaaagaaatagagacggaaaaagaagaccaccaggagatgaaagaatggttttctaaaaattaagaaaaagtgttatctttacataaactgtcccctttggtcactttagaatttagaatatatagtctaataatgttttaactataaagctgtatctgagagtttaaaaataattcaaaatacagtgaaggggcaggaatttggggctgaccccaaaacttaatttaagccaagtttgtcttaaaatcatacaagtgttataatagtgaaaagattacttatgttttgcattgtactgatcatattggttatactgaaaagaaagaaacttaagtctcatgatctggttaaaaaaaaaaaatcgaaaaagaaaaaaagaagcagctttaattgaataactgtgatgaaaagaagttcctttacaggccaggcacggtggctcacacctgtaatcctaacacttggggaggccgaagcgggcagatcacttgargtcaggagttcgagaccagcctggccaacatggtgaaaccccgtctccactaaaaatacaaaaacaattagccaaatgtggtggtgcatgcctataatcctagctactcaggaggctgaggtggcaggatggcttgaacccaggaggtagaggttgcagtgagccgaggtcgcacaactgcacactccagcctaggtgacagagcaagactctgtcccaaaaagaaaaggaagttcccggctgggcgcagtggctcatgactaatcccagcactttgggaggcccaggcaggcagatcgcaaggtcaggagatcgagaccatcctggctaacacggtgaaaccctgtctctactaaaaatacaaaaaattagccgggcatggtggtgggcacctgtagtcccagctactcaggaggctgaggcaggagaatggcgtgaacctgggaggaggagcttgcagtgagccaagattgcaccactgcacaccagcctgggcgacagagcgagactctgtctcaaaaaaaaaaaaaaaaaaggaagttcccttactcttaaggaaaagattaatgtgatcagatgcaggatttttgtttctttcctcattaaacaattgcttttataatgagatttacgataacacaagaatttaggttgtcatcctaaaatagcagacagttcttaggagaaaggtctaattactattacattgcattaaaacctatctgggaggccaaggcgggcagatcaggaggtcaagaccatcctggccaacattttcaaaccccgtctctactaaaaatacaaaaattagctgggtgtggtggcacattcctgtagtcccagctactcctgaggttgaggcaagagaattgcttgaacccaggaggcagaggttgcagtgagcggagatcacaccactactagcttggcaacagagtgagactccgtctcaaaaaataaaagaagacctgtctgatagggaaggttcttttaagtgagagaaagatctttaattttatgtatttatttatttggagacagggtctctgttgctgggtttggagcagtggtgcgatcacacctcactgcagcctcaaactcccaaattcaagtgatcctcccacctcagctggtgtgtgccgccacacttggctattattatttatttatttatttatttatgtagaggcgaggtcttgctctgttgcccaggctggtctcgaactcatggactcaagcagtccttgcctcagcctcccaaagtgctggaattataagcatgagccaccgcacctagccaagttaaaaaaaaaaaaaaagaaacttgtggaaatcgtaaatcacttcacggtgtgaaatactgttgctatttgaaatcatatgtcaaatatgctctcttctagggtttcctgaggctcaagctctaggactggaggtgttccatgcaggcactgccctcaaaaatggcaaagtagtaactcatgggggtagagttcttgcagtcacagccatccgggaaaatctcatatcagcccttgaggaagccaagaaaggactagctgctataaagtttgagggagcaatttataggaaagacrtcggctttcgtgccatagctttcctccagcagcccaggtaaaactctaagcaagttagctgtagtgccatttcagaaactggcctaaatggctatgtagaacatttcattaaccctataagtcattcagtattcttttctctctgtgggastgatacagtcttggtttgtattttgtttgaatcaaaactggttatagcaatactcaaatggaaaaaacttcatgatagcgtaagtttggaaagtttagcaaaatcacagtggtactgatttttwtttgttttctattttttttwttttatatttttaatttttttaacagggtcttcctctctcgcccaagttctcatgcctcagcctcccaaatagctgggactacaggcacaggccaccacacctggctaatttttttgtattttttgtggagatggggtttcaccatgttgccaaggccagtctgaaatcctgggctcaagtgatcctcctgctttggcctcccaaaatgctgggattataggcatgagccgctgcacttggcctgatactgatttttattccttgcgttatcacatagtgttgtatttgaaacatagttcatggttttatcaaagaactgaagatgagaatactggtcatctaactttgtaatttgatttgattatactgtaaagtttgacagtctcattttawcactgcgtttgtatctattactaaaatgtattttttgacctcttactgattcattgttggtatgtacaaactgttgacttgtaaaatcaataaagtcttagttggaaatgtgggtgttttgatttctttttttttttttttttttttttgagacagaattttgctcttgtcgcccaggctggagtgcagtggcatgatctcgcctcactgcaacctccacctcccgggttcaagtgattccccttcctcagcctcctgagtagctgggattacaggtgcctgccaccgtgcccagctaatttttgtgtttttggtagacatggggtttcaccatgttggccgggctggtctcgaactcctgacctcaggtgatctgcctgcctcagcctcaccaagtactgggattacaggcgtgagccaccgtgcccggcctgatttcttaaaaatatatcacatttgctattgttcgtgaagttcatttacggataatgaataaattttaagacaaaatttttttaccaacgtaattcaagctatactgttaccaagaggcaggtttttttaaagtttaaacacagattttccaagaatcaagaacatcaaaataccaggctaaaaatttatttttcatttaaaaatgactagattccattgaaatgacctatttcaagggactgcaatctcaattctagtctgaattatttaagttataaagatgaaaaaatggaaatgccacagtgttagttgctactggagaaaaggttttttaacatcagtctttgttttctatctgagagtgacccagagctgctggctttatttgagttaactgccaatgcactcaactgtattctggcagcttttttgttttttgtttttgtatgctttttttaaagacacttctataaaaacacatatttcttcatgtatcactgcatcccagcaggccagagttctcatttttgcaagtcaagactacaaaatctgcagtgtcattcaaaaatttgatctctaaatgtactgctccgacttgtgggtcctatacagaaggaaatgatgcactgagtatctttacctggttttgcttttgtcatagtgtttactgtcctcagctattaggaaacagatacagttatatattactgaaattaagaactcagtttaattatttagggatacttgtgtacggtttttacaaatctaattttcacttttttgacttgattaggcattcctctcttgttcataccaaaattgaactgagaaaagttgcagcaaaatgtcagtatatctacttttaaacagatggttgccagggtctggggtagtggggaatggggagttatttaactgggacagacgttcagttttacaagataaaggattatggagatggatgatggtgccgggtgcacagcattataattgtattcaatactattgaactgttcacttaaaaatggttaagatgctgaattttatgttgtgtatattctaccttaataaaaaatcatttaaaagaatcagtatatttagcagcctgtgagaagtacttgtagaagaaataggtgattgagttagaatagcggttctcagggatgatgtaatcaagtcaactggggagatkgttcaaactcatttcaattcccagagcctgccctagaccagttaaatcagaatctgtatagatgtggcccaggcactgactttaaaaaaatttaagcactttagggtatgtgaaaatcacttgggatatcttctgctttaaataatattttaagattaaaataattttccctgrcgtttaggtgatgacttgtttttaattctttaggagtttgacttacaaggaatctggagtagatatcgcagctggaaatatgctggtcaagaaaattcagcctttagcaaaagccacttccagatcaggtcagtgatcctatactttgctaattcattaactttgatatacattgtgaatggatttgggttttatatttaacaggaatattttccaaagcaatgcttggttactgtaagttttgccctgcttaagccaaacccagtcttctgctttcttttctttaatattaaagtatttctcatctrtcatgttaaactcaaaaggatatgtatgctcctttactttttttttttttttttttgagacaagagtcttgcccaggctggagtgcaatggcaccatctcggctcactgcaacctctgcrtcctgatttcaagcgattctcctgcctcagtctcccaagtaattgggattataggcacccaccatcatgcctggctaatttttgtatttttgtagagacatgatttcaccatgttggccaagctggtcttgaactcctgacctcaggcaatctgcccacctcagcctcccaaagtgctgggattataggcatgagccaccatgtctggctggtcctttagtatttaattacttcctttttttttttttttttttttgagacaaagtctggctctgtcgcccaggctggagtgcagtggtgccatttcggctagctgcaagctctgcctcctgcattcacgccattctcctgcctcagcctcccgagtagctgggactacaggtgcccgccaccacgcccagctaatttttttgtatttttagtagagacggggtttcactgtgttaaccaggatggtctcgatctcctgaccttgtgatccacccgcctcggcctcccaaagtgctgggattacaggggtgagccaccacgcccagccttaattactttcttaatcaattctttgagcacatggtgcaatctctcatactcaggaagggcatctcttgtttcagccattcttatgaacaagtggtatgtatatacatgtttaacctattaacatgttacatgttaatctattaaatgattacattctcccagttgatttgattatgtcatctctgagaacagctgttccaatcatctatttcttccagaagtacatctcacaggccgctaaatatactggtttttttaaactagtagacatttaaataattacatgtttaatctattaaaatgtagcaagyaattaatttcctctccaacaggctgtaaagttgatcttggaggttttgctggtctttttgatttaaaagcagctggtttcaaagatccccttctggcctctggaacagatggcgttggaactaaactaaaggtaatcagacacctttgtgaataaaggccttttaggaaagatgaggaaatttatatcaaatatgtatttttcttctcttgacatatatgagctaaaaaggaccatgccaaataaccatgtaaaatggctaaaatatctgcacatttctaataacaaattattatttagattatatttggatggaagggtactttagaggataaaaggggatgcttttagaccaagtagcttgtcagaatttcgtgttcttttgtttttaggtgttaagagcagctaatcaaatggataagatacaattttgaacttattccctaatrtggatgtttatattgttcttacatagattgcccagctatgcaataaacatgrtaccattggtcaagatttggtagcaatgtgtgttaatgatattctggcacaaggagcagagcccctcttcttccttgattacttttcctgtggaaaacttgacctcagtgtaactgaagctgttgttgctggaattgctaaagcttgtggaaaagctggatgtgctctccttggtatgatcagccattttaatcaataacatgtcattcttctttttgtgttttagccctatgtaaaaatgtgatcagtgccaatgtagctagcaagagagactgtatatcacaagatgcatatatgtgatatgcacaaatgaaatataggtraaactacctgaattaaatttagagcctgctaccttcaaagccctcctcaggggtttgtcctctagacccgtactcccaaactgtcaggcaggccttatctttcttcccaatttttggccaccttttaacatccccatcagtctcagtagcctcctcaacaamcaggtctaggagttatttcctccttattgaccccacggtacaggcagatgggttcctggcattccggatcttaactaaagccaaattttcccatagagtgacataaataataatatacgcccaagttttatagaagtatctttatacatgaaatgtttgagcaaaatgaatctgtaggttgatcaaggaacaaaayaacctctttttttaatttaaaaaaaaaaaaaagggaatctctctctgtcacccaggttggagtgcagtggttcaatcacagctcactgcagccttgacctcctgggttcaagggatcctcctgcttcagcctcccaagtagttgggaactacaggcatgtgtcaccaacccagctaatttttgtactttttgtagagatagggttttgccatgttgcccaggctggtcttgaattgctgggctcaagctatcttcccatcacagcctcccaaagacactgcctctttttttttttttttttttaaacagagtcttgctctgtcacgcagtctggagtgcagtggcgcaatcttggctcactgcaagctctgcctcctgggttcacaccattctcctgcctcagcctcccgagtagctgggactacaggtgcccgccaccacacccggctaattttttctatttttcagtagagatggggtttcaccgtgttagccaggatggtctcaatctcctgatctcgtgatctgcctgcctcggcctcccaaagtgctgggattacaggcatgagccaccgtgcccggccagaaactgcctcttttatatgaccatttaaaccagaaattgtgccatcttgcatctgcacatgtgtgcatctaatctcagctggtctacccaggaccccttgagcaccaaccctagtcctccacatgacccttttccacgctgacaagatgaaagaaacaaccaaattgcaggcacaattgcgtaatgatggaaaagaaacagaaagaaggtggttcagctacagcagatgataaaaacttcagttctccttaagaagttaagggtaaacaatatctctggtattgaaggggtgagtatgtttacaaatgaagaccagagatccactttaacaacctaaaatgctggtagcatttctctggggcagtgaacactttcaccattacaggccatgctgagacaacgcagctgatagaaatgctaccagcatcttaaaccagcttggtgcagacaatctgactagtttaaggagaccgactgaagytctgcccaaatagtctgtggatggaaaagcactgcttgctaatggaggggatggtgatgaagttctagatcttgtaaggagttttgatgaggctattaagaatgaggcaaactgaattgagtcaacttctgaagaagaaaaaatatgaagtaactaggagctgctattttacattatgactgctttctgaaattgtttatggatctgataaaatttagatctctaatattttaagccccattcctgttggacactgcagctcttttcagtttttgcttatacacaatttcttcttttttttttttctttttgagatggagtcttgctctgtgacccaggctggagtgcagtggcacaatctcggctcgctgcaacccccacctcccaggttcaagcaattctcctgcctcatcctcccaagtagctgggattacaggcataagccaccacacctggttaatttttgtgtttttagtagagacagagtttcgccatgttggccgggatagtctcgaactcctgacctgatccacctgcctcggcctcccaaagtgctgggattacaggcgtgagccacgatgcccagcccacaatttattctttgtagctaattaagctaaagaagcctgggaataaagtttgaaacaaacaaaaattgcctttcaaccaccgtttagaacacagtttcttatttggagtctgcctataccttatatcttgacatgatataattgtaagtaaaatgctatactttttaagctagggtatttggaattgggcagtcccagttaagtcacttctttaaggctgtatcatcacctgaaaaatggactgattataaagatcaaatacatatgaaagcagttttgaaactaaacagctatagaaatgatgttatattcaactgagcattcattctgtgcaagcagtggtgtttggcggctgcatatatacttgtagaggtgctacctaatctcaccctttgtggaaacaagtgctatttctcctgaaatcatgcttggtggaaagttctgttagacagctggtagagtacattttcttaaatatttgcaggacatagccatgtgttagttgttcatgttaagagtagcctgtgccactgtttcctagacagatttataaatactctgatttctttgttcttgtcttatcccaccaggaggtgaaacagcagaaatgcctgacatgtatccccctggagagtatgacctagctgggtttgccgttggtgccatggagcgagatcagaaactccctcacctggaaagaatcactgagggtgatgttgttgttggaatagcttcatctggtcttcatagcaatggatttagccttgtgaggaaaatcgtggyaaaatcttccctccagtactcctctscagcacctgatggttgtggtgaccagactttaggtaaactccctcatgtttaaactgtcctgcttggaaatgcctgagcaagcatttagtggttttagtctctgattacttagagctaaaagggaatgaattaccttggtttgctacttggtcattattgtagagctggtgtcattctccaggttgatttttatgttttggttttctattcataggctaagtttttgtcttctctcttcaacatgcaggggacttacttctcacgcctaccagaatctacagccattcactgttacctgtcctacgttcaggacatgtcaaagcctttgcccatattactggtggaggattactagagaacatccccagagtcctccctgagaaacttggggtagatttaggtaagatcactaaaacgaacttctgttcagaaaattgctgaggaaaaaaatgcattgtgcgagaaaactatgggtagttaatgtacacatgattacacatggaaaattcttaatcattgggggttttgggagggaaaaactcgacccttttctatctctttttgcttcattatctgtmtttataagacataaaatattgtcatgtaattggcttacataaagttgaagtactcgataagtaggtcctccaaggggattggtaacttcaagctctattaagatggagccctacacaccaggaaaggaaatgttagctattaagtaatccatattcgagataaaaggacctaaaccamggcatagagaagggaggcacattggagaatcattttatgcttagaagtaaaaagaagtctcaggtttctagttaagcaggtgagtaggcggtaacatcattaacataggaagaagagtaagtttggaatagaaggtttttaaatcttcagtgtgtttattccaaggtgactgtgagcagaagttgaagtcatgctgaagataaattgggtgattatttgcacgtagtaatagttawagccaagagaatgagggagaccaaaaggttgtttctcaaagtagagtgactgaaaagaacagtccaaagtagtgggtaaaccatgtaaaagtattatcatcaaaccaacatgggatttttttcttttcttttttttttttttttttttttagacagagtctcactctgtagcccaggctggagtatagtggcgcaatctcagctcactgcaaactctgcctcctgggttcaagcgattatcctgcctcagcctcccaagtagctaggattacaggcacccgccaccatgcccggctaatttttgtatttttagtagagacagggtttcaccttgttggccaggctggtttcgaattcctgacctcaagtgatccgcccgcctcagcctcccaaagtactgggattacaggcatgagccaccgcgcccggccccaaggtaggattttaacgtgacactggtccgcagtgtcaggtacagcacaaagatctagaataagcactagaaaaagaccagtgtattttagagttaggtyaaaagtcagtttgctggacatagataccacccactagattgttgtggcagagttgtggagacagtgggtagagatttctgtttgaagaaacatactggtaaaagggaagtggaataattttatgcatgcagcaaaagtgagggacagagtcctccctccctgtgttcttttttgttttttgtttttcgtttttttttttttttttttttttgagttggagtcttgctctgtcgccaggctggagtcgccagactggagtgcagtggcgcaatcgcagctcactgcaacctccgcctcctggattcaactgattctcctgcctcagcctcccaagtagctgggactacaggtgcccgccaccatgcccggctaatttttgtatttttagtagacacggggtttcaccgtgttggccaggatggtctcaatctcttgacctcatgatccacccgccttggcctcccaaagtgctgggattacaggcatgagccactgtgcccagcccctcccttccttgtttttgtaaaataaagtcagagaaacttttccagctatagtcaactaatacacattgatttgaaggagtagaaactgagggagtttacataaaataacttctctgtgaagtattagtgagatgatcaggcctggggtgggagcttgaagagaggagtggataaagcagtcaaggtcaaacaggagtgagacagtgagcaggactgaaggcacaggtgaaggtgaagctgctcatgtagtttttctcccagagcaaaagcatgtatatagctttgaagcaagaacagaaaaaaaatagattagttaggttgatccagctgaactaagcaggtattggggtcattcattggggagaagcagtcagagtgatagaggtgagtagatatggtgagctaacccaagagtcagagcgtatgtgaagctcggagagaactgaagagtcagaggtaggttgtgtggaagtgaggaaatcggcaagggaagctgggagagtggtcagatgggatttcagcctagtcagggaagcaaaacagacaggccaggctaggctgagtgggagtctcttccaggtccatggactgagcatattaaggagttgaaggattcataggagggtgaaactagtggttcaagacattccttgggtagaaatgctttctggtgagcatatataagaaccttaataagtagttcattcatcatccttttcaaatagttaaaaaacagtggcctgctgatgaatggggaaaggaggcaggactgatttgtgcatttgccagtttttgtggtataaatactcccatcatagctgctttaaaaatggctgtttaacagtctctacaagctggctctagcacaccactagttaaaaacaacatagtagtcacctcattaagaaactgaaagtgatatagccatattcctgaaagcagttatagtttgagttacacaaatgtctgtattccaataaaagccattgcacaattccttgcatcagcctctaaagtttcttccaggaatcatactttgacaacagatttaagtaaggacttctgggggtttttttgtttgttttttattgagacagagtatcactctgtcgccccaactggagttccgtggtgcgatcacagctcactattgccccaacgtcctgggttcaagtgattctccgacctcagcctcctaagtagctgggaccacaggtaacacgccaccacacttagctattttttgtatttttagtagagacggggtttcaccacattgcccaggctgatcttaaactccttggctcagagcaatctgcccatctcagcctcccaaagcgctgggattactggcatgagctaccacacctggccaggacttttcaacattaaaattacaacttacattattcatgaagtacttgttcatttatagaagctagactcttagtctgccagtgttttttcctataaatattttgtaaaacttcactaaaacaagatcataatttggtaatctgctacttgccctgccattaaatatgtcatcactatctccttgtcttagtagcatcatttttgataacaagtattccattttacagatgtaccactatttagttttaagttgctatttacttttaactattgagagcatagtgaacaatgtagttactaaatctgaggtcaactattaagaatggacatttcccagctactataaatggaattgaatctaagagtcatagacatgtgattcatttttatttttatttatttttatttttttagacagagtctcaccctgtcgcccaggctggagtacagtagtgcgatctcagctcactgcaacctccacctcccgggttcaagtgattctcctgcctcagcctcccgagtagctgggattacagatgtgcgtctccacgcccagctaatttttgtattttcagtagagatggggtttcatcatgttggccaggctggtgtcgaactcctgacttcgtgatctgcgggcctcggcctcctaaagtgctgagattacaggcctgagccactgcacccgcctcattttraaaattgtatcaacttcaggctgggcatggtggctcacccctgtaattccagcacttcgggaggctgaggtggatggatcccctgaggtcaggagttcaagaccagcctggccagcatgatgaaaccctgtctctactaaaaatacacacacacacacacacacacacacacacacagagacacacacacacacacacaaataaccaagtgtggtagcacatgcctataatcccagctactcgggaggctgaggcatgagaatagcttgaacccaggaggcggaggttgcagtgagtcgagatcacgccattgcactccagcctaaacgacagagagatactctgtctcaaaaaaaaaaaaattgtatcaactccaaagtattaaaaaactgattatcagctgagcatgatggctcatgcctataatcccagcgctttgggaggctgaggcagaagaagcccaggaggtcaaaactagactgggcaacatggtaagaccctgtctctccaaaaaaaaaattttttaaatagccaggcatggtgtcgcatgcctgtagtcccagctactcaggaggatgaagtgagaagatcacttgagcctgggacatcaaggctacagtgagccgtgttcatgccactgcactccagcctgggcaacagagccagatcctgtctcaaagaaaaaaaaaattatccaataaataaatcaaataaataggcagaactgatagtaaaccttattatttaataaaaagctgagttcacattggcttccctttcttaagagcatcataaataatttaattcagtatagtttttttaaaaaatcagatcccataatcgtagattccaaagaactatccagattctttttaaattcagaaatgttgtgtgtgtgtatatagacctttacctaaaaatttttattagagatttttgttgtattatttgtgataagagagaatgtattcttttttttttttttttttttttcaatttgagtcggagtctcactctgtccaccaggctagagtgcagtggtaccatctcggcccactgcaacctccacctcccaggtttaagtgattctcctgcctcagcctcccgagtagctgggactacaggtgtgcgccaccacgcccagctaattattgtatttttagtagagaatgggtttcaccatcttggccagggtggtctcgatctcctgacctcgtgatccgcccacctcagcctctcaaagtgttgggattacaggcatgtaatccaaagtgttgggattctcacgcccggccgagagaatgtattcttatagcagacctaggaagtctaaattttaaaaagaatgagagggagagggtgttgatccgccttccattaacataacttttcttgaggagtgtatgcattttctctaaatatgtagataagccatctagttttgcattgtactttgggtgcattttggtcatcacaaagactcagccaaacattcacaaaaggatggtatactggcctttgctggaattcagctactagctcatctgatccattagggaatgtctaagggtctagttagttaatgtagcacaaaacctcactcatttgtgagtactggccaagtgtgtcaacaaaaaaatgttcttaatgtctaaggtacaaatggatccccaaataaaaagttctcagaggccaatttatagttttaccctacataaaatagcagagcctgattataatttccacatctttgaatatgtgcatacttttgtactttgtgtgagaaggtaggaaaatcaaacaattcgtgtctatttttttcagatgcccagacctggaggatccccagggtcttctcatggttgcagcaggaaggacacctctctgaggaagagatggccagaacatttaactgtggggttggcgctgtccttgtggtatcaaaggagcagacagagcagattctgagggrtatccagcagcacaaggaagaagcctgggtgattggcagtgtggttgcacgagctgaaggtacttgctccttactcatttttagatatataattttagctgtataattttagctatacctcagccttgcctcacaagctttctgcccaccttttagtgcagccatcgctatggcaactatctttacacagatgtaacatgacagcacccaccccagcgataccacgtatctcttcatttctgcctcagaactaagcattcatgcatgcacagccacaccccacaggatcgcttcccaaagtaatctccctacacacaagacctcatggctctgctgtcactcagctcgattcaaggaatagcgagcaagcaccctgacaagtactgtatcagtcaggactctgcgagaagtgctagaacttggcagaggggcagaaaatccactcagattcactaacaaagacgtcacatgcttgctttggcaggacacatactaaaattggaacgatacagagaagattcacaaaaataaaaaatagaaaaaaaaaatgtcagaccttgttgactttacctgtatctgcctttctttcctctattgtgtaggattcattttcaagcgggttctccaaatgccggaaagataacatccttcagctcacattacaataagaaagagagacccagccgggcgtggtggctcacgcctgtaatcccagcactttgggaggccgaagcgggtggatcacgaggtcaggagatcaagaccatcctggctaactcagtgaaaccccgtctctactaataaatacaaaacattagccgggcgtggtggcgggcgcctgtagtcccagctactcgggaggctgaggcaggagaatggcgtgaacctaggaggcggaacttgcagtgagccgagatcgcgccactgcactccagcctgggcaacagagcgagactccatctcaaaaagaaaaaaaagagagaccctctttttcttaacatcgcatatcaagcctttaaatggctttgctaggtcacatgcttatccccgagaccaggagatcatggcactactgtgggtggtctcgctaggaagatttggggagtaggggcagaatactggcaggcagtcatatatatccaccgtgcacttcaagatagtgatgtgatctgcagcytttagttgaagtaattacatatgttcaccttttggaagtttttatgaaagagtagtgttaagtgatacaaatgtgttgttcattttagtccttgcattatcttattttcaggataaaacataccctaaagttttcataaaatatttttctttccattattcttgttaattcacaattgttctttacttatttatggatatgtttgaaatgaaggttccccacgtgtgaaagtcaagaatctgattgaaagcatgcaaataaatgggtcagtgttgaagaatggctccctgacaaatcatttctcttttgaaaaaaaaaaggccagagtggctgtcttaatatctggaacaggtgagatgtggcttccccttcactgtagagctgttgactgcccttcctttcctccccgcactcttgtgagattgtaaggttactctcggcagagtctagggactggggggaatcatgagggttgtctttgtcttttcagcattcttagtctttccacttttcttaggaatttgagacagctcccaaagaaaaaagtaaaggatgtcagaaagctggttaaagagaaaccagaaaagatagaagctacagctcattttgtatcatagctttgttgttgaaaagtctgaaaacagttgaggaatttttattgktatcttattaattagaagaagtttatgtttracctttatggatagaggggtaaagtaataagagtattgtattctctcagatggatgtagcctgatttttttccctctattgtaagtaacactgctatgaacattcttgcaaatattcagtatgttcttaaatgcatatgtgatttttttttatttgatggccaagatcatagtgattctttttgagacagtcttgctatgttgcccaggctagagtacagtagctattcacagatgcagtcatagtacactgcagcttccagctctggcctcaagcaatccttccgccttattagccccccgagtagctgggactgcaggcatgcagcaccacaaccagctctgatacttcttcaggattcattcccagaagtttaattgctttacaggtcgatcttaaggttttaatgtactttaggcccaagttgataataaagcaaagaagctattgtaagatgcagccataaaaaagaataaaaccacatcatttgcagcaatatggatggaactggaggccattatcctgagtgaactgcctcagaaacagaaaaccagatattgcatgttctcacttatgagtgggagctaaacagtgggtacatgtggacataaagatggaaacaatagggccgggtgctgtggctcacgcctgtaatcctagcactttgggaggctgaggcgggcggatcacaaggtcaagagatcgagaccatcctggccaacatggtgaaaccctgtctccactaaaaatacaaaaattagctgggcatggtggcacacgtctgtagtccagctactctggaggctgagacaggagaattgcttgaaccctggagacagaggttgcaatgagctgagattgcaccactgtactccagcctggagacagagcaagactccatctcaaaaaaaaaaaaaaaaaaaaagatggaaacaatagatacaaaacagggaagtgtgggagaagaggtgagggttgaaaatttttctatcaggtataatgttcactatgtaggtaataggtacactagaagcccagtccccaccattatacaacattcccatgtaataaacaagcgtgtgtacccccgaatctaaaattttttttttttaaagaaactattgtaagagtcatagcatagtggtttgttcttgagagggtcagtttttcttgcttaattaagcagcttatttctcatcagtcagttttaacataatgttatactgtttctactacaatgctagatcacaagatacagaatttgtgggagcaattacatatcctaggagcaattacatatcctaaaccacgtcgtttgcagcaatatggatggaactggaggctatccaggaatatctgtgcttttcacaatctattaatccattatcccaagaggaagggagtttttttaatttttaatttgtatgggtacatggtaggtatatatatttatagggtacatgagatcttttgatacagccatacaacctgtaataatcacatccctgtaaatggggtattcatcacctcaagcatttattctttgtgttacaaacaatccagttattttatttcagtttttttttgttttgtttttgtttttgtttttgagatagagtctcactctgtcgcccaggctggagtgcagtggcgcagactcggctcactgcaaactccgcctcccagtttcaagtgattcttctgtctcagcctcctgagtagctgggattacaggcacctgccactatgcctggctaattttttgtatttttagtagagatggggtttcatcatgttggccaggctggtcaggctggtcttgaactcttgacctcagtatgatccgcctgccttggcctcccaaagtgctgggattataggtgtgagccaccacatccagcctcttccagttattttaaaatgtgtaataaattattgttgactatagtcaccctgttatgctatcaaacactagattttgttcattctaactatatttttgtacccattagcatcccctctccccgtctctcccactacccttcctagcctctggtaaccatcattgcactatcatcatgagttcaactgttttaatttttagctcccacaaataagtgagaacatgtgaggtttgtctttctgtgcctgacttatttcacttaacttaatgacctcccgttccatccatgttgttgcaaatgacaggatctcatcttttttatggctgaatagtactccattgtgtgatgtaccacattttctttatccatttgtctgctgataaacatttaggttgcttccaaatcttggctagggagaataaacatgaaactgcaggtatctctttgatacactgattttctttcttttgggtatatacctagcaatgggattgctggatgatatggtagctcttttttttaatttttgaggacccttcaaactgttctccataataattgtactaatttaccttcccaatagtgtgtgacggttcccttttctccacatcttcgccagcgtgttattgcctgtgttttggataaaagccattttaaccggggcgagacaatatgtcatagttttgatttgcatttctctgatgataatgatgttgagcacctttttatatacctgtttgcaatttgtgtgttttcttttaagaaatgtctattcagatcttttgcccatttttaatcagagtattagatttttccctaatgaattgtttaagctccttatatattctggttattaatcccttgtcagatgggtagtttgcacatattttctaccattctgtgggttgtctccttactttgttgattgtttccattgctatacagaagctttttccatatttactttagttgcctgtgccaagagaaagggaatttagaagcctcacatatcaccagtcttttccaagacatttattcagaaaatttgactgtcccctattcaaaatggcacatctctttttttaaaaagtgtgaggttgggcgcggtggctcatgcctgtaatcccaaatttgggaggccgaggtgggcggatcacctgatgtcaggagttccagacgagcctggccaacgtggtgaaaccccatctctactaaaaatacaaaaattagccaggtgtggtggtgggctcctgtaatcccagctactcaggaggctgaggcaggataattgcttgaacccgggaggtggaggttgcagtgaacccagatcgtggcactgcactcctagcctgggcgacagagtgagactccctctcaaaaaaaaaaaaagaagwagtagtatgagctcactgctgtttttctcccttctcaggatcgaacctgcaagcacttatagacagtactcgggaaccaaatagctctgcacaaattgatattgttatctccaacaaagccgcagtagctgggttagataaagcggaaagagctggtattcccactagagtaagttacttgggaaaatatctttgctgtgggccatatttaagctcgtaatctgccctcacaggaccctggtctatgggcacttgttcttgggacttcgccattttgggtgggtgctgggcttgccttcttcatcctgtccctttcttaataatctctctatcaggtatatctttacaaggaagtgaagtatggtctgtgtaaaggttgagtttttaattatttttggtaattcattgaaaagggttgtgcttatctttttctattacaggtaattaatcataaactgtayaaaaatcgtgtagaatttgacagtgcaattgacctagtccttgaagagttctccatagacatagtctgtcttgcaggattcatgagaattctttctggcccctttgtccaaaagtggaatggtaagcaaaaattatttgacatcacattgggaaatcaattgaaaatggtctccagaacagataacttgccaaacaatcccagtagtgaacacccatcccagaaatccaactcctgtttgactgtgatattttattaatactttaacacaggtcacagtttaatttcctttgttttacactaaagaatgacccaatgatgatttattaacctgctctctatccatttactttggcttgctgtaattaatcactttttctaatgtagcttagttttgtttcacattactgcaaagataatatttcatcttttgaataaatattcagaagaccttcctttatttgtttggaagcaaaagagagtgattccgtatatcccaaaatgaagagtccatcctctcttaggaagcatagaccattgccaggagttggcaaggaggaggttattgccagaaaacacatactatctatgttactgccttcttcccaaaagccttgactgcatcctgtttgtgtatgtgtgcacacagttggtcaataaatgcattttccctccaaagagtttatgtattcttaggtgaatgtagttagagcacttgtggtgtgatataaaatagacaatgcctttggtgacatgagccacacagaactaatctagcatctgtctggtggacaggtcactttgtggttagaagtcaagcacatagatgctatgtaagaacctcttgcttatttttaatagtacgtgccagcaacaagctggtattcagcttgaactccccaccttcctgtcaccatgartgtctgttcagagcaccccagcatgcctttaactgtgcaaggcgggtacttgctgcttccagggccttcttggatgagaacttacttttacctcatttctgtgtttggcaaagaaaacatccatcccagaaatccaactcctgtttgacttcggatctagataggaaaacgtattcctttaacagaatacccaggatttttaaattctgaccactatgctttttttaatttttaggaaaaatgctcaatatccacccatccttgctcccttcttttaagggttcaaatgcccatgagcaagccctggaaaccggagtcacagttactgggtgcactgtacactttgtagctgtgagtatgtstttttctaccaacataatattagtagtcagatgtaaatgacactggctagaaggtaatgttcaaaacttttgcttacwtttccaggaagatgtggatgctggacagattattttgcaagawgctgttcccgtgaagaggggtgatactgtcgcaactctttctgaaagagtaaaattagcagaacataaaatatttcctgcagcccttcagctggtggccagtggaactgtacagcttggagaaaatggcaagatctgttgggttaaagaggaatgaagccttttaattcagaaatggggccagtttagaaagaattatttgctgtttgcatggtggttttttatcatggacttggcccaaaagaaaaactgctaaaagacaaaaaagacctcacccttacttcatctatttttttaataaatagagactcactaaaaacaagactagttagtgcagcatatctgagacatacagttttcttggtcttttttatgctctttttctaaccgtcaccccctctttttttttttrgtattgcctgacaacatgatgaatcacctccatgtttataagttttatgttttcagctgggcacagtggctcacgcctgtaatcccagcactttgggaggccgaggcaggcggatcatgaggtcaggagatcgagactatcctggctaacacagtgaaatcccatctctactaaaaatacaaaaaatagttagctgggtgtggtggtacgcacctgtaatcccagctactcgggtggctgaggcaggagaatcgcttgaacccaggaagtggaggttgcagtgagccaagatcatgccactgcactccagcctgggcaacagagcgagacttgtctcaaaaaataataatgggctgggtgcggtggctcacacctgtaatcccagtactttgggaggctgaggcgggcagatcacgaggtcaggagatcgagaccatcctggctaacacggtgaaaccccgtctctactaaaaatacaaaaaaaaaaaaaaaaaaaaattatcctgggtgtggtggcgggcgcctgtggtcccagctacttgggaggctgaggcaggagaatggcgtgaacccgggaggcagagcttgcagtgagctgagatcatgccaccgcactccagcccgggcgacagagcgagactccatctcaataaataaataaataaataaataaataaataaataagttatgggttttctgatctttgatcatatgcttttgaagccatgactgctggatgtatctgagttaaaatgaggaaaagaaacatgaggacaaacccaagtgtatcacctgggttccgtttataatcttggttatagattccggtgtgtaaaagttgcccagcctccttctgatcagtgtcaagtgactatctcttccccaagtctaacaaggcagtatctcttccttatattgtatagctgatttgagacttttccgaccatcgtgatcataatctggtgtgttaagatttctggatagctcccatttctgaaggatagtatcctttatgctttgaagtatcattaaacgttcctctaattattgacagtttctgtaatccccagattttagcttcagtaaagtttaattatcctgtggtttataaagatccatacttctctgcaagtcactagaggattagggggagagttggtggcttttagattcaagcataaaactttaggcacatttctcatccactgtgtctctctattcccttgtcaattaaagtaggcaaatatcattcatatagttgttttgatgagacagtctcactcagtcacccaggctggggtgcagtggcaagatctcagctcactgcaacctctgcctcccgggttcaagtgattctcctgcctcagcctcctgagtagctaggattacaggcatgcactacgacacccggctcattttgtatttgtggtagagacggggtttcaccatgctggccaggctggtttccaactcctgacttcatttgatctgcctgctttggccctcatagtgctgggattacaggcgtgagccaccgcacccggccctcctttggcctttttaaaaccaaaattgtctttacctcccaaagtgtttttcagcaattctaatgcatacatttgcctcctccactgtttaaaagagaccatctctgacagccattctttcacaagccatgtaaattttacatttaccacagtgttagatcattttcctttatctggagccaaatgttaattaacagttaaaaactgattcataagtggagacaatgcaaatgttcatcagcaaatgaactgataaatatatggataaatatatccatacattgaatactattcaattataaaaaggaatgaaatactaacacatgctacagtgtgggtgaaccttgaagtattatgctaagtgaaagaattcagggccaggtgcagtggctcagctctgtaatcccagcactttgggaggccgaggcaggcggatcacgaggtcaagagatcaagaccatcctggccaacatggtggaaccctgtctctaataaaaatacagaaattagctgggcgtggtggtgtgcacctgtagtcctagctactagggaggttgaggcaggagaattgcttgaatccgggaggcggaggttgcagtgagctaacgcccctgcactccagcctgccaatagagcgagactccgtctcaaaaaaaaaaaaaaaaaagaattcagtcataaatgaccacatgcggccaggcatggtggctcacacctgtaattccagcacggggggcccaggtaggaggatcagttgagcccaggagttcaagaccagcctggacaacatagtgagacccccatcactacaaataaaacaaaaattaggcatggtggcacacacctgtagtcccagctacttgggaggctgaggtaggaggattccttgagctcaggaggtcgaagtttcagtgagctgtgatcgcacaactgtactccagcctgagtaagacgttttctcaacaacaacaacaacaccaaaaaaaaagactggctggtctcggtggctcatgcctgtaatcctagcactttgggaggctgaggcaggcagataaccaggtcatgagatcgagaccatcctggccaacatggtgagaccccatttctactaaaaataaaaataagcggttgggtgctggtggctcacgcctgtaatcccagcactttgggaggccgaggcgggcggatcacgtggtcaggagatcgagatttccttattaaatgtttcatggcaacatggtgaaaccccgtctctactaaaaaagtacaaaaaattagccaggcgtggtggcgggcgcctgtagtcccagctactcgggaggctgaggcaggagaatggcgtgaacccgggaggcagagtttgcagtgagccaagatcgcatcactgcactccagcctgggtgacagagcgagactccgtctcaaaaaagaaaaaagaagaaaaaataaaaataaaaaataagctgggcgtggtggtgcgcgcctgtagtcccaactactcaggaggctgaggcaggagaattgcttgaacctaggaggcggaggtggcagtgagccaagatcgtgccactgcactccagcctggtgacagagtgagactctgtctcaaaaaaaaaagaccacatattatacagttctatttatatgaaatgtccaggctgggtgcagtaccatacacctgtaatcccagcactttgggaggccgaggagggaagattgcttgagtccaggagttccagaccagcttaggcaacatagcaagaaaccatttctacaaagaataaaatataaaaattagccaggtgtggctatgtgcggtggctcaggcctatattccagcactttgggaggatgaggcaggggggtcacttgaggtcaggagttcgagacctgccaggccaacatggtgaaatgccatctctactaaaaatacaaaaattagccgggcatggtggcccttgcccgtaatcccagctactctggaagctgaagcaggagaaccacttgaacctggaaggtggaggttgcattgagctgggattacaccactgcactccagcctgggtgacggagtgagaccttgtctcaaaaataataagaagtagaagaaagaaagggccgggcgcggtggctcacgcctgtaatcccaacactttgggaggccgaggtgggtggaccacttgaggtcaggagtttgagaccagcctggccaacatgctgaaaccccatctctactaaaaatacaaaaattagccaggcatggagcatgtgcctgtagtcccagctcctcgggaggctgaagcctgcaggaggactgcttgagccctggaggcggaggttgcagtgagccgagatcacgccactgcactccagcctgggcgacagaggggaacttcgtctcaaaaaaaaaaaaaaaaattagccaggtgtggtggcacacacatgtagtcccagctacttgggaggctgaggtgggaggatcacttgagcctaggaggttgagtgcaatcgagctgagatcatgccactacactccagcctgggcaacaaagtgagaccctgtctctaaaactaataataataactgaggccgagcacggtggctcacgcctgtaatctcagcactttgggaggtcgaggcaggcggatcacttgaggtcaggagttcaagacctgcctggccaaaatggtgaaatcccgtctctattaaaaatacaaaaattagctgggcatggtggcaggtgcctctaatcccagctacttgggagagtgaagcaggagaatcgttggaacctgggaggtggaggttgcagtgagacgagatggcaccattgcacttcagcctgagtggcagagcaagactctgtctcaaaaaaaaaaaaaaaaaaatcctaataataatgaataacatttaataaggaaatgtccagaataggcaaatccagaagacagaaaatagattagttgttgcctaaggtggatagaggtatttggggtgacaaaaaaagggtacaggggtttttgtttgagtgatgaaaatgttctagaattgattgcagtgatagttgcacaaccacaagaatgtactgaaagccattgaatgtacatgtcaaattcatgattgcatggcatatgaattatatctctaaaactgtttcccaaaaggagagacccaacttgtctgtcactcaaaaaaaacaaatcaattttttttctttttcagatggagtttcactctgttacccaggctggagtggagtagcgcgatctcagcttactgcaacctctgcctcccgggttcaagggattctcctgcttcagcctcctgaatagctgagattataggtgtttaccaccatgcccagctaatttttgtacttttagtagagacggggtttcactatgctggccaggctggtctggaactccccacctcaagcaatctgcccacctcggcctcccaaagtgttgggattataggcatgagccaccgcgcctggcctaaaaaaaaaaaaaaaaatctttttttataaaaaatttgattcatagtttttttaaatacaacgagtacattgaacatgcttcacattcagaacatgaagtcttttaaatgaatataggtagaacttccaacttccaggctttgtaacagaaatcatattaaagactcagtagcaagcctaatcctcaaatcccccatctgttaacctgataatcctcatgtgtaaacttatttaagaagctaactcctgagccacctgtattctgagcattgcaataaagatgtgaagattttaatattacaagttgattttgctttataaaatgaaagtttcatgaattgaaatatctgtggacactgaaacctcaacaacaattttttttttttttttgagtcagagtctcactctgtcaccaaggctggagtgcagtggtgcaatctcggctcactgcaaactctgcctccccgattcaagcaattctctgcctcagcctcccaagtagctgggattacaggaacccgctaccacgcccggctaatttttgtatttttagtagagatggggtttcaccatcttggccaggctggtctctaactcctgacctcgtgatccacctgcctcggcctcccaaattgctgggattacaggcgtgagccaccacacccaggcttttttttgttttgttttgttttgttttttgttttgttgagacggagtctagctctgtcgcccagactggagtgcagtggcaagatctcagctcactgcaacctatgcctcccgggttcaagtgattctcctgcctcagcctcccaggtagctgggattacaggcacgcgccaccacgcccagctaatttttgtatttttagtagagatggggtttctccatgttggtcaggctggtctcgaactcccgacctcaggtgatctgccggccttggcctcccaaagttctgggattacaaacagccaccatgcccggactcccagctaatttttatattttcagtagagacagggtttcaccatgttggccagtctggtctcgaactcctgacctcaggtgatccgcccacttcagcctcccaaagtgctgggattacaggcatgagccaccgcacctggccccaaacagcattttaaatttccgacatcaccaaactccagaaagtcacaggaaaaaaaaatagttgttataacaatatcactcaactccttgaatgcttcagttatatgcaccaggaaaatctaccactgaaaatcatttcaaatgaaatattcagctgaggagtctattagatcctccttcacttttgttgaaaaccaagtattggaaaccacgcaactttttttttttttttttttttttgagagggagtctcactctgttgcccaggctctagtgcagtggcgtgat

SEQ ID NO: 95943 - DNA, 23786 bp, Homo sapiens
atcttttttggcacatcatgttaaatctagtgactcataaaggcccacttgtggcaacaactggatcagcaacttaatcataataacttcaataataataacagttttcaccactcgaaaatagcgagtccccgcccccatttctgcttctgaatgattgtgtgtgttggtttggggtaggtagaaagaaggggcaatgagttaaatagtcccagtgtagttacataatgcacactacatgccagtatgtttgcatgtgtgtatatatacatatattgagcaagctgagaaagtagaagcccatgctctagctgccaggtatcaagcagaggaagtttctggcctttggttttccaagaatagggtccctccactttaatattattgacatttggggccagataattctttgttactagagttggcctttgccttgtaggatgcttagcagaatgccagacttctatccacttgatttcagtagcaaccactaccctcagtgtgacaatcaaaaatgtctccagatattgtcaaatacccccaggatagggacagcaaaatcagctttagttgagaagcaccgccatagagggaatcagggccctgtctcctatcaaatctcatacctgctgaatttcccagcatgagaagaggctgggcaacctccctgttggcattcaccaaagaatagccttaagttttctgaattgacctaattgcaggcccattagtgcccactcagaccaccttggcaggtatcaaggaaagtccagtcttaaataagtacagctataaattaaagaaactttctcaaaaagcaatgccctgcatgcatctggagacatgaaacaaaggttccataagaaactgggagtgtacatctggagacatgaaacaagggttcctataagaaaccgggagtgattcctcatataaggtagtcatccacaatcagtgaattaattaattcaatttttcttttgagacagattttcactctgtcacccaagctggagtgcaatggcatggtctcggctcactgaaacctctgcctcccgagttcaagagatgttcccgcctcagcctcccaagtagctggggctacaggtgtgtgccaccacacccagctaattgttgtatttttagtagagatggggtttcactatgttggccaggctggtcttgaactcctgacctcgtgatctgtccgccttggcctcccaaagtgctgggattataggcatgagccactgcgcctggccaattaattcaatttttagaggtctatgtgaagaaaccctcgactctcatcaaaacacaaaaaagcttgggacttaccaactaataataatatatcctctaaagttattacaatggttgtgagaatattaaacagaatgataacctctggccatctctaattttattggcaataaatccctttaaggaaaagtagtgtttatttccaagagcaagaggtaaccctggcctttgatgtagacacggtccctctgagtacacatgtgatgaatgctggcagactccatggaacacagacctattggtggggggtctactggctatgtcttaggaacttaccttcattcatttaggccttagcaaagatcacagtctatgaagttcatgggcagtgctggcacagaaccaagtgaaggtctccaggcataactagaaagtggtgaagagcaaagttgagaaaaacaagctatctctattgtcagatcaaataattcttctttttaaaaacccttccatggcttcacatttcaattaaaagaaaatgtcacttcctcctcatggcctatggcatgatccagccccaacatcacctcctactattctgcccccaactcattctgtgtgggccacactggtctttccctgttctttctgatctcagaacattttaccatggcattctcattgtctggaccactctttgcattgatcttcacatggctgggtccttctcaacattcaggtctcagctaaaacgtcacccttctcagagaggtctttgctgacaaccatatctgagaaggtatcctgagctctcaatctgtatcgtgcacactgatcatctggggatcatgttacaagacagactttgactcagtggttctggggagggacttgaaattctgcatttctaacaagctcccgaggaatacaaattttctgctccacagatcatctacccacaggggtgggtagacccccatgcctcaatctttgtcacactacctgtgtcatttaattggtggcttttatcaggatcttaaattatttatttatctgtttgtgttggattgtttgttgtccaatctattcatttactagaatgtaaattccctgagagcaaggagtctgtctagcacttttaaattctcagcacttcccacagtacctgacacatcataggtgctccataaatattgctgaatgagtgaaacatcactcattcaagattcattgactctgtgatcccttccagtgtctgcttctgactgcttcagtgagcactcaattatacaacagaaactacactgtaatgatagggcagtgctacccaagtgccagtccagaaactgctagttattggccaacactgaattaagaatcttgtactataatataaatctgctatgccactaagcacaattttatctgagatgagacatttttcatagtaagactttctggatgaggcaagcaatgctttgccttgccttgtggtgaaagctcctcatctcatattagaagggtaacagtgtgtgaactggtccccactggcaagacacattttgagttgtgctgatatagcggatataaagccaaataagatctattttttaacttcagaaaatccatacataggtaagagaattacacattcaaatacataactgcaaatcttttgtcaagtgctataatacggaattaagtggaagaactcaggaattgtagaaaaaaacaaataattggtcttttgtgctcccccttagtcacacctttcctgacacctgctctcattataaccacaaaccctcccaccataccccttcctcctgatcacataccactcatctgggcatgttcttccccttgggccctgaaacactgaagttacaggaccaggcttgggtcttctgagaaattgtgaaagggaactgagaattgtggtagagaacagaaaatgataggagagatagggaattgtgggagaagggagaattgcgggagagaataaagtatcatgagagaacagagaattgtgagagacaatgtggaattgggagacagactaggcagctgtgaaagagaacagaatattgtgtaataagggagaagtgcaagagtggagaattgtgagacagagcaaagaattgtaggagatacgaggaattatgggaaagacaaggaattatgggaaagaacagagacttgtaggtgagacagggaattgtgggagataataaagaaagggggaagacatcaggaattgtaggaaaaaacagagaattgtgggagtgacacaaaattgtggacacacggggaattgtgggagagaagggagaattatgaaagagaagagattattgtgggagagatgggaaattgtgtaagagaatagagtattgtgagagaacagaatgatgagggagactaaggagttaggggagagactacagaattgcaaatgaggatggagaattttaagagaatggaggactgtgagtgaaagtgaagaattatcagagagaagaaagaattaggagagagatgtggaattatgagaaagacaggaaattgtagcatatgacacagaattgtgggagagagcagaattgtgggagagacatagatttgtggagaggacagcacaaagaattgtgggagagacacaggattgtgggagagaacaaaaaattgtggaagagacacaaaattgtgggagaaaagggacacttgtgggatagaaaattgtgaacgagaatattgtgagaaaacagaattatgagagagaatgggagttaggggagagactggggaattgtgaacaatcatggagtattttgagggaatggagaattgtaagagtggagaattctgcgaaagaacaaagaattgtgggggagatggggaattataggaaagataggaaattgtagcatagaatacagaattatggttgagataaggaattgtgggagagaacagagaattgtgagaggaaaccaaaaattgtggggagaaacatggaattatgggagacacagggaattgtgggagaacagagaactcagggagagacaggaaattgggggagagaacagagagttctgggagatacagggaaccatgggagagaatacagtgttgtgggagagacggaataattatgagaatgaagggagaattgtgggagaaaggaaatcatgaaaaagaatattgtgaaagaacagaattatgagagataatggggaattatgggagagactggggaataagaacagagtattgtgaatgaacagaacattgtggaaatgaataattttgaggaattgtgacagacagagtcatagggaatgatggaaaagacagagaactgtgggaggaatggaactgtgggaaacagaattttgagagatacaagaatttgtaggaaagaataaaggcttgctgggaaacccagcaaattttgggaaaaacaacagaattacgggcaagacagggaattgtgggacagaaaagtgaattgtgggagacacaaggaatcatgggagaaacaagagaattgtgagcaagacaaggaattgtgggacagaaaaatgaattgtgggaaggaatagaattttgggagtgacatgggattgtgggagaaataaggaattgtgggagagacagaagattgtggaaagaactgagaattgtgggagacagaactgtgggtaacaaaacagaattgcgggagtgaaaaggaattgtgggagggacaaaagaattgtgggtaaagagagaagttgagctgtgatagttgaaatggaatccttgggctatcctgtaggcagttctgatgctgggatggcccttctgagttgtcccctttggggctaggggcctggacttatgtgcccttgcagagaccctcataggatgcagatcgtccccaaggaggggaagtgattttgtgtgaggcaattctcttaggcagaggacaattcctggagactcagctgaaagctgtgagcccccaacactttctgcaccaggggacatctggacgtatttcacagagccactatagttatatagaaagatatatgtttctttattaacactttaagtaacaagatcaaattaccttaatttcaaagtagtggatggatgatattttgagacaggcacaacaaccatatgtgacataatttatctgtaatgtgtattagtgccacatacagctaatagtactaggatttattgcctacatccctgatggaagaaaatgctaaatttctgttggaggtaaatgaaaatacagacattcaaaatcacatacccagttaagaagaatttagcagccagaacactgtcttgttcacttttggatctccaccaccgaagttatgggcacctactaacgtttcttgaatcattgctacaattaaaaccgataagatttaaaaaaaaaacaaatttaaaaactcctccaaagcactccttctgccgcataaagcatacatagtagagctcttcactctagggaagcctctggagcagacaaccttccctgccaccgccacattttgaaaaaggctcctggcctggaggggcgggcccagaaagcggcccccgcagcagttacaggccggggcgaggaggggacggaacccgctctccgtgattgacggaaaatattactcttcagcccgcctcccgcgtgcccggaagtcccgccttctaaaaaggaagtaggggtgcgtgagaacgccggcggtgaccgcagccacagcggtgaccgagtgagaggaasgcggcggcggcggcggcggcggcgtgaagtcactgctgctctgggttcgggttggcgactgaaggcggtaccggcctcccggaacagcccgggggagggcttaggtgcagaagggcaggctggccgcggccggtttggtctggggaccacgggctggagcaggtgggcaagcgccgggacggtgtggggaagacacttggcagcttctcgacctctggtgtcccttcgtttcttcgaattcctattcatgcgccgcacccttctcggacccccagcccctcgctaaggctctggggatgggggtcaagtctaggctcaatggacctcccctcctccacccgggtcaccactcctcggaaatcctcgccccactcccgcctcaggcctgtacctcctggctgtgacgtggtttctcagcgactgcctcacctcagtcccaaaatcctcactgccttagatacatacgtgcccccagaggttggcctgggtttcacagtatttccctaagggggcaatatattaaagctgtccttcgaagttagtaccctgcctggtagatgcccatgggatgacaaagaggaggaacaagggttgaccagattaggactaacgagagaatagtctgagtccagagacattaatctgtctctttgttttggcaggtggaaatttaaaattgtttacagtcaacactgtttccagccatgggtttgtctccatctgctcctgctgttgcagttcaggcctcaaatgcttcagcgtccccaccttcaggatgcccgatgcatgaagggaaaatgaaaggtaatcggccctttgcctagaaaataaaaacaaaagataattcacggctgggtgcggtggttcacgcctgtgacagcactttgggaggccgaggtgggtggattgcttgagctcaggacttcgagaccagcctgggcaacatggcaaaaacctccctctacaaaaaaatacaaacattagccagacgtgctggtgggtgcccgtagtaccagcgactttggaggttgaggtgggtaggatcgcctgggaggccaaggttgcagtgagccaagattgtgccactgcactccagcctgggtgacagagtgagactgtgtcttaaaaaaagtctggaaagcctctaaaggaagaggcagtgtagtatgctgctgaggctggtaggcatgggagtcaggcaccctgggtctggtcgttattttgcgtcttattgaggtttgtgactctaaacaagttaactctgttagcctcagtctgtcatctgtaagatgaagatataataatgtttcacaggcctgtcatgatgattgaggtagtacatgagaacgtagtgagtactctaaaccagccccaacttcccaaagtttacttgtgcctacatcagtggttcttaactggaggggggcaatccccccttcccacaggggacatttgccaatatctggaggcatttttggttgtcacaactgagaggaaagtgaatagagggcaggagtgctcctaaacatcctacaatgtacagaacagccccccaacaaagaatcagctggccccaaatatcaagagggccaaggttgagaaaccttagtctagatctagctgtcttaataaataacttttgctcgtatagccatttcagtattttcgtatataaaagtaagccatcacttaacgggcttgctgtccattctttagataagaaaatgaaaatggaaaagctgtctttcatttttaattcattcatgtctactttagattttttatattaaagtgtggcttgaatcagtaagtcgtgaagggcagaagcaacatggtgtgcttactgagtactaatgtttgcgctgttattcatttcttcagtcagccagcctattctgagaggtcactgcccattctgtaccaagcattgctggattttgtttgtttctgcacgagagaataacatcatacaaaatggagctttgcctgatagagcttacattctcatcttcataagctatgtggtcttacgacttcataagctaagttttctccctattttatagtcaaggaaactaagacttggagtaactgatgctccaagtcacatagtaagtggcaaagccagcaaaagttctgtgaccttggacaaggacaggcagtgttcttctggggtttctttgtacaggaagaattgagacagatcagccaaagcaggtgtgctcctgttctgagtgtcctcagggagattctagaacccttactttggttttatttcatttgctgtatatcttggagagctgccagacttactacattaataaagaatgtgggtgtctataggagatcgaaggggctactggttatatgacgtgaaaagttgaaatgttattttctttgtaacacccagctgggatctatgacttggaaaggattggtgctttcagtggtagagaggaaaggcatagcaagtcttccttcacccctaaagtgggcagtggcacagggcaccaggaaatgagggcttgggaggagaagtgcagggaaggaagtgaaagcaaactcagctttttcatgtgtattgctgtagttgctgctgctgctgcctgaggccaagattccattacatgagcagctgtcttctgtgtctcagctctccaagtgcctgctcattctctgaaccagtttcccagtccctcactaattgggatcagcatcctgggtctttgggcatagcccttgctattgctcatctcattaggctcagaccttccctcgtaatgggcatcttgatcctgtatgggttgtggaatattttctttattgtctgtcttttcctgttaaactcttgccattgactgatgggaataggccataggccacgtggttttcctgtgccttgtttcagtcttgagacaaagcagagtggcattcagatttttttgcagtagcctctgtgatgtctcctctgttcattttctcctccccttccttgtacctgagataatgcatcagtaatgaaagcctggattgcaactgtgtcctgattggatctgggcttctctggaactagtgaatggaaagtcaaggagaccctgtgaaatgtggctggtcccctcttaggttcctctaacagctccccagctgctcatccagccaggttactcaaaccatggcacagataacacatgctcttgcaactgccaaggttttttggcttatttttgctgggggtgtgacacaattagagaatgtatactcatttttctttcaaaggaaatgtaaattttagaaccttctcatctttaggattttggaatgttagctagttcagttcttgatagatttaaacagaagaaacctggcttttcctatggtggtaatcattggtcagaaattcagctctttagtgctccaattgagagagttagatgtcctgccttcatggtgacaccatttttatacttgattatttcaggctgtccagtgaatacagagccatctggcccaacctgtgagaagaaaacatactctgtgcctgcccaccaggaacgcgcctatgagtacgtggagtgtcccattaggggcactgyggctgagaataaggagaacctagatccttcaaatctggtaatccacactcatcttttctttctggagctttttatgcagggttgcttatacagactcccaagacaagttgcaaatggctaggatgaattcttctgtcctttgaaaacagagaagttagatattctatctacagtgaaaatctagaatgtgttagtaagtgtagtttcagggagtgcctgggaaaaaaaccagagtgattatgaggagccagcatagttgtactgggaataagccataccaaatgaatattttcttctgggacagttactaggtggtagatgggaaattctgtaagaaccatagctagagttagttaaggtatctttggtctggggaaactttgtagacacattacatgattggggaacttcttcaggtacaatagggtgccagcctgcccgagtcactagggtggttcactgtcgtgtgactgccagcaaatttaatgccattgagaagtgagggcaaggttgatgtgacatcactacattttgtgatagacaacatcagaaattgtggtctaaagtttggaatcgtgttttaacgggaggctcaggcatatacttcagagggccacaggattatcaagaatagaaattttagtgaaccagacagcctgtaaagaaactagaaatatttagcctggaaaagaaagggcgtgggggatacaatagcagcgtccacctcaggaatcaacaaactatggcccactgcctgtttttgaaaatgaagttttggacaatgcaccaagattatcttgcacataggccttcaaatatttacaccagaggtcattggcaaactgcttctataaagggccaggtagtaaatatgtttggttctgtgggccgtagggtctctgtcacactacccagttctgctgctgctgctttctctgtagcatgaaagcagcgacaggcagcattatccgaagcccctggcagaccactggcctagatgatctctaataggtgagtggttcagaacatgggccttttggaaccttacagacctagacacttaccccatgggatcatgatatgtagtgagaatgtgaataacagctaacttttcttgtggtcactttttaaaaattttttattcaaggctagccaactgaagcagtgggagaggagaaggaacaaagaaatctgtaactggttgtgatcaattagtcgtaaacactactgtactcagaccagcctcttttggtcacttttctagcgtttaagctaagcaccctacattctcccctttaatcctcataacaactctgtgcagccagtattcttagtgtccccatttcagagctaaagatactgagagtgaaggagtcattcatcccacatcaccagctaggaaatggcagagccaaaactgaatccttatccacctcagacccatgttcttaaacacactgtggtgataatgcaggtagaatactctgcagtgcctactacacatagcccttcctgctgtcggtattctgagggccttgttgtgatggagacttttaattaatgtttactaggaaatcctttatacttctaacacagaaagttcaaggccagtcattcccaaccttgggtgattttgcccctcaggcaaatatcctgctgaacatcctgcagtgcttagaccaccataactaaaaattgtccagctccaaatgtcaatagtgccacggatgagagaccctggctaaggctaagtgctagcataacagtattggtgacccacatgtctgggagaagggattcttcccaccttctgacctcgcagcgttgagatgcaaagactcatctgtaatatattttgcctaagggatgaagcataagcagaaacctaaaaaatctgagaatatttttttaaaaaagcattgctgtacatgtgtgctatgagagttttccccagagaatgaatagtcatttttgaaaagcttgtcgtaaagtttttagaaatgcctgaagatcgtggcgttagtttctacttcttattccttggtgacattacttctaaatttgttcaaaggagaaagaggccaaaaatttaaccacagtgtttaccatatttgagaacttaatcagtgaagaaacacaacctcagtaatgtgactcttcaaaacagtcaaattatgtgagaagtctgaaattttgatgtcactgatttaataagtaatctgtgctttttgtgtgatgtattgctttccaggaagtagttaattatattgccttttactttatatcctataaaagcaaatctgttcattttatttagatgccaccaccaaatcaaacaccagctccagatcagccatttgcattgtctactgtcagagaagagtcatccattccgagagcagattcagagaaaaagtgggtttacccttctgagcagatgttctggaatgcaatgttaaagaaagggtgagtgaacatattatttaagataaaaatttcttgtcagaatatccaagagttatatgctaaagagattttttaccttcaaaacaatatagtacatttttatgtattaatcagtttataatcacctgatttttcacacctgtcagaatgtaagtgcgagaccagtgtattaaatcagggttctcaagagaaacagaaccaataggatatgtgtaggggggcaggagacaaggaaggcaggaagatatttattgtagggaattgacttacacaattatataaagctgtggagtcccaagatctgtagtcagcaagctggagaccgaggagagccgatggcacacttctggtctgaaagccagcggtctcaagatgcaagaagaactgatgtttcagtttaagtccaaaggcaggaaaagtccaatgtcccagctcaagcagtcatgcagaaggccttccctcttactcatggaagggtcagcctttttgtcattcaggtctgcagctgatcagatgtgacccacccacacggagtggggagggcagtctgcttcacttagcctactgattagaatgttactcacattcaaaaaacaccctcacagacacacccagcataatgtttgaccaaatgtctgggcatcctgtggcatagtcaggttgacacataaaattaaccatcacagctagtaataggttttttaaaaaactgaaaacactgttagataaaatgtttagaaaaagttaggggatcattgatcagtggtactatctgaacaattgtcaccttaaaaatagatgattctgtaagtctggtttactgtgactcagtaaaatgagactaaggtgaaccttttatatttgttttcaatgcttctatagtagctttggatttatagtgctgctccatgatcatgggtaaatcttgaaaatgagccttagatctgttaaattcagagaaaatgagcattcttagttctttctcaaaggggaatgttgaataaatcatcttatgaaaatatgtggattaactttatggcattatcaggaacagttgtcaaattttaccaaatattctttcctaggtggaagtggaaggatgaggatatcagtcagaaggatatgtataatatcattagaattcacaatcagaataacgagcaggcttggaaggagattttgaagtgggaagcccttcatgctgcgtaagtatgtttgagatcttaaatgtttcaagcatctttgttatttcatatcagctttctagagttttaacattcaaatcatttgttctaataaaacattttatgtagcaggcatggctcagtgacaattgttgcatgacaggccacccttcttagttgaaaaatagcaaccattttattaggcttgtggattcagtgggtctgggtagccaaggacagggcaaggatggcttgtctctggtccttgatgtctggggcctcagctgcaaagacttagtggtcaggatggcttccgagccgtgggctagagtcttctgacggcctgctggtttactcctctggcgagtggtcatggcctctgaatatggctgttttcggcttcgtcatatggtggctaggttccaatagctagagttccaaaaagcatctctatctccattttctgacccagcctgggaagtcccaaagtgtcagaagcctgcccagattcaaggggaggggacagagaccctgcctctcagcagaaggagcattacagcccttcgaaagcagagcatgtgggaagggagatgctaaaatgccatctgccccaagggaggtgggaaagacatttttgttccctcaatagcatttattgaatccccattaggactaaacacaaagagatgtcttaactcagagctctttttctcaaggagaataggtaaatgcagctgtgtgtgttaaaggagacaggacttcagtctgttgagagtagtggttctcacactggagcgtgcatcaggatcatggggaaggtttgttaaaacccagcatgctgggtcccacccgcaggatgtctgactgagtctgtttcgggtggtgcctagactgggtgtatctagaacactgcatatgctgctggtttgagccagattatgtcataaacagtggttttaaattcattgcacaatgcgattaattaatttcttggctaaagtccacttaatgatttttttaaggtgttttgtttgtttttaatatttgcactctgaagttcattggttgcactccctggctgtcacaggctgggcctcaggcctggggtgggtgcatgtgagaggggaacaactgcaaccgtgttgccctcagtaatctctggactgagaggagccacaagtgtttgcagtgacctactttgaaagtgtgttctaattaagaccacctgctaattacttgtgtgattatggagcaaagcgaagagagaaaagggaatttcagtttgtcagtttcaattccttctccagttattttctggacggtcaaaattaagtagaccgtttaaaaactcatgctatgatctccagaagaaagttttgcctagattgagtttacctttttgcctgtgatcctcttgagaagagatgttaaggagaggagtagttcctaaaaggagaagaaaagtaactcataagtcctcaaatagaagtcctttatactttggaaatttttctccctcccacttacttagacacctatcttgttatccatgggagcagctaacaatataggtggcctgctgacttggccaccactccctctgtctcggtaacagctgtctgtctagcctgtaggtgggctgtgaactccacgaggacagtgctcagagggtcttgtatagcaggtcagtgccctgctataccctggtgcctacagagggctggcacctagagagtcctcagcaggggtctgcgggtagagggagtgcatttgccagctaggactctgccactcctcatcttatgtgtagttattaaggagctggtccaacattaattacaatccatttctagggattaatccatcattttcttttcttcataaaggctgttcattggtttgaaatgaaagaagagtataggattttcttgtttgtctgaaaaaccccagctgctctgtgccaaaaagaagcatgatgcacaatacttgaggctgtttttttttttaatttgcctttcctcctccaccaaatggaaaggccctgtttcctgactcctcaaagtgcagtgtagatatccagaaggaaggggaggcaatggaatgcaccagtccagaaggaaagaggaacatttttaacaaataggcacttgttgtttgaattattttagaacttacctttctctgtaaatgttatattatgtgaaatgtatacaggaaaaaaatggatattactaaaaaattagaacatcatctttgtcaaagaaaagaaaatattttaacagacttttcttatttggggaattctagagagtgtccttgtggtccatcattgatccggtttggagggaaagcaaaagagtattcaccaagggcacgaattcgttcctggatggggtgagtgtcagcgcagaagtgttgtttcaccatcctcaggtcagggtcaactttctcttcacaccaaaaccagtctaagaattgcagtgccatcttgcaaaacttaatgcatattcaactgtagatgtctttctctccctgaggtttgcccattaatgggcagatttattagggtgtagtagattgcttcctatatatcatagggttgaatggagttattgtcaatgttcttggatctgccctcttactcttcccgtgatctgtgtctttgggtttatgcacttagccatcctccctttcttttctagcatacttgagattttttgctcacacctgcatctctgcagtatctcagctgacctccctggcttaggtctcttccccattggccttattcctttgtagacagatgagctgtcatctgatacggacttatcacagttcttcagtgccatcttcccttagtgctgttcactgtgtaattcttcaagtctgacttccccagttaggtgtttgggagcaggtgtttgcatgtgcttcttgagttttctcatggcttaaaccgggactgaatgtattgcaagcattttaacactcagtggcatgtttttattccaggtatgagttgccttttgataggcacgattggatcataaaccgttgcgggacagaagttagatatgtgattgattattatgatggtggtgaagtcaacaaggactaccagttcaccatcctggacgtccgtcctgccttagattcactttcrgcagtatgggacagaatgaaagtcgcttggtggcgttggacctcgtaaagcactgtttcagatggaaaaatataaactatttttttctgagcgatacattaaactattttccccagattgaattgcactcatgatgtaatgggaacttcaagtgggtaatcacactttttccttcacttaacgaaggatactatgcactgttcacttttgacttgtgttgtaccttgcagtttatagcagatcattttgttttcttcctacttagcttaagtgggaagcagtctctcagtttttcctttacctgcagtattgtctgtatatttcatctcgaaaagcctgaacaacctctgaaaaagagcttttaaaaagtgatgaaagttgcttttttttcttactattttctcaggaatactccagagatgtaaagcctgagagtccatggtgatgctcaagagctttcatctggccaaatattttaactaaagctgttcattataaataagaggtgattataccttttttaaaaaaagttaccattatttctaaagcccctatggtatgattgtgacctttaacaaaatgcaaaggtatacactggaaaggtactcagcaaaattctctccaaattctgatttatatgaatttcttggactggatagagtactttcaactataccttcctttggaacataccttttaaaaaatgttccctttaaatcctgttattctaatatgtaactctgctcccaacaaacaggtctcctcattgtccttggcatttgacaagttatcccaacttcgaatctcatttcttcctttgctggcagcctccacccttccccacatcagtcggcctaatccaaaccttgaaagcctggcttaagtcccagtatcagtgatggtccccctctaaaacatgattttatatttggctgagtgttaaaattcacaagatgagcatttttttcccagatggagaacgcttcaactcagtctagattttttttgtttgttttaaggaagctctaagtttgccattgaaactttttgtaccagtaatccataaactggttgttctatttatagcagcatgttacaaatgactgctttttttttttaactgtctatactattaaatcctttaatttatcctgaatgctgtagtgttaaattagtggatgaaattggcagtctgtgggtgattaatttggtatggatttgtcagttttgtgtggagtttaagaaatagaacagccttaaactctacatttcaaaatacttgtatattttaaaataaagctgattagttcacaggttttgaaaattttttggaataattttacacttaacgattgtttcttcagacgtattatctttataaaaccaatgctttatgatagaatgatttataacccagcacacatatgtttattgcagcactgttcacaatagcaaagacttggaaccaacccaaatgcccatcaatgatagactagataaagaaaatgtggcacatatatactacagaatactatgcagccacaaaaaaggatgagttcatgtcctttgcagggacatggatgaagctggaaactataattctcagcaaactatcacaagaacagaaaaccaaacaccgcatgttctcaagagtgggggttgaacaatgagaatacatggacacagggaagggaacatcactggggcccgtctcggggccgggggggggtggggggggttggggggggtggggaggaggctagtggagggatagcattaggagaaatacctaatatagatgacgggttgatggctgcagcaaaccagcatggcatgtgtatacctatgtaacaaaagtgcacgttctgcatatgtaccccagaacttaaagtataataatttttttttaaaaaaaacaatgctatagtctccctactccaagcagccactttttcatctactaatcttttttttttttttgaaatgggagtcacgctctgtcacccagactgaagttcagtggcacaatctcagctcactgcaacctccacctcccgagttcaagcgattctcctgcctcagcctcccgagtagctgggattacaggtgcatgccaccacgcctggctaatttttgtatttttagtagagacggggcttcaccatgttggtcaggctggtcttgaacgcctgacctcatgatccacccgccttgacctcccaaagtgctgggattacaggcgtgagccaccgcacccagccctaatcacatatttttaaactgtagaggaaaataattactgttggcattttttgggggggtcttaagtgctatcgaatgagtgtgggataagacattcttatgaaagacaaaacactaactggaaacaaaaaatatgccaaaggcaggattcacctgttttataggactgtggtaaacaagctttaaactcaagcaaacttgatgacaagatcaagttttatacatcgttttactacttccagaaaaaaccatggcttcctggattgtcagagctgctttgtgtctagattatgcttgattgggtccaggggtcaatactgataggagttttcgtgtacagcttgaaactcatttaggatattctctggagttttaaactaagtcttgtgtctgtggaaatagcactattcagaatcagaacaaattactgaacatcaggctaagtattggcagacaagctggggctacaaatggattgcatattaacatttagtattcctgtcagtcactggctaacaaaatgtttatgtcccctttgtgcatcgtataaggaatacaaaattgcaaaaggtataaccctgatatggtttggctgtggccccacccaaatctcaccttgaattttaataatccccacgtgtcaagggcagggcaaggtggagataattaaatcatgggggcagtttcccctatactgttctcctggtagtgaataagtctcaggagatctgatggttctttaaatgggagttccccgcacaacttcttttgcctgctgccacgtaagacatccctttgctcttccttcgcctttcaccatgattgtgaggcctccccagccatgtggaactgtgagtccattaagcttctttcctttataaattacccagtcttgggcatgtccttattagcagcatgggaacagactaatacccctacttgcagggaactcaacaatcttatggacagtctataaatgaaatggtggtaaatgctagaactccaatttaaggaacacattgtggtaacacacagtgtgagaattcacgtaagtatttttgaatatttagagatagttaccaatttctttactgagtcatcattatggtttatcttctcccagagattgcttcttagggaaaatgaagcaatgcacatttcctgtctcacctttgcagtgactgtcagaattgtatgacccgtcatttgtgtcaccataggcttgaggctgtgtgtgtgatgattacaaatgtgtgtcctggaggcagagtccttgccctgccctttagtcgctgtgtgatcttaatgtctctgggcctcagctttctcggctatgaaatgagagtaatagaaccaacttatcagagttgttttgcaggtactttgaggtgatgcctaaaagcgctgggaacagagtctgtgggtggaaatgttcagcaaatattagctatcaccattgatcaacaacagcaaggagagaaatcaaagtgctgagatataatctacttctctcatcctctggccttattccccgccccactccgccaccaggagaatcagtttagaggggtaacagcaggctctaatccccattttgatcaattttaaggattaccaggtgtttgggtgcttgctctaagaaagctcatgttatttaaaatcatcaaatggaaaaagaacaggttacagcctttgatctttcaaaaaatatcagggtaacaaattaggtacttgatatgcaagtcccacttgacaaaaagaaatattatattaagacagatacccaagctggagtgcactggcatgatctcggctcaatgcaacctctacctcctgggttcaagtgattcttgtgcctcagcctcctgagaagctgggattacaggtgcctaccaccacactcagcgaatttttttgtatttttagtagagatggggtttcaccatgttggtcaggctggtcttgaacttctgacctcaagtgatccacccacctcggcctcccaaagtgctgcgattcttgtgcttcttaatctaaaatatagctcactgtaatgtcctttgggtcacaaggttatccccctctgtgaaaatatattacatatccggattcaaaacatattacaaggttgtttactgcaaagaaaaagatcaaaaattatttcaaaagccatgtatattccttgtaacttaaggtaacatttaaaaaattatataatttggggggtatatagtatatcaaaatgaagcatatgaattatgccttgcgccactcatgacaaataatatcacgttttcatttataagtgggagctaaatgataagaacacagaggggaacagcacacactggggcctattggagggtggagggtgggaggagggagtggcttaggaaaaacagctaatgggtactaggcttcatacctgggtgacaaaataatctgtacaacaaacccccatgacacaagtttacctatgtaacaagtgtgcacatgtgcctctgaactttaaaaagaaaaacatttactgctgcagtagagattgtcactgtaccttcagtaaaatttcatgccattggtgtaagtggtaaagtgtctatttcatgcttgtgcactctctagtttggaagaaaaagctgacaacactttctgcaaatgattcaaccggaggtttatacatcacattgcaagtattctaatgtttttgtggaatcataccagatgcaggagcaaacatagttcctaagactggtttagggaatgaggcatgtacatatgggtgctatcttgtatttataattagcttttcattgatgcttttacacaccaaaggtcatatgtgataggggcacagaaataatacatcttgagtgttgtaacagaggaattgtgagacaagtcttcacaatcatagacgagtgaagtcctaaagaacaatgaaaagttactattttgaaagttactattttggagctctgtgcagaatcatcatttaaacactttgctattccttctacatttgggataacaatgtgactaattcccgtgccccttcaatggtttgctatagaatattatcaggatgcttttggcttctagtaagtgaatccctgcttgaactcacagccagaagtgcagaggttgggtgtacacttggttgatcctgcttctctggactccctttccttccatgttcaattttaacttcatccatgtagggctggttcctttcatcagcgtcaatgcttcctagttgctttgagatccttgtttatggtcagtagatatgaggtggggtgggacccggccatctaccacaaccatgggaaataaggtttctcttcagtctaattgggccaattcagcactgggcctgtgtcctaccacccctcccattttatgttcctgtgcgtgcttcatgcttagattagctcagacaaatcatcaggaggacatgtagtgaccacaagaggattccttcactgctgatttaaaatcccattcttagacatcatttcattaaggtctttttccttcatctgaacctttttaaaaatttttttctgagacagagcctcactgtagtgcccagtctggagtgcagtggtgcgatcttgactcactgcagcctctacctcccaggttcaagtgatcttcccatctcagcctacttagtagctgggaccacaggcacatgccaccacgcccagctaatttttgtattttttgtagagacagcatttcaccatgttgcccaggctggtcttgaactcctgaactcaagtgatctgcctgcctcagcttcccaaagtgctgagattataggcttaggccaccaagcccagcctgagcccttttcttatgccagggttttaaatctggaggtggtagctaacgtaatggcataaaacaagatttgagagctttgtttctgcactgattccctgtgttaagctgggagatttgggacaagccaccttaggcctgtaagtctcaatttcctgaaattatcttaaaggctcctttcataccaaaatgtttgtggcctcatattacaatgggctgaattatgtcatctttcaggttgagaatctttaagttaagggaaaacaatgtggtttgaaaccctatttcaaactagtttttatataaactacatcagtagacacactcttaaaagacctacacttaagcgaattccaagttaaccagtgctttcctttccctctataaaatgtgctggcttggaaacaattcaaacattcaccaattagtaaatggataaatacatgttggtatatccatgcaatggaatattattcacccataaaaataaatgaagtactgataaatgctacaatatggatgaaccctaaaaacattgtgctcaaagaggccagaaacaaaaggccactttcgtatgattccatttatttgaaaccctcagaataggcaaatttataggggcagaaagcagattcgtggttgtcagggctggtggaggaggaatggggagtgactgctaatggacgtgggagtttcttttgggggtgattaaaaaatgctctaaaattgatggttgcacaactctgtgactatactagaaaccattgaactgtatactttaaatgagtgaattgtgtggtttgtaattatagctgtttttaaaaatgaaaaagaaatagccgggcgcggtggctcatgcctgtaatcccagcactttgggaggctgagacgggcggatcacgaggtcaggagatcgagaccatcctggctaacacggtgaaaccccgtctctactaaaaatacaaaaattagccaggcatgttggcgtgcgcctgtagtcccagctacacgggaggctgaggcaggagaatggtgtgaacccgggaggcggagcttgcagtgagtcgagatcgcgccactgcactccagcctgggcgacagagcgaaactccgtctcaaaaaaaaaaaaaaaaaaaaaaggaaataaaaacgtgctggttgatccctacagccaggaggtccccatcctcctagttgagcagccggcttagcatgag

SEQ ID NO: 95944 - DNA, 111190 bp, Homo sapiens
  misc_feature (1)...(111190): n = A,T,C or G
attaaattaatttttaaatatatcctttgttgtattttcctgacgactaaatttgcagcatttcaaatgactctaataaagtgggactgtgagcaggcccatgtgtacccttgatcaggacataatatgcagaacagtgtcatgcactgtatttgctctgttaattttatcttatccctacatatttgtattagttcattctcacgctgttatagggacatacttgagactaggtaatttataaagaggtttaattgactcacagttccgcatgggtgggaaggcctcaggaaacttacaatcttgacgaaaggcacgtcttcacagggtggctgcagagagaaatgagtgctgagggaagggggaagtcccttatgaagccatgagatttcatgagaactcaggagaacagcatggcggaaaccaccccccatgattcagttatctccacctggtcccgcccttgatgtggggattattacaattcaaggtgagatttgggtggggacacagaaccaaaccaaatcagtattcattctggatgaatttttcattacaccttactggcctactaagtagaattaaagtcagaacacctattcctcatcttaagtagaataaaacataaaacatgtatctgtatcacatacagatcatttaggccttaaactgcatattatttccaaacccattagactaattactctgcttttaagaactcttaaaatagagtttttatcctatgaaatctgtcaggctatattggtttcaggaatgggtttgaacatcacactaggaatttgatgtagggtacataaaacaatggtttttctatcccaagcagaacatttttattcctgaaatagcttaaggacattatttcttatgaaaggaattatcaaaagataaatccagagggttacattttaataaagctggttttgcttttcagttttttcttttggagcaatcctctgaattaactccaaaataggtgacaaatgtttttgagaaggaaagctactttattgaaacaacataaaccacagtcaagagtgactagtactactgtagccaatgatgtcgaagtctcaccatgtccctgttcttgccactggtgtcctcttgcaagtatttgctcctctgcctgagggcttttctttggcctgtgcaacaggctggagtgtcctggagatacttcctggaacagatctcagccaagggagaaaaggaattggaggctaaatgccccagtgtgtcagttagggtcctcctgggagcagacactgagatggtattaaatgtacaggaagtttattgggggaatgcgtataagagaaaacggaggggagcctggaggaggctgggaaagctgtcagacaatgaggcaggcaggtctcacctgtgtgaaggaaggaggatgaaagtcttagacattggtgcagttctaaagtttcagcagggccaactggcagctctgacaggtacaaccaggggtctccttgctagtatgagatctgagagacagaatttcctgatgaccaaacccaatttgctgatctctcaggaaagcaggtatggtccacattgcctataagaggtcttcagttgagtagagccatagttgcctgcagtggtaacattaccagcacccagaattggccaaaaaattgaaaatgctaataatcatccttgaaatcatgaaactcttacaaaagtagtcaaatgttacagagctgcaatataaaataggaaactgtaagttgctacattgtagtggttgttaatggttacaagagctcttcttatctctaacatggtaatacccatgtaataaagggagtcttgccattcactgattatgacaaaacatttgatctgttgtttcaagtaaatgaaaatgagaaaaacactagcactacatgtaggaagaaaaaaacatatctgaatgggaggtgtactttcataaacgttttgaagactgccctccagaaatgaaactgtccatggatactgggttcacagctgctaaaagctgcctcagactgcccaaacacaggctgaatattgttatatgggattggtatcgacatgcaatgtagactggtccctggcctgctttgggactctagcccccagtaatttgtactgcgttcctgtcagtcctaactccagcagcggcttaaaggatacaatcattcagtacaatgaaaatccctagcacatgacttcttaggctcttgctaaatatctttaggaaaatgtatgagaaaagttttgacaaaacactgcagaaaccattttaagctactttgcaaaaacattttgatcatgaaagcttaccttttacttgtaaccttagtgacattgctgttgctttgggaccgagagccaacttgaacaacttgaatacagctctaatcttgaaggttgagccctgtttctggctccggcactttgatttccacaagaatctttgtgtttcattaaaataaacccccttcacttgatctctcttcagttggtctcttgttccaaatgaaaatacttcatttttatctatcacaagtttcctgttttctctagtggcaatttcctgtctatgatacctgcaagttatttttcaatctgttttttttccacagtgattctgctctcaagcttactagttttttattcataggatttccatttttctaatttaaaatcttatccttcactggttacaatgaatttctttaaagaaaaagctaatgctatttgtaacctactgttgcgttgcctttcaagaccactgttttctgttcgagccatttctttctcagtcattggtggggaacatggccaggtacaactagggtctgcagatcctgctatactaggaccaggatctgcagagcactatactaataactctgcagatcctgatcctgatataaaagttagcttagcctgtgtaacctgaaaagaagctgttaaaggttactgaatcagactgttaatatttccctgatcttccatgttgtctagcatttttgacaaaaaaacaaaaaacaaaaaacgagcactactactatattgccactatgtgatttttttttaacctatgaaaataacaattccatgtttcaacataatgaattgcatatttcaactagagttgcccataggagaaataacttgctcacaaatcaacatctagaatttagggtgtttgtctttaatttgttctattggatgtgatatctgaaacacctacctggggctgtctctctcctgatggaaagtcacatcagccttgtgttaatttcttgtagctggtgttacaaattaccatgaactgggtggtttaaaacaacaaaaatgtattttcttgcagttctggaggccagaaccaacagggccatgctccttccaaaggctctaggctcaaatccttccttgcctcttccaacttctgatggctgctgacatagcttggctatggccacatcgctccaatctctgctgctgtcttcacatcacttttttttctctctctctctctcctgtgtgcgtgtttaattttcctctgcctccctgttataaggacacttatgattgcatctagggctctagggcccacctggataattgaaaataatctcaagacccttaatcaaatctgtaaacctaaattaacattcacagacaaggatctctttttgaagtagcgttttttagcctcccacaggctcttcattgcacagtttcaagggttgagttggtgtcagcctgtctctgtaggcccttaggatctcactaagaagtttgtgtatgccacttaacctatattttaagtcaccctatcccaaagacatttcaaggtcagtgaaaatttttccaactattgtcaaatgctgtaacaaaagtagaagtataaataggaaagagggacaagaaaaagaagatagaaccaatcaagccactagtcaaattgcctttatgtttttcaaactctgggcatgtgtctttttcatgactaaaatgagatgtggaaaagctgtggccttctaacaaatctaggaataagtcttgctaccccccagtttaatttgaagaaagaagctggaattccaacccagaacccagaaattttgacctaaatctcctcagtccaaaataaaaaggaaccaggaatatgcagaacacttgttcgtaaaagagcttagtacccatgcttcccactataagaaaggaagcatttctagtgtagccttacagacacacaggcatggtggaaaggattttgggctttggagtaagcaagtttggtttcagtacccaactcctcttgaaactgaatgatttcagttgtcataaaaggtacctctcggccgggcgcgatggctcacgcctgttatcccagcactttgggaggccgaggcgggtggatcacgaggtcaggagatcgagaccatcctggctaacacggtgaaaccctgtctctactaaaaatacaaaaattagccgggcgtggtggtgggcacctgtaatcccagctactcgggaggctgaggcaggagaayggcgtgaacccgggaggcggagcttgcagtgagccgagatcgcgccactgcactctagcctgggcggacagagcgagactccgtctcaaaaaaaaaaaggtacttctcaagcaacacatttgatatcaacagttttttctgagacagtactgacatagaaatcccctctagttcttagaactaaatccaagaatctttgtgtttctccttcatgacttgaagtggcttcttttctaataaatttagttccgtgtcctgaaaccagggtgggtacagcttctctaaaatggacgaaaaaatcaagtcacatgacagggcctgaagagggaaatgatttttgcaacataaccaaatttaaatcctgctttggctgttgaaaaccagaaggagaagaggtaaagaaaaagcaaacgcaagtggagacagtttgagtgctgggttcttcaggttttcaatttctttctgccctgttggctttgacttcattctctttcttattaggtctattcaatggaagcagaaatctatgggacacgctgatattagccaggaagcaccatttgttgaaaaatgaggatgagataaaagggttaggtgcctttagttactaaattccacggttggcaaaagctattcatccgtcggtgacaaccacagctgtcgtggcctccctacggccatgttttgttggactcagccttgagatcctggtttgtgacgtcccactctccatcgtatacacctaagcactcttcgatagaaccctgtgagctccagaacacacaagaaaaggcaccgaacagaactgtcccagagcaggcattagtttttcttctgctacctatccagacactcagactaggaactcggtgccgtttgctgggctgtcgacaccatggacagctcttcaggcgccacctggttggctcggcgagccgaccgtcccgagcccttcctcctctcccgtcaggcccgtgggggcggcggggttggtcctgacgcccagcttggggagcagcaatacgcagccccccaagcttttctccggagtccctccccggcgctcacgctctgaagagcccacgcaaaaggaccaaggaggccagatcttccctctccctgcacccccggcggtgggatcgcagctctgcctgggggcggccgcaggaggcaaaggtagctggagactgaggctggggccgcccgcgggtgccaggcccagccggtcggcgcagagtgggcgtggtctccctcctgatgccccgccccttccctcgcgcggggcggatcttccgcccccggccgcggcgcaatgcggaagagatgggcctgctggagcggaagtgacgctcccggcggctgtggcggcggctgcgggagaaggaggaggaggagccggaggaagaggtgagcaagccggcggggggcggggagctgctgcggccagacccacgggcagccgggcgggcggacgcctccaagaccagtctctgcctccgcagcgtcagcgggagcggtgaggggcgaccgcgagcagccggggtgcgggaggacgggcggggttgtgagcagaccactggttgtgcggggtgccgcgtcaggctgggggctgtggtgacagcggctgtcagcccgcccgcgggaacgaaccgaatccgcctgggcgccggggtatctcttctggcgcataaatggagggtttgggctgctcggctcttccgtctctccgagaaggagccgctttcccgggcagtcgactgcccgggacccccgaggagccccagtcgggtcggtgccccgagtcgtgactcttcccgggtggccattcgtatttatcggccccgcctgccgtccccccagccggcggtagcccggggcaggagaggcggcggtaacctgtgcctttycccttgcccttcatcgccacccccgggagagcctgtcgcgtgggataatccttttccttctcctgccccctaaggagctttgaaccagccttgtcacccttccctcccacctccgctcctttcmcctcgaaggaactgcttgaagtttccaaataggttccctttcaacgtagtgacagatcttgaagcaggaagctgataaacagctccggacgaaatacgctcaaaatttttcctttcagtaagcataaattaaacgggaaactcaaccagaccgttgattgacttacagtgctaaaaccttgtcttgccttggtatgagaattgatagcttttcctcttgctttttggtaaaattaagtgacgacttatcttttggaaaaagccattttctcccagagctgtctgttttttcccaccccaaccccccatcaaaacctggcggggagggacttttggatgctttgcagtccttgctgcagaaggaaacatcagcttcatttgctttgctttgcttggttttcgcagggctgcctccgaagaaaggagaatggcgttcagtaaaggattccggatctatcacaaattggatcccccacctttcagcctcatagtggaaactaggcataaggaagaatgtctcatgttcgagtctggggctgtcgctgtgctctgtaagtcatctgttagagcccaatttgtcatggtctctgttttgatttgaaacaattcagatgcaaccattttttagaaaagagcccgacaaccctttcactgtatttcctctagcagattatgcttgtatttccttttaatcaaacttattttcctgcaaactttttgttaacaggtttttgttgagggggtgcagggagatgcaggttttggttgcaggattttgctttcttgggttctgctgctgcttctaaaagtaaatgttttttccaaagaaatattgtttcagtttgtatcatgtatcacataaacccatacagtgtcttgcttgacatatttactggtaggtcagttatagtagtaggtattatctaatattatccaatattgttggagtatttctgttatggccgttgtgttttcattaagggaattgtaaacaacctctagattttcatgtgagatacatgattgattttgtattatttttaaaagtattttgatagtctaatttaaagaaaaggactattgtaccacaagaaaaatagattagtaatgtttgagttattttaggggcagatggatgaaattaaaattaatttggatactgggtctttcttaatgtaagatatgccaggtgtgggggctcacgcctgtagtcccagcactttgggaggccaaggggggctgatcgcttgaggcggggagtttgagaccagtctgggcagcgtggtgaaaccctttctgtacaaaaaatacaaaaagtagttcggctccgtcgtgtgccctttagtccccgctacttgggaggctgaggtgggcggattgattgagtctggaaggtcgagactgcagtgagccttgatctcgccactgcgctccagcttgggcaacacagtgagaccctgtttcaaaaattaaaaagaaaaaaaagtatatgattatatatacacatatatatgatttargcaaataatcctagtgttgggattagtttagttactgattatatctttataaattaaaaatagtgtttgaaaggcatacttacaaatataagcccttaaatatcttaaactactaagctttctccagcytcaataaatgaagagcataagacctcactctttgcatgtagaatattaatgtcagttaaagtgttaacttgactaaatagtataattgcatcttgatggggaaaaagatagtgacataatgaaaagtcttaagcaaagaacagtatataagaaatatatatttggtacatatattttttgaatgaaggagaaggggctctaggtcttccaagaaataagtataaataatattggctatactcaatcagtatggacttaattgcttcaagttgttttttgtatttaaactataccttggtacagtattaatttccattgcatatattttttactacaagtggaattcttatactgatgaattctgaattaaaatattgtgggggttgggtggggcgaatgtttgtttttgtatgggaagcatttttcagctgcttgtgttttttggtgacgttacctgacttactaatcttgtataaattctaaatgtttctttaattatgattactcataatagcaagtcaaatgttcagctacaaactgtgtattacttatagtttttagaattattgctacactttactccaaggttaggaaacctaagaataataatatttccaaaacctccagcagccgtcttttatgccaaataatggtttgtttttaccaaaaggccctaaaacatttattttggcattaatgtgcattctaaggagaaagaatattaaaatattgtctaagctattctattttcattagatttagactatgtgagcaattcagaaaaaaaatgttggaatattgactctttctgtaaagctaacataaatggatgtctaatctcttggaatgtcattatctttcctactataagctttacagtaatacttaacatattaatatttaagcagctaacaaaccttcttaagtcatttgacttttaaaattaatttggccttcattttggagtgataccaaggtttgtattgtgctgtacagtgttcacttaaaatcttcacactttaaaaatgcctrttgtattcagaagctgtgcttggaaaatatcaatgtgttctcttcatcttcaataatcccagctccctgaatttcagtgcattctgcatattcatctacctgaagaatcttctaaaatcatgttttttctttgtttgtttgcttgtytgttttttgagacagggtctcactctgttgcccaggctggagtgcagtggcatgatctcggctcactrcaacctccacctcctgggttcaagtggttctcctgcctcggcctcccaagtagctggaattataggtgtgtgccaccacgccttgctaatttttgtatttttagtagagacagggtttcatcatgttggccaggctggtcttgaactcctgacctcaggtgattcgcctgcctcagcctcccaaagtgctgggattacaggcgtgagccaccgcgcccagccctaaaatcattttttatattaaagcaaagtgtaaccctgtttttcaccaagattaagtttgtactcctcaacctgtcatttgtccagtgttgatctcctttaaggagatctggtgtttcctcagtgccttcccaagcaccatgcttttttcagcttcatcatactgttgctttttacaccttcttcctccaagacagctagagtgctgcttctctaatctgagcctgtcagtcccaccgaggtcctactcaggtcttcttccttcataagactctgccccaaccactccagctcacctttatctctaccttctcttcatttctctagaacttactctgtatcacaaggtgcatacttcttttttgcttttattttttgagacatggtcttgttctgtcacccaggctggagtgcagtggcatgatcacagctcactgtaattgaactccctggaactcccgggctcaattgatcctcctgcctcarcctcctgagtagctgggactacaggcgcacacgactatgcccagataatttttttcgtatttttttgtagatagggggcttcctcatgttgccctgctgatctcagactcctgggttcatggtttccacctgcctcaggctcccaaagtattgggattacaggcgtgagccactgctcgcagccaagacgcatacttcttatgtgctggttttgttgttgtctaaatgctcatatgtaggtgtttttcttggaaaggggtggtggaagtgaccttagcaggacttggtctttatgtacacaaagttcctaatttcaagtctctacttgccctggctttactttaaaaagtaaattttaaacagacattttagtcagcatacagtgttgaggattagcaatcacttaattttcttggcctttgctgaagtgccatgagatacccaacatgaaattttgtctttcatactattagcacataccaaaagattgcaagtaaaaatacaatgaaaatagtctcatacaatggatccccttagggacccamgtgttcactaatgcagcctcaagactctgtctttatgtcgataggattctaagcttaaatcagtcatgatgttatgacattatcagtgttacagtcacctgggcagcttttacaaatactactgtctgggctctagccccctggatattctgatataattagattgtgatgctcatttctgagcaaagtgtatttaggcctttctatgatagattaggggattgcttttttttggcttgcagattttatccaaaataaccatgtttccagaattttggtgctgttgtcttttatggggctactaagtagttttcttgaaactgtcaggctgaaccaagtgctaatactcttgtagcactttgagtatagtgccttcatatcatatggaattctgctcaggttctgtgtctggatgccgcactccttgaggaaaaggcctgtgtgtcttagtaatatttgcagtcttagtgcttagtgtagtgttttactcatacttgaagaaaatgtgattattaaatgaatgacagcaagggaaagactaacctagattacaaagttgataaacatgcagttattatgtttgaaaataagagatatttttccgtaaatttttgttgttgttttttgagcagagtcttgttctgtcactgaggctggagtgcagtggtatgatctccgtgcactgcaacctccgcctcctgggttcaagtgattctcgtgcctcagcttcctgagtagctgggactacaggcgcacaccaacatgcccagctaatttttgtatttttagtagagatggggcttcaccatgttggccaggctgatctgaactcgtgaactcaagtgatccacctgccttggcctcccaaagtgctgggattataggcgtgagccaccaagcccagccctataaaacttatttcatatacatacatgcatacattatatatatatatatatatatatwtatttttttttttttttttctttgagatggagtttcattcttgttscccaggctagagtgcaatggcacgatctcggctcactgcaacctccccttcccaagttcaagtgattttccygcatcagcctcccaagtagctgggattacaggcatgcgccatcatacctagctaattttgtatttttagtagagacagggtttctccatgttggtcaggctggtcttgaactcccgacctcaggtgatccgcccgccttggcctcccaaagtgctgggattacaggcataagtcactgcacctggcctatttcctatgtttttgagaattgttatctgactgaactgctgatataaaagatgtatattacacattatttagatttgttattgacaaatcctattggaaataactgttaaccacattattaaggttcttctgaaatgccaatttgaaatgtctatgataaatgttacttattatttctataagtactattaatttgtttcaaaattactttttttttttttccaagatggagtcttgctctgtcacccaagttggagtgcagtggtgcaatcttgactcactacagcctccgcctcctgggttcaaggagttctcctgcctcagcctcctgagtagctgggaccacaggcgccccccaccacacctagctaatttttccttatttttagtagagacagggtttcmccatgttggccaggctggtctcaaactcctgaccttgtgatccacccacctcagcttcccaaagtgctgagattataggcgtgagccaccacgcctggccttcaaaattacctgtttraaatagaaaataatttcattattatttcttctgttgcattgatttatttaaaacactttctaaaaagttcttacccttagataacagttaatatgttttttaggagtgtacccatttttagcattactcagttttgaaaagtatttgtacagcaagtgtttgattaaattgcaatttgatgtctttggaatagtggttcagtgtagcaggtgagctctgtgactagtttgctgcatctaccagtttaagcagcttgtgtgatggttagcaagttataaacaggtacatatttttttcctggaaacaatttattaagagataaaagatgtctctcagctttgtgtacaattcattgttcttagtctttctccagtttacacacacatacacaaagactgtcacaggagaaggacaagctgtcagtctgacatacatgcattaaattcacaatctcaatattttacagcccatctcaggcttcaataaagtgaatgattcatttcataattatatcctaaatagaagatggagtaaagaaaaggtcaacatatgggaaatggaggataactctaaaaacagaagttatggacctctacgtaaaagatggggaggtgaggtggygccatggattcctaactcttaaaattaaagcttttgctcttttccatattacatgctagcatgggagtaaggatgaattgcttttatctgtctagtggtaagattactttcaggcttttcaagtagcataatttgagtcagattaggactcaaatcatgcattttataaatagcaaggccatatcactgcacctggttttcctccaagttgtccttatgagattctttgtctacctaattttttcttacaacataagtcataatactatatataatactcaatataagtcataatactataggatgatattctgagatctttattacagaatatgaaatatcctctcttttctataaaactgcgtaaaggactaatcgtagtgaaatgataatggctaccacttactggaagcttattctgccagtcacaacattaagccagaggtttttaaacttcattgttttatggtgaccttattatctcattaagttgtttttgtttttgtttttgtttttgagagggagagtttcgctcttgttgcccargctggagtgcaatggtgcgatctcggctcactgcaacctctgcctcccgggttcaagcagttctcctgcctcagcctcccaagtagctgggattacaggcatgtggcaccacgcccagctaattttgtatttttagtagagacggggtttctccatgttggtcaggctggtcttgagctcctgacctcaggtgatctgcccacctcggccttccaaagtcctgggattacaggtgtgagccactgtgcctggcctcgttaagtttttcacaacacccctaggccacaaacaatacttaatagttctgtttattaaatagttaggtccaaaaaatatttgtgtcccaacagcttttgtagctgttcaaaaaaaaaaatgcagaaaaaatagaacatttattttcttcataagtaaccacaatttactaatgagatgtgtgtgcttgttgagcactgagcactaaatagcttttctttttctttctttttttttttttttaagatggagttttactcttgtcacccaggttggagtgcaatggcacggtctcggctcactgcaacctctgcctacgggttcaagcaattctcctgcctcagcctctcaagtagctgggattgcaggcacccgctaccacacctggctaatgtttgtatttttagtagagacggggtttcaccatgttggccaggctggtctcgaactcctgacctcaggtgatctgcccaccatggccttccaaagtgctgggattacgggcgtgagccactgctcccagcctgcatagcttttcaaaccttggaacagagtacactgccgtcctcatttcctgttccacattgattttcaagtgacacttgcttttatcacagcaaccagcaaaaacccggtttcactaatatatatcatccaaggaatgcactgcaatctaatatgacaactcaagcacctcaggttaatagtttggctggtttccagcatgtgttgagaatctcagtgtttccttctgtttaaaatatgcagcttccctgggagtttgctgtagtgccgtggggcatctgagcacacagttcaggagatgtggcatttgacacactttatttcattcagttcagattgtgcttttatccacatttcagagatttggaaactgaggattggaaagataactgccccaatgacatagtcctaccatttaatttttttttactgtaattattgtttgtgctgttgtgaggctattgtattaccatatattgtgtggctattattttcaggggtggggaatgaagtgtaaaaataagggaaggcgttaaggttaagagtgtaattggtagcattttctaatgagggaactgtacacttgtgtttttccctacaaactattaacatattaatatattagaggagaaagtatggtttaatttacagtaaagtcattaaaaacaaagtttctttcctgggccaagttaaatgtcaggttctagacttttggataaatatagtaggtggtaatgccaaacagtgtgtgtagtttgttttttttttttaattgccaaacgctgtcaacatgattgccctttagataagttgcagtgtcctgtctcttttaaagaaaaatttgcaagttgagggaagaagtgactttttatagttgactttttcagcagagaaatcatgaaatttagacttgttatatatcactttatgttagggttgcaaaaattcattttctttttataaatacctttggaaggtgcatatttattttctttctttttttatgtgcccctgtagtctgaggaatgtacgtatttaatagaaagtaacttaaatgtcaactctttaaaaagaaaatcaaccaaacttttttattctgggttggtagtaggattgacctagggtcaaaccagtagttagttcttaagtgctttcatttcttcaccacttaactttgctatgaggaaataaaaaggaaaggcagaacttccactctcactgaatagtaaaaactctgtggctttttattacatcatctcaggtctatcagatgttctaacttgtcctataaaatatacgtaactcaggactataacgggagcttctgaccatagtggagtaacaggaactagatttaccctcctaccttaagtaacaacaacaaaatgaacaaaatacatggaatgatttgcagaccttgaacaaaaggcagcacaagatgctgacccctgagagaagggaaacaaatgaggtgggttttatgaatgctccagcttactgcctggagagcttccaggccacagcagcagaagagtcactcaagcaaagcttgacaggattcctgagtagggaatatggggaggccaaggcagccagaatctcagggctgtgtactagagatgagacagttgcacaaagagctccagagatctgtagaggactccgtttgagacttcagctcagtgttgatcggtgccagtgtgtaaggaaaccatttgaggcagggaaagaatcaccaaaaaggagtaggcagaaaaatttctggagctcacacagggctgggaatagttcatgtttaacaactagagtggagaagtcctgcatggagaattaggttgagtactgcaaagggtatactgcttcagtaaaggggcaaagtagtcctagactaaattccactccagccctccctaacaaagcttaaaagcaagacccaaagggatgccactgtttccaagtaaccgaacttccaaataactgtatcccagaacgaagtttaagaatatttataggaatataggaaaatatacctcataaggagcaaagtcaaatgtagaaacagatgctgtaatagacaaggacattaaaacagctattgtaaatatactccatatgttcaacaagtagaggaaaaaatgaacctgttaagacgagatatgaaaaatgtgaaagaggccaggcacggtggcttacactgttaatcccagcactttgggaggccgaggtgggcggatcacctgaggtcaggtgttcaagaccagcctggccaacatggtgaaatcccatctctactaaaaatacaaaattagccgggcgtggtggcaggcacctgtaatcccagctactcgagaggctgaggcaggagaattacttgaacccaggagttggaggttgcagtgagccaagagcatgccattgcattccagtctgggcaacagagcaagactccgtctctaaaaaaaaaaaaagtgaaagacccaaattagacttctagatgtggtagggattactatattagacattgtagaagaaatgattggcaaacttgaagacatagtaatagaaactgtccaaaataaaatacagagagaaaaaaggctaaaataaataaatacacagagcatcagtgaactgcaggacgacttccggtgacccaatatacatgaatatgtggatcccagaaagaagttggtagggaagaaaaacacttgaagaaataatagctggcacttttgcaaatttcatgaaagctatgaatccacatatccaagaagctaaatgaacataaagcagaacactatacccaaatacatgatcaagttactgtttaccagtgatacagagaagatcttaaaagtagcccaaggaagaaaagacacacatttacagaagagtgaagataagaatgatagtagacttttctttgcaagcaatccaagccagaggacattgggaacatctttaaagtactggaaggaagaaaccaaaccaaaccattcacctagagttttgtacccaaccacaaatgaagatgtaaagacttttcagacattcgaaggttgaaaaaatatgagctaattataatgactagcagtttaatattgtagtattacctttcttagtatccaataccaacattttcaaaacttttgagattataaagtctgaatcagtgaaattttgaaagaagcatacaaagtgaaagaagcaataaagagtggaatgggctagtgcaattgtttagccttgttagagtatcaaaaggaagtatagttttaaaaattgtgcatgatttttactggtgacaattaaaatttgctttgagtgttttaatggttgttaataagaatttgtattttatctttttccagcttaaatagagtttataaatataagccattgctgatcagtagtgttacgtatgtgagcacatgcattcacattgggttgcatttcatagctactgaaccaaatgatgaatgatttggcacttggagaaaataaatttggcatttggagagatatataaattcttcttggttggatactcattacttcctcagttcagaatgaaaaaattttagacccttgaaattcctggataattctgggccaactgagtcagtgaaaagaaaaaaattaaaaaaaaactttattgtctcaaaacattaaatatttctatatgttaaatgtacttattaaaattttgtgtttctatttcattatagtcttatttaactttttatatataaaggtgtgtttacttatataactagctcttagcaataaatatttattatgagttatgtttcattctgttcactagtggaccataggattgctgtaatctcttgaatgtgttgctgaaatatagataaacaaaatcatttaatatcctgtggaccatgtgtgaactataagtagaatgaatcttcttttttcaattttttttttttttgagacagagtctcactttgttgcccaggctggagtgcagtggcatgatcttggctcactgtaacctcagcctcctgggttcaggtgattctcctgcctcagcatcccgagtagctgaaattatgggtgtgcaccaccatgcccagctgatttttgtatctctttattagagacaggtttcaccttactggccaggctggtctcgaactcctgacatcaagtgatccacctgcctcagctccccaaaatgctggggttacaggcgtgagccaccgtgcccggcctctttttgtttttatttttaaattccagaatcttataattaaataaatttctagctggttgtaccttagtgctcattagttgtctttccttggttagcattgggaatatatctttggcctatcttgttcccagttttatcaattctcttagagaatggagtagaaagtacagttttcagatttttagttgtggcaaagtgacgtaggattgatgagagctgggttgaataattatgttggatgacacaattgagatccagctttttgaaactcagataatgggttagaacccacaaaaggaaaatgcacttccccttgcaccggattgagtgtttgtgtattcctgaaccaaaaatgactgttgrgatatcatgtgctgtttgcatcaggtagatcattggcagaagaaggtagaaatttctgtgatttccatagtatcacaaactgtttggtggctaccaaatgaggaagagttggaataggtaccgtattgatggtcttaccaaccactgcatatcctcaaacctgatctttccttcagtctcccttatgtcaatggattgcactccatctaccaagttgtttcaaacaacttaagaatcatcctcaacacctcttcccctcacatttcacacattctctctattaccaagtctagtcaattcctcctcttaatttccttgagattccatgcaactgcctgcatttagctggctctgtttcaatcaagacactgttgtctctttcatggatcattacaattccctccttaactggtccctctgcttctacttaccacgcctacaccccagtcttttaaaaaacatggtttagatcttattaatcccctgcctaatactcttcagtgattggccactgaagttaaaatctaaactctaagatgacctacaataaaatcgagtttctgcttccctcttcaacctgttaccactttacctcttggtttctatgttctaacctcattggccgcctttcagttctgaatgtaccaaattctttctggcgtcagggtctttacatatgctgttccgtctgctcaaatgtatttttttaaaataataagctttttaaattataatacatgtagaaaagtatataaatcttaaacatacagcttgatatattattatagaatgaacatacccttattaccacaactgggttgagaaatagaayattattactagcataccagagagctttccagagaataatcccctcatgctccttcccagttatctttattatgatctgcaaagataatcactattcagacctcttacatcatggaatagttttaagtgtttttcagcttaacataaatggagtcattctctgtgtattctttggtatctagctcctttcactcaatgaaatcatccatgttgacatatgggaaatcatccatgttgacatatgggaaatcatccatgttgatatatgggaaatcatccatgttgatatatgggaaatcatccatgttgatatatgggaaatcatccatgttgatatatgggaaatcatccatgttgayatatgggaaatcatccatgttgacatatgggaaatcatccatgttgacatatgggaaatcatccatgttgacatatgggaaatcatccatgttgayatatgggaaatcatcyatgttgatatatgggaaatcatccatgttgatatatgggaaatcatccatgttgacatatgggaaatcatccatgttgacatatgggaaatcatccatgttgacatatgggaaatcatccatgttgayatatgggaaatcatccatgttgacatatgggaaatcatccatgttgatatatgggaaatcatccatgttgacatatgggaaatcatccatgttgacatgggaaatcatccatgttgayatatgggaaatcatccatgttgayatatgggaaatcatccatgttgayatatgggaaatcatccatgttgayatatgggaaatcatccatgttgayatatgggaaatcatccatgttgayatatgggaaatcatccatgttgayatatgggaaatcatccatgttgayatatgggaaatcatccatgttgtagcaagtggcagtagtttactcatatttgttgcagtgtagtccattttatgaatattaaaatatttagctgttttgttgacatttgctttatttccaattttgctattataaatgacacaagtatgaacatccttgtacatgttttttggtacatatatgtacacatttctgttggctgtattcttaggaatggaattgctggatcacagtatatacgtatgtcgcctgaaacatttttatctccaccgtttatttggctagccttcctgtctcactataaaggtcacttcctcagtgaggtttattctaatcattgtcctcctccaacaawcaatttaaaattaggttctcccattgtaatctgttagaactccattatagtacttactataatttataattttgcatttgtatggttatataattcctgtcttcctaatctgattcctaagaaggtgtcacggtactgactgtttttattcctagaaccttgccaggggcctggtgcatggtaggcattcaataaatacttcttgcgtgaatgaaagttttttttttttccttaaatgtcaccaagattggaatgtgargtttaaataggacattaatttagatagtttaatatctttcagctggaattttaattacttttgtaagagaaaccttttccttttaaaataatttttctctttatatatgatgaaatggaaagaagctttactgccagctagttatgtgatcttggatgaatgatctaatctctactctttttcttctgaaaatgagaagcttggattacatgatctctaggatcctcatacaggaggttctctggttctataccaaagtgctgtctgcatgcaaataagctcaccacaaactgcagtgcatgcaaccacaggcaaattgtggttctagagagatcattctaacatgcagtcttatttttacattgttattgaccttctttagcttagtcttctgtatcagctggggaagaacagtgtattctcagactgcaaggtttgacccacagcagaatgttgacattggatagtaggcccttcatttggatggctttattatttagcttaaattattataatccatcagaagttggagaaatttacatttaaatttaatcctgaaaatacttttaaagtaaaatgaaagtgacatttaagttacctattgctcttggataagaagttaattttgtttcttttctgttcagatgtggagttagcaatgcaggtgtgattatcatgcgacaactatgttatgtttaacaagcctctcttttagagccacaactcatgaaaatcaagaaataggtatatgattatgtcttcatctgaatttttatatttgatcctaatacttcattatttgccttaaattctaatttgagaaacgaggttgtaatacaacaatgctgaataatgccagttatgtcacatgacatagtattataagtcattgctgggcgcggtggctcacacctgtaatcccagcactctgggaggctgaggtgggcagatcatgaggtcaagagatcgagaccatcctggscaacatggtgaaacccgtttctactaaaaatacaaaaattagctgggcatggtggcgcgcgcctgtagtcccagctactctggaggctgaggcagaagaatcgcttgaacacaggaggtggaggttgcagtgagccaagatcacaccactgcactccagcctggcgacagaacgagactccatctcaaaaaaaaaaaaaagtaagtcactccagaaaaaagaaaaaggtggaggatgtcaaataatatgatagagcacaattgatatgttaaattttgatagagaacaattgatatatttatactctgagtgttttctgtagtctataaatagaccacctctaccgtttctatttttgtcaccttccagtagcttaacgaggaaaagttgtaggttggggctcccttcagtcatgcatgaatttgttcagttaaaagaagtttgaaaacatgcacaaaactaaaataaggaaggagttgagttatctgaattaagttgtaggatattactacctcatggctttatatagttttaaatatttcctaacttctgtgataatgagcaaaaacaaacttattattttccaagtatagtttccatttcaacagttagaatattaaaactaaattatttaggaagaatataaggaaaacattgatggcagggtataacaatatttacccttcctaaggcctccattctggaattactaaatcttttcctttcttaatttattatatatttactatttgatgagtgtttgagagccttgggaagtgtgggctatggggccattctaaagattgtaggacttacaagtccctttgaagtttataaaagtccaaatcaatcaggtgcaatggctcacacttataatcccagcactttgggaggttgaggcgggagaatcgcttgagcccaggggtttcaggttacagtgagctatgatcatgccactgcactcaggcttgggtgagagtgagagatcctgtytgggaaaaaaaaaaaagttcaaatgtctgttaaacttttggctaatgcactcctggtctagggtaattagagaaaagttcttctctgatcccttagaattccagtagcttctggctgtctcaagataattggccagagttatctctctcctttctgaatttatccaatagttcaaagaatgtaataatttttttaacattttatttggagaaatagtgtaactgttacatatgtcacctagcctccataatatcaactcatggacacttttgtttttctatatttctacctactatctctccctccttatttatttatttatttatgtttttatttatttattttgagaaggcatcttgttctgtcactcaggctggagtacaatgatgtaatctcggctcactgcaacctcaacctcctgggttcgagcttttatgccttagccttccaagtagctgggattacaggtgtctgcaaccatgcccggctaatttttgtattttttgtagtagagatgggttttttaccatgttggccaggctagtctcaaactcctgacttcaagtgatcctcccaccttggcctcccaaagtgctgggattacaggcatgagccaccacaccccacctgatttccatttctttcacatgaaacacatggcagtgagaattctgtcaatactctttaagcataacataagtacatgagtttaataggcagtgtttttggctggacaccatggcttacgcctataatcccagcactttgggaagccaaggtgggaggatcaccggagctcaggagttcaagaccagcctagccaaaatggtgaaaccccatctctactaaaaatacaaaaattagctgggcgtgttggtgggcacctgtaatcccagctactygagaggctgaggcaggagaattgcttgaacccaggaggcgaaggttacagtgagccaagatcgcgtcactgcactctagcctaggtgacaagagtgagactctgtctcaaaaaaaaaaaaacactccataaaatctctttcttttttttttttttttttttttttgagacagagtcttgctgtgtcgcccagggtggaaaggcggtggtgtgatcttggctcactactacctccgcctgccggcttcaagtgattctcctgccgtagcctcctgactagctgggactacagttgtgcgccaccacgccctgctaatttttgtatttttagtagagacagggtttcaccatgctggtttcaaactcctgacctcagtgagccacccaccttgggcctcccaaagtgctgggattataggtgtgagccactgtgcccaaccggcagtgttttttcttaagtcagtaaaaattttactgtctaaaagcgtgttggatccatgggtgaattgaaatatatttctaatacataagtaagattggtttttatttagctttttaattgttctgtgattaacaagccattgaaaaatgaatcttgttaattgttaaaatcttcttattgtctttatatggcaagttttggttatccctcacctgttacatattgttccacctttattttttattttttagaggtggggtcttgctatcttgcctaggatggtgttgaactcttgggttcaagcaatccacttgcttggcctcttaaagtgttaggattacaggcgtgagccaccacacccagcaaaatgattctttttgggcccacaaagaagtttttcttttctaataaagagctggtatcaaatgaaaaaaaaaaaaggtacctaagaaaaggtatgaatgaaagatggtgttgagtatgacatgggaaaaatagtcttttcctttaaaataagctatagagggagttaggtactatttattcctgaggtgttatagcagaaactttagaagttggaatttgctttagcttatgtgttcagcatgtgaactaatgcggtgcaggccgccttacctcacctgaactgctgtcgatcttgatgggctcagaatcactccgaaagcaattctcttctgggacattcctacctacttatggttagaaatcagtaacttacaaagaaaggtttgttttgcctagcatctcgtttgtttaataaccaccatgaataggaggggaaaaaaaatacctcttcacaaaagggagtttattccattcgttgaaagtgcagtggatgccttgaaagactgcactagcaggaaagtgacctgaacttcctccctaacacggtatcttccgaactttcatttccgctcattctttcagtttgtttcctctgagctccccacacaccctgccacttcataaacttcagtattttaaaccctagttagcaaccatttaacaatgcctatatttcccacccccaccttactactccctgccacagrcatacacatttgaaagtttccagacgtaactgaggagttgttgaatgtgaatctcagtaatgagggcattcaaatactttcaatgataaagtaaaatgttttacctcttttttgagacggagtctcactgtgtcacccaggctggagtgcggtggcacatcttggctcactgcaacctccgcctcccaggctcaagcagttctcctgcctcagcctcccaagtagctgggattacagacatgcatcatcacgcccacctaatttttgtatttttaatagagacggggtttcaccatgatggccaggctggtttcgatctcccaacctcaggtgatccactttatatattatttttawattagcaaaacatgttctttaatgcacaacctttccatttgtttttgtctattagatgaacatttaatcagcaattgcagtgttccattcagagtctctgtgttaggttaggtattgtgttgagatataaggaaatgaggctaggtgcagttgctcatgcctgtaatcccagtactttgcgaggccaaggcaggaggatcacttgaagccagaagtttcagaccagcctgggcaacatagaaagaccctgtctctacaaaaaataaaaattaaccaggtatggtggcacgtacctgtagtcctaatactactcagtagtagtcctgtagtattagtgcctgtagtcctagctactcaggaaggaggctgaggcaggaggatcacttgagcccaggagcttgaggttacagtgagtcatgattgtgccactgtactccagggtgggtgatagagtgagatcctgtctcaaaaaaaaaaaaaaaaaaaaaggaaaaagaaataagacttagtttctgttgttactagtttacatgtaactatagtataaaataggagaaagatttacctccagctagagtgatcagggaaaatctttgggaagggaagtggtgttttaatttggaactgaaggataggtaatatttggaaacacaaagatgattaaaggttggtccagatgaaacaacagtatgaaaaaagggagaaagggaagagaatgtggaacatgtgggcaacaaaattattcattttggctgaagcatgggatgcaagggagattattaagggaaaaagaatgatggtgatgattgtaaaatatttccaagygctgtrttttatctaaagattatacatattattttatgtaatgttgtatatagcctttcttattttaaataatctctttatagtagaagattctaaaataattttctggaattaaattatcagagaagtggggcagaaatttaattaggttcatcccccttccatcatgtatttttgtgaagtttatggagtctcataaaataaggaaatcttttttccccattaaaaaaatgtacagggagggaataacaaggtatttagaagagtttaccttattaacgtcagagataaaagcttctttatctgggaataagtatatgtatttttaaaaattatttttgctggttacattgaaaaaattttaattttgcagcaatttaaaacataaagaaaggttgaagtatagtacaaataactttttttcctctggacttctttttttttttttttgccccagaactgagtggattctctggactttttaagaataggttgctgacatgatgacccatcacccccaaatactttgctatgtatttcctagaaagacattctcttgtaaaactatcataaaattaacagtgatgtattatggctatctaatccttatcctctcttcaatttttaccaattgccccaacaatgtcttttatagcaaaaggatccagttcagatgtgtacattttattttgttgtcatgtctctttagtctccttaaatggaaaaatttctcgatctgtgacatttgtggccttaaaaatgttgaaagtgaaaaccagttactttgtagattctccctcactttgggtctgtctgatggctcatgcgtagattcaggttattcacctctggcaggagtattgcagcaatggtgcttttttcatagtgtcttgacaagtggctcgcagttttgacttgtcctcttactgttggtgttcactttggtttgctgttgttgttgagacagggtttcactctgtcggccaggctggagtacagtggcatgatctcagctcactgcagccttgacttcccaggctcaatcaaccttcccgccacagcctcctgagtagttgggaccccaggtgcatgccaccacacctggataatttttatatttttttgtagagacagggtctcgccacgttgcccaggctggtctcgaactcctgggttcaaggggtccttctgcatcagcttcccgaagtgctgggattacaggcgtgagccactgtgccaggcccctgttggtgttcactttgattacttgataaaggtgatggtttgctaggcatgtcgggaagactttttttccctttataattgttttgcccattcctcatgagactttcaattcataggcttataacccattactcttattatttattttgatgctcaaattgtcctggatttcaccagtagaagccccttcaagctgccttctgcatgtttgtgacatatctcaattatcctttgaacacttgcttactttttggcacaatactatgttttaggctcattttgtccctgcctttgccctggaatcaaccatttctccaaggaatgctagtagttccttttagtggagaatggtatgtagaagccaaagtatgctaggtatgcgcattgctgtcagagtattgtagatcctgggtctgctcagtggctagtgctaaggagtatatgtaactatatatgtatatgacatatatacttatatctrtgtttctatctttttgtctgtctttagtctatctagaaaacactggtaactccaattctttttttttttttttgagacagagtctcactctgtcaccaggctggagtgcagtggtgcaatctcggtttactgcaacctacgcctcccaggttcaagtgattctcctgcctcaacttcccgagtagctgggactacatgtgcctgccaccacacctggctaattttttgtgtttttcgtagagacagggtttcaccatgttggccaggatggtctcaatctcttgacctcataatccgcccacctgggcctcccaaagtgctgggattacagacgtgagccaccatacccggcctggtaactccaattctaatcaacactgtccattctagtttctctgtttgcatttgtgagtaccttctctgacagtgagaaacctggctctcattatccttgatcataccccatagataaccactctcctattgccagtgtagcctcctccactgcataggtgccctccttaccccactggcacttcaaaaccctgcctttcccatccctctcaagctctaacttaccatgccggggtgcccctaacacccatgggtggacagtcctctcctcaccctagtcagacttcaggaactcatgccaggcggcccctcccacaagtggacgcccttttcccctgcctctagcttcagcttcttgcacaggccatccttctcctagtggccattactgggcctccctccagtctactcaaaacctttgaagcatatatcgtaaagtagggaaacatctactgtccttcagatacaaatgtatttatgaagaagatactgttttctcttaagaaatttggagtgtctggagttaaaagtacctttggctctaagagtatgcactttaaggtgtgtgtgtgggtgtgtgtgtatcctgtttcctgagtgtccgaatagaatacaaacatgtaaataactaaactgcaaggcatttgtttgcatgtttgaattagatgatagtctaatagatgggccttcatcagtcctgagagacatacgtttatgtatttggagtgtaattaatgagaagatagttattatgcattattagaagagagaacattttgttacatggtaatttaagttatagaatgacttctctgttttctaaaggaaggtggtgacttaatgttaagaatatgttttttgcccatgcctgtaatcctagcacttcgagaggctcagacaggaggattgcttgagcccgagagtttccaaccagcctgggcaacgtagagaaactgtatctctacaaaaataaaaaataaaaaaaattagctggacatagtggcacatgcctgtagtcccagctccttgggaggctgaggtgggaggattacttgagccctggaggtcaaggctgcattgagctgtgattgtgycactgaactccagcctctgtctcaaaaaaaaaaaataaaaataaaaataaaactatattttcttcttaactcctactgcctcctggcatttgaacccaaatgatgattgctgctgaaatggatatatctagtactttctatattactatattagtgattgtattttaaatgtatatggcatataacttgtaaacctctagaataatatttatcctggaagtcatgccttctgtcctgagaggtataacaagtctctctaatgtttacagtacatatggtactcttaacgaggcagtatttagaaggcaattctattttgctttataaaatgtaattaaagtttatattgtaatgttttacatttgggttgcttgtcatggaatgttaggatcaactgttggataaacataagatgtaataataataggaactcaaggaatacagaatgaaatataaatccccatcactttaacgggttggcgaatctccactccctaatttcatactgggtggtttgataatggcccacacttaataatgaacatgttagagaatcgtgaaaatatcagctaattgagtgactgagtcagttagtcttagcctgtgctgcaactagcagagcaaaactcatcagaaggcagaagccagatcactaggaagaaggcttaagcctacgtggtctgaaaagaggtgaagcaggcagggaaagtgagatgttctataggactctggagaagagcttcaggcaaagtagaagatctctaatgcaaagtacaaaggagtattaggcaaagcagtaggctgagaagagcccttttgttggcaataaagatggacaggaaatgagacagtcataagtatctacttacgtgattttctaacgtggaacacgtcagtgttgccaaacatcctattttgtagataaaggaaaggggataagtgtaagagataagaagtaaataaggtatgaaccagtcagccaggaggtgagttgagtgtggtgtagataatggaaaagggaaaaaagcaaagaaggaaagaaacctggaaggaaaggaaggtatctttctcaaggatcaactgtagactgtgggatgtattatttgtatttgtcctttgaaatactggttgttaatatttctttggttctttgtgaaatttttaatgtgtaattgctaagtgctaggaaggttttttctttaacgtttcaggatttgatttttttttgttgttttttcttctcaatagaataatcataatagcctgtcttaggaaaattattctgtggtttatattcattaacaaggtaacgttaactttatagcagaagaaataaatcaaggcaaagaccagacttttgtcctttcagaatcagatttccctattcttgccctacatttgtgtagtcaagtgttgccattagcttttatcatttaaatgttttgtcagtttctaagtgtcgagcactattctgtcaagaataaaagggtaagaagacagagttcagatcagtggacaggatggattaattaatagatggtcttggaataatttattaactctttgggaagaatactmatgttactagtttaagaaaatatgcagtacatttattttaagaatatcagatttagaaacttttgattgaaactctggatttatacttagctaaatagaatccaatgtttcaggtcatttttcttaaactaaaacttttttttgtagcatctgcagaaaaagaggcaatcaagggtacatactccaaagtactggatgcatatggactcttaggtgttctgcggttaaatcttggtaagtttatcattcagtagaattcatccattttttcatttctattttgtaattctaaggatttgagagggactagctatgaattattgtagactccatatttaagctacacatgtgctaacatcttttaaacattaatgtagctaatattgtgataatgtttgttgcccaaaaaggcgtgctacatgctcaaactcatgtgagtggaagttcggagacagtctctggtttgaccacttgaagagataagtatcagttgtcaaaagagaaaatcagaacattctcctttttgttgattcagtgcatttaggaaaaagtgtctgcatgagaactacactgatttttcttggtttgtattggaaaagacatctgttttgaattcagaaagtgtctgcttgagcctttttttttttttygccacgtaatgtcaccgtgagctgcagagtaacctttgcagttactagtttatctgtaattttgcagctcaaagtgttcttcaacattggtactggtccataaatcattttgttattgatccgtgataagataaggagcttgcactatgatacaaatcaacatgtggcttccttcattgataaagtcttactagaaaaaaaagtcagctcaactaaagggtgaacttagtaatatagttgatttccattctggtgtaagtgtcctttctcattgtgagctggtaacagttcatggaccatactttgagtagcactggtctataaaatggagatttgtcatttgttatgaatctatcacatataaagcactgcgcttaggtgctttactgattactcctgggtaagcctcacagtataatgaggtatttgctttaatctctttttataagagatgatatctcaggttcgttatgctacatactgaaattggtccaggtaataagtaatggagccaagattcagggccgcttctacctgtgtcagagcccatgctcacagtataccattgctcaatttcaactttatactaatttcataggctttttgtcataattacatgaaaaaaatctctgtgaaagtttttgtaaaccaaattgctttataagttgttaccagagacttttgtccatttgtcatcaacatcatcagctgataatagtataccattttttcaactttactatttacaaagaacttgttaaaatgagtgtgaattcattatcttacctgaattttctgacaatcattaagcaaaagtagagaaggtaacacatacttttttatttgataaagtttttttcttgtttgtttgttcgtgtggttttttttgagacgtagttttagctcctgttgcccaggctggagtgcaatggtgtgatcttggctcactgcagactccaccttccaggttcaagtgattctcctgcctcagcctcctgagtagctgggatcacaggcatgcaccaccacgcccagctagtttttgtatttttagtagagatggggtttctccatgttagtcagggtggtctttaattcccggcctcaggtgatccacctgcctcagcctcccaaagtgctgggattacaggcgtgagccaccgcacccagccaattattcgataaagtttttttagcctcagaataagttcaggaacaatttcgtgtgagattatcctgttaatgtttaaatgctttattatacttaatatatttaaacaaggatttttttcaactaaaatgtctagtgaatttcaacacatccatgataagtttaaaataatcacaatgtcagatttaaaaaatagaggtgcaagaagaaatggaatagcttgaaaatgttgggatttttcatccagtaaaatctttgggttttgcaggtgatactatgttacattatctggtcctagtcactggatgtatgtctgttggaaaaattcaagaatctgaagttttccgagttacttccactgagtttatatcactgcgaatcgattcttcagatgaggatcgcatttcagaagtgcggaaagttttgaattcaggaaacttttattttgcatggtctgcatctggcatcagtttagatttgagtcttaatgcgcatcgtagcatgcaagaacagacaactgataatagatttttctggtgagttcrttttttcccttttggtgatttgggacataatatgttcagcagttgttcagtcatcaaaaacctcctcaccgtgacagcaagaaaggaggaagaaccctgaagaccctcgatgccccttttcagcagcaagtagctacagagaatgacctctacctcatctcccaaaagatttctgggtcccaacgccttgagggagcaatgtaagagtagacagtcagatatgagcaggcacgagggggtggtatmcgtgttggaaagaatgccccggaactcctcttaggatgctcagtactcactccgtggtcgaactgtcagaatgttgttaagtagatcctgataaggaaggaaaaaggcaaaggggaattcctgagagctgagcaggcataatgagtacaaaattgatggctataccttcctggggtggtggtaataagcagtgccaccattagataggattcatattgatcactggttcccgtgcatgtgcattaagcacagtaagggaggatcccccaaaccttggtgagaactgggtaaagaaagaactgagacaatagaagatcacaatgcagaatgtcttgggggtgtttccagcagggtcagcccactcctttcttggagtgtacttgtacttcctcaataaaacttttgcttgctttacaaagaaaaaaagttcagcagttgttatgtctagagataacaagggatagacattgctaattgagtgtatccatctttccttctctggagtcctcagcagagcatggcaggcagccaatgtcggtttattgaagttggcatgtgacataaaacccctgtgctccccccagtctacactgaactttcatttccaaaatacatttaaaatagttgtgtatatttagaaatgaatttaattgtaacaaaactgtgttactcacgtttcctattcttggttttgagatcttgtctctggcggcattccctttctaagccaacattcccttattattctaaattttaaggttataagtaggtggtcttgattcaagagcaacagattgtgaagaagtagtatactgggacaaaatctagtactataataagttaggacttatgtaggtaagtgtgatgtatttcatgattatgcataactgtgctgtattctaagtaggcacaaatggtgagcagaacacatgggactataattagcattgttctattgcagcagaccagatttctagtatagtggttctgttgtttacagccagcattgatgttgactttttctcttgatatcatgtgcaaattatgtattattatattgacatatgttataaggccaaagttcaggactctttgctcttggcctcccttaacagttcagattcaagatggtttcctcttgtgtactttttctctctcacactttcactgtcacttatatagtccttgagtagcacattcgggtgtcacccatttgccctagctgtcagaagactcaaagtcaacaacaaacttaggataagaaacttaactttagagcaacagcttggtcacgttgtagctcacatggaagtgttttgacccagagtggtggcatcagggagaagagtggacagaataaaaacagggtttatagcattatgtgttagagacttgggtttagcagaggaggagaccatgagggagaggaaaggagagaggggatgcagggactaacagggcagatgaatggacatgagttcctgcctgcccaaagaagctagcagtgatgggatgtacttttgtgaagcattgagaaataggcttccaagagttaaaaccatgccaacactacattttttctagtagaagatgttgaagtcccttgaaaaggtaaatgtgttgcagctgtccttacatttttttccctcctcatttttacccaaagtttcttagattgagagataaaagctttcatacaacaattagaagtccaagcagatgcagatatattgcctaggtttaatcaataggcatgattaattggatggttggttgattgatttttttgagtgtcactctgtcgcccaggctggagcgcagtggcgcgatcttggctcactgcaaccttcacctcctgggttcaagcaattctcctgcctcagcctcctgggtagctgggaccacaggcgtgcgccaccacgcaggctaatatttttgtgtttttaataaggatggggtttcaccacgttggccaggctggtctccaactcctgacctcaagtgatcccccccaccttagcctcccaaagtgctaggattataggcatgagccaccgtacttggcctcctttttttttttttttaattcacttaagagtagagatgggggcaaagtcagataaaagaaagcctgagatttgtccagcaggagacaggttgaacaaagggacagctagagcaccaaaggtgaattttgctcattttacaattttgctaaggattggcattcttgagcttcagtttatatagaaaaacgggaacttttggaattcattgtgcatacccttgcacttagtagcaatattttccaggatacaaccatgtaatttttgtagccaaagagtggcagatacctgtgacaaagcccagatagctttactccattggaaattctaagctgctgccagtcaaaagtcatgtataaatttaaatgctaaaacagtgacacactgacagcaaagaaaaatgaaaactgacagcagagagagaaactctgcctgcacaaaatgcataggatttaaggtctatttaaatgaggacaagtaagtttcttataactttgctgtggcgtaggtctcagctgtggtggttggacatactgggtcacaaccagtttgaactttgcctcagatcaatgtgggtaatagtaaagtatggaagtttaagtcagtgtatttttaaaataagtaatggtcatcagatttaacattatccctgttgtaatatcatcactcatttatattccygtgtgatttcctggatggataagaggggttggggtcatagctggttttccagaactgctgaccaccctttttatctctgttgcagcctgtaatctgaggggctggcagggagttggggctattgctgtgagtcttcaagataatgctattacatcttttataccttatttaagacaggaagagagagagagtacggagcacttaagtagaagaattccacttaaaacctaaagagtcaagcttcaataatatagaaaactcattttcaaattgatagagtttttccacttaacaatgtattttccttagtggtatattgttagtagcttctttatatgttctgtggaggtctaaggttccaggagagatccctgaggggtaatcagggtgagaaggccaacccagcaaagttcagtcccaatccccactttagccatagcagcttttatctgtatcataatcattgggcttctgcatgtttgtttgaataaaatttgtttctctgaaaaaagtttggaaaccaggccacatctgttacctagaatgctaaaagtatttggagcgatgataaaccctatgcctgcactatctaatgtggtagccactagccacatcttgctatttaaatttaaattaattaaaatagagccttataaaagtcaagccttaaaagtagagcttcatgggcgggcgcggtggctcacgcctgtaatcccagcactttgggaggccgaggcaggtggatcacaaggtcaggagttcaggaccatcctggctaacactaacacggggaaaccccgtctctaccaaaaatacaaaaaattagccaagcatggtggtgggcgcctgtggtcccagctactcaggaggctgaggcaggagaatgacataaaactgggaggcagagcttgcagtgagccaagatcccgccactgcactccaacctgggcgacagagcgagactccgtctcaaaaaagaaaaaaaaaaamaaaacaaaacaaaaaattagcccggcttggtggtgcatgcctgtaatcccagctacgtgggaggctgaggcagaagaatcgcttgaacctgggagacagaggttgcagtgagacgagataatgccactgcactccagcctgggcaacattccgagactccatctcaaaaataaataaataaataaataaataaataaataaataaataaatatttttttaaaaagtagagcttcataaattggggtggggacatgcatatgtattcctttttggaacaagttaggttataaacacattatatataaagacataacagaaatgggccacagatactaaaaacacaaaaatactccttttctgtggatcatagatcacatgttgaaggatctcgttttatagccctatcttctgatccctagcatagtaaatgtaaatgaattgatttgttgtttgtgcctttaaatttaataatattaaattaattttccaggagatkattttaaaagtcatactttgttacttagtattccataagctaatcatttatttcttttcctattaggaatcagtctttgcatttgcatctcaaacactatggcgtgaattgtgatgactggttattacgtcttatgtgtggaggagtagaaatcagaacratttatgctgctcataaacaggcgaaggcttgcctcatttcaagattaagctgtgaacgagctgggaccaggtttaatgtccggggaacaaatgatgatggtcatgttgccaattttgtagaaacagaacaggtatatatagtgttttatattacttaattaatttattataggagaagcacagaaaatactagaataacagatttttatttgattcggagcttattttaacatctataatgttttatgattgttcttggttacttatgggccttaaaaaaaggcttccctaaaaaaaacttattttggtgtggctcttcatctaggtaagaagatgtcactaatcagcatgacatagtcagtgttgtgtgttttggtattgaattttaatgaattttaaaatcctcagctgtagagttagacaacttgtttttttgtgaagtgaaattaaacccagctcttaatggcaaatatgtgtaccatctaaaaatcagaaattatgatatttttggctatgaaactatatgattataaattcaggccatgaacccagcccaacacagatcttcaaattaggttataaagagctaaacaaaatgaaatataaagatatgtatgtaaaatattaagatttaaaaggaatttattttttaaagttgtgaatcttatgcttataattttactaatttttttggttaatatcgctaacagaaaaaaaagtcaaacctgtatagtggcctgttttggacaattgtatatgagagttagatcataaaatgtaactagtatgcaatagattttagtaaatttgtttttctaatgtaagtgtaacaacttttctgtggaaatagtttacatattatttttttttctgtaggttgtgtacttagatgactcagtttcttccttcatacaaatccgaggatctgttccattgttctgggagcaaccagggttgcaagtatgtgtttgacattcagttatttttgttttttgaacaattttcatattttctaaactttctggatagtttattaattaattcattgatggttccattattccatctaataatgttagctggatttgcaaataagggtctagacgagtacagagtttctggaattatcttagatattttttcttttaatgctctttcaaatagccattgaaattgagctgctgtatttagtgttaaaaattttgaagtctttatagtgtattgatttgcaatgtgattccatatttattaccttcttatcttagtatataatgatttagtctctttaggcagaagaatgtagtagataaaacaaagccttgggaaccagacttcttaattgggatctttactctaccactactagctgtgtgatcttgggcaaataatttaacccttgtgtgtctcagtttccttatctgtataatgggaataatattaatagtacctactttatagggttgttgtaaggattaaattaaaagcacttagaatagcacctggcccccagtcagcaccatgtaagggttaactattgttgacattttatttttattcaaaatttattagtccttgaagtatatcatatttactttaggatctgggtatgtatagtctagtaagtttggtgcttcagcctatagtattgagaaaagggaaagaaaaaaaaatctttcttcctttatttgactgctggatctcttacatcttagactggttattgcagagaaaaattacagactacttgaacctttttagtaacattttatttaagacagtctaagagttaacaaggattaacacttctactgctctgcaaaaattcttgaattcttgtcaagacgatttgacttgttttatctttgtagggataacgtaaatagatatatctttccctaaatttcccttaggagagaatgccaacagaaccccacttctcctacgctttcatgatcaacagtgggtgtttggagtatttgctttaagaacattgctgaaaccctgatgtgatgcgaggtgaatgcttttgttttagggacaggctagtgttagagattctaataaccagtttatgagccctatggtacactgtttttatgttattttatttctttgtttaatttatttatatttatttatttatatatttatttatttgagacagggtctcactctgccacccaggcttgagtgcactggtgcaatcatggctcactgcagcctcratctcccaggctcaagtgatcctcccacytcagcctgccaggtagctgggactacaggcacataccactattttttgtagagacagggtcccaccttgttgcccaggatggtcttgaactcctgggcaaacagttctcctgccttggcctcccaaaatgctaggattacaggcctgagccactgtacttggcctgtgttattttaataagttctgaattacagtgttttgatgatccaataaggttgcgtcctgagtagttacactgagggatcttccttgagtgggacttccttgtgccttccttctcctgtgtgctttccttcctatacggtctggttggctaatgttatgtggtgataggtggaaaattatggattttttttttggcacggaatgatgctctgtcgcccaggctggagtgcagtggtgcgatctcagcttactgcaacctccgcctcccagggtcaagcaattctcctacctcagcctcccgagagctgggactataggcgcgtgccaccacacttggctaatttttttatttttagtagaaatggggtttcaccatattgaccagactggtcttgcactcctgatctcaggtgatccacctgccttggcctcccaaagsactgggattacaggcatgagccaccgtgcccggccaggaatcctcatttttaaccaagttctctaccactcaaagtcaagaacttctattttataagatcctactctaatggctatgaagcagccagtcctgaccaagtgaaaagtagccctgttaccattagtctcagcattgttctaggcagtaggactttctttttattcccactactatcctctgagttaaggttttcataatttcttctagcctggaagattctcacagttttctgtcttgtccctctaggccctgcttcctactagctccgacaggtcttcttatttttgatatatatgttatgcgtgtcagatttactaggcacctatgtccttatgatctggtttactcagcctgtccaacttcaggccttgcagttttctagcaggaatcctctacttccaaaattaagatttattgtccttcagtggccactcagatctcttcactaaatacttgagttcttcctgtgtatgttattttatgctaggtgctatgagagattcaaagatataatgatgcttcatagagaggttgccatttgggcactcaggccttttatggaaaagataaataccaagatgaatttgtttgaggcattataagaattgtcataaggtgttacacaagtaagaatgacatttttagtgctggcaacttacttatgatttcctttgacttgtgattttccttttacttatgatttcctttccctgaagttgtttagcatttataacttataatactcagatcatatattattatactacatttacagtatatatcagtttattagtccattctcacattgctgtaaagaaatacccaagtctgagtaatttatgaagaaagaagtttaattggcttatggttctgcaggttgtacaggaagaatggcagcatctgcttctggggaggcttcaggaagcttccagtcatggcaaaaggcaaaaggggagcgaggagtctcacatggtgggagcaggagcaaaagaaagataagagcgaggtgctacacacttttaagtaaccagatctcatgagaactcactcactagtatgagaacaatacaagggggcatagtgccaaaccattcatgagaactccacccccatgattcagtcacctcccaccagaccccaccttcaaccttgggggttacaattcagaatgagatttagggggtacacagatccaaaccgtatcaatcagtcaaaaaatggtaaacattgtaaggtctacccccaatttttggttgaaatttcagaaatatgtgaaggtaaagaagtaatattgatggaaaatgatataccataccacacaattaaatgatttttaaaaatacctttaatgcaagctttttttttcccccaagttggaatttagctcttgttgcccattggagtgcaatggcacagtcttggctcaccgcaacctccgcctcccggcttcaagtgattctcctacctcagcatcccgagtagctgggattacaggcatgtgccaccatgcccagctaatttttgtattttagtagagacaaggtttcaccatgttggtcaggccggtctcaaactcctgacctcaggtgatccgctggtctcgaactcctgacctcaggtgatccagctgcctcggcctccccaagtactgggattacaggcatgagccaccacacctggccgcaacttttttttaattgggtaaagttatggttatttaaagccttaacactttctggagtgctacttttatcacgattggcaatagctctgttattgtaaaacttttctttcaacattgagtaataaaacctagtctaggaggccatgatgggaggattacttgagaccaggagttcaagaccatcctgggcaacatagacccatatttctacaaaaaaataaaaaaataaaaatcattcrggcatggtgacrtgtgcctgtagtctcagctactcagcaggctgaggtgggaggatcccttgagcccaggaggtcgaggctgcagtgagctatggttgcaccactgcattccagcatggttacagagtgagaccctgtctctaataacacaaaaacagaaatctaatctagtctagccagtatattgctatgagagctgtgatacatagctgaatgtatatatgtgttggggaacagagtggtggaaaacaaccataggcattacctggaagacatgaaaactggatttttttcaccttatgcaccgttgcagtactatgcaaaataaatgttaatcagtaaacaaaaatgctaagttttgaacttgtatggagtgataggcaattaatctgggattactccaaagaaaaagtatcaacttgtgagttttctgcagtctaaaatgcttaatgtcctgggacatacgtctttcaaattttaaacttttatgaatattattaagtaccataaaatgaaattgaacacagatgtgacattaggctaattgatttcttatttaaaaattaaagagagaatcccctggttatcagaatactcattagattatctgacttagtgcagtgagggataatgcttaatgaatgataatactgtactgttaattcagttttggaattggatgagcatattagagtttattttctggttttacttgtccaattacatgactgatttgacaaccccccttttacaccctctttaaaagcactttgcgcggggcgcggtggctcatgcctgtaatcccagcactttgggaggctgaggcgggcagatcacaaggtcaagagattgagaccatcctggccaacatggygaaaccctgtctctactaaaaatacaaaaattagctgggcgtggtggcgggcgcctgtagtcccagccactcgggaggctgaggcaggagaatcgcctgaacccgggaggcagaggttgcagtgagccgagatcacgccaatgcactccagcctggcaacagagtgagactccgtcccccacaaaaaaaagcactttgttcacaggttagcaagaatgaattttgggcaacttttttgccccccctcagtgatccttgttgtgattgggcaaccttcattccaacgtctcagagagaaatgtttaaattgaagttcagggaaataatctggtctcacctatatatttcttcttggcatgttatatctttctcaattatgcctcatctctctgctattctcctgtgtaagaaaagaaaaattataacaatatacaataggtagatattttccatcttgtttaatttgcttaacccaaaattcctgattctgcaaaatgtgcaaatactataattgggtgatggcaaggttgacttggaaagtctgcttttccaggaaggaatgatattctcaatttggtggaactttggtgtgaatagaatattcaacatagtagagaagaaaacacatagacatttgtattggtaggcagcttggaggagtaggaatttaggtcagagacataaagtctcatctgaatctcttttggaattggttatgttgatctcagatagcaagttattttacctgttggtattttggtttttttaattacccaaatggtaatagtatctgttacacagggcatgtagtttgaacttaaaacaaagtaccatatatgaaaacacctttaaaaatagttttcatcaataaaaattcctactagtttacgagtatttcataatgatgtaacttctttttttgatgaggttggttttttaaaaataaaggtggagggtggaaattccctggaacttgtttttttaaaagcatatcatgaatggaaatcagttatttgattaacgactgtgtgttcagcaaagaaattgttagatattgtaagcagtgatatttctttygtctatatgttggtttttggtttgattaaatatatttttcttgtctaaggtgggatctcatcgtgtccgtatgtcaaggggatttgaagccaatgcacctgcttttgacaggtaagacaatttttacatagtgctttaagttttgatattgctaagcagtgggactgcttgtatttactgattcacttcaaacttttttggctttaaataaaattcctctgactcctaatttaattgaaagacagtgacacctagtgttacgacttctgggggtggtagtgctggaagtgtgggtcttgatctcttgaccttaaaacttcctctgtgggcgcattgtccagtatagcagccactagccacatgtagctactgggcacttgaaatgtgactagtctcagttgagatgtgctgcaagtataaaatgcacactagatttcaaagactgccttaaaaaataaaaaagaatgtaaggtatctcattagtaaaatcatgttcggtatactcagagtattggttctaccctcacataccaaaatctgtgcatactcaagtcccacagtcggccatgtggaacccatgcttatgaaaagtcatcattcatattcatgggttttgcatgccaggaatactgtagttttgattcttctttggttgaaaaaaatccatatataagtggacttgcacagttcaaacctgtgttgttgaaaggttaactgtagttgttttatattgattacatgttgaaatgatattttagacatgttgagttaaagaaagtataattaatttcatgtttataaatgcaccttcttgaaaatttaacattataggtgtggtttatgttacatttctttgtgtggcattgctctacatagtttctggaatggttagaagctggaaagagaaaagactcgtatttggggcccatttttctgaagactggagctagtaaggaggtccctctgaatactcaacggagtaggtgatgtcctcacatgtgagcagcagccctttgccatctgcccttactgcctttccagtcaagcttatggctggtgtctgtcttgtctggtgccagcctcacagagtgggcagaagctggatgcctccacagctccaacaggggtggaagtctcagtacccataagtcagagaggaagttgcattcatgagttttcgtaaattcggctttgagaccatgtacaatgaattcgcacccagttttcmaattctgtgtttaaaatactgccatgtaagttatatttaataatggattattgtttattgaaaaaattgggcttcttatttgacatgtatttatttcctttctttcttaaataggcattttagaacacttaagaacttatatggtaracaaataatagtaaatttgcttggatctaaggaaggtgaacatatgctaagtaaagctttccaggtaagtatggtcatttcttatttcattctggcccatggacacctagaatggtattaaaaaataaaataatacagtaatcanattcttccaggaagtaaattacttccaagaaaaaggttgggtacttgttggaaacttgaactctttgggtctattaagaaacaatttaggctaatgttgctgaaattgggattctaaaaagctttcaatgcaaatgacactgttttctaatctgcttttttattttgtagagaaacagaaaaataccctccttgccaaaaatgtttatctrtcactagtagagaaatagcagtttccttcttcatctgttgattgctttgcctgcttcctagaaccatagtcattgtttttcacctatggaattgtgaatgatgcatttatatacatgcaacgctataccttcttgtactgatgagagaaaacttgagaatttcatgtcaaaaagaaccccaaaattgcctgacttctaaagaaaaaatattttaatgaacacttattgaattaataatgaattaatataaattatgttgttacataagattataaacttaaacaagattgttagaaaacattttctaaagttcaatctcctaagtccaaaagcatcctgattttatagctatttttttaatctggtgaaataaatattgttaataaacagattatactttacagagtgactttatggtaaaatttaagaatatttgtatgtattgaatgaagttataaaatatgaatctttcagtctttgataggctttgtcttagatgactttgagattctataataggtctaaatagtaagtttgtgttgtaaaaataaaatgctggcaattggaaataattttttatttcctaagccagatgagaatattatttaagtacactgatgttaattgtgtcaccgtatctctcagggatagtttttgaggctttagggaaaagatttattgccagtgtcaatgaaatgtgatgaatatttagatggatatttgcctttttactttcatttagatgaatatttgcctttttactttcagagtcatttgaaagcttctgaacatgctgctgatatccagatggtgaattttgactatcatcaaatggttaagggaggaaaggcagaaaaattacatagtgttcttaaacctcaagtccagaagtttctagattatggatttttttatttcaatggaagtgaagttcaaaggtttgactgttctgtttctctgttctttgaattggaacattaattaaaaattattcttaacgttgaactcttaaattttctttttaaaattaaagtttataattaaatatcttttaaatatttcattttatttttatttttattattttgaaatagggcctcactttgttgcccaggctggtgtgcagtggtgcagtctcagctccctgcagcctctgccttctggtttcaggagatcctctcacctcagcctcctgagtagctgggactacaggtgtgtgccaccatgcctggcttattttttttttttttttttttttttggtagagacgggggtctccctgtattgccctggctgggctcaaactcctggkctcaagtgatccacctgccrcagcctcccaaagtgctaggtttacaggcatgagccatctcacccatcctatacttgattttaaacttgtttttctttctttagaattcmccaaataataatgagaggttacattagtgagcgcattttatggagcaggcagtgtacttaagtcttttttttttttttttttgagacggagtctcgctctgtcgcccaggctggagtgcagtggtgcgatcttggctcactgcaagctccgcctcccgggctcatgccagtctcctgcctcagcctcctgagtagctgggactacaagcgcccgccaccactcccggctgttttttttttgtatttttagtagagacggggtttcaccgtgttagccaggatggtctcgatctcctgacctcgtgatccacccgcctccgcctcccaaagtgctgggattacaggcgtgagccaccgcgcccggccgtacttaagtcttaacatgtatcaataacaattatagggatagactctattattatgcccatttccatctgctgcaagtctcataattagcaagtgttagaactgggattcgtctggctccatacttcatgctgttatatatgaaactgttttgcttctcttttaaaacttacgttttaatatttcttgatgccagtaaagattattaaatgcaaatagaagtgaaaggctttgtttactgtctgctttagtataatttaaatattcagtttttgtatgtgaaatagaggagaaaagtaaatgttaagagagttaagttcagaatataggttaagggaaactttagtgcagaaagctcaaatttttaatttttcaatttgtattttatttagcatcaatgctgtagacacagtcattagagataacagatcttaggtttaaaaaaattttgttctataaatatttttattttatgtgcaaagaactgtaagagcataaacctgaatgtatatttagtttctaattgttggcctaattaaaaataagtgtgtgatagataatgtaatgaagcatatgtgacaaaatgttaacagttgtcaaatttaaatggtgggtatatggatgttcacagtataattttttttgtatatttgaatactgtaataataaaaagttggagagggaaggtggatgctacattttaattacctcaattattcactgtttgttttagctttatttttgttccaaactggatatttaactttattggttacagatgccagagtggtacagttcgaacaaactgcttggattgtcttgatagaacaaatagtgtgcaggcatttcttggcttagaggtaaaagaataaattaaaatgtatgtgccttgtatcatctgcctctttaagtgcyttttgaatacttaygtttcttattaccttccagaaagtgtatgtaatgttatgcttcattttgtacttctaatctctgtctctttttttggccaaactttcttttgatttaaatatttcctttacctgatcttcatattctctttaggtagctctctatctacttctgttgttccttattctcccttttaaaatctgctgtttatagtatttcaacaattttttccctgtcttttggaggaaatatatatgtgtgggtgtgggtgtatgtgtgtatttggccttttattctctgtgttgtcttttaaaaatctattttaggataagaagggtctattttcatatgtacaattatataggactatatttttgacaatttgtaacccaatccagtttgtttggtgttttcaaattagtagctataaaaaaacaggatcagatgaaaatgccatagttagtgagaatgaaaatgaatgcaattcaacttctctgataccaatccagtttgtttggtgttttcaaattagtagctataaaaaaacaggatcagatgaaaatgccatagttagtgagaatgaaaatgaatgcaattcaacttctctgataaggtcgctgtttgcaacgttttttcttttttttttttctttactacttatccatcagattcagcctaagataaacatagtctcaactctttgacaaactatttagcaatgctgagctttctaagtcttccctcctctgcaagttaaggttataaggctgtggctaaacttcgtttagttccatcagaacttaacatagttctcaaatactataaaaaaacagcaataggaagttacatgttcttatttcctttagttaatgatcttaaatttgacctgagtattggttaattagttactttgcagctgaggttctttatctcaaaaatgaaagtacagtgtataaaattctctactacagaatatatttttcatgtaactaaataaattttactgtttggattttttgagtatgtttttgatgtttatttgtaatttatttagaaaatttgacagaaacaagaaaatgaaagcaagcatgttggtcatttagataagagtttatcacatgccttggatttgtttcaagttttaagtggctgaataaatgtacatggattctgataataagcttattgaagtacttggacctcttcatcaaaattataacagatgttagttttcaggatctgacttagctgattctccactgttgatagttaggaattagaaaactccctaggatagcaattggttgacaggttacaaagtttgacaccaagatagacaaagccaaactagtagaggaataagatcagttttgcccagttccttgaagaaagatttaaatgataaaggaggccctggggctcattttgttttattctccatgctagcaaagaacagctctggtgtaagtctctaggtaattaaatgaacccagtttaaggtttttttaatcttattttagcttttggttcttctataattatggatgatcaccatacttacatgataaaataaaacgtaaattggaaagagttaagttaaaatgcaaggcatagaatatgactagattccaaatacacagattggataaagatcgaacattgactctgtcagatttataggctagaattcttgcatataaagatcaataactttttggaacacttttattgttatatgtgataaggacttgtggaagccgagaggtccttgaatttcttgcatgctcttccccctagttcttcccttatatatattaccgatgtggattttatgcataaaaagctgtcatgacttcattcagaagttttacttattttctttattttgtgacaatttaagagcaactcctttttttcattttttttaccttaattacttaaacttataaagccaaatccaaaagttaaagagacctagttatttatgtttaggactaagtaaacttttttttattctaatgcaggctgttgattgatgaattcttttaggtgggcaaggtaaacaactctgatttatagggatactttaataagataaattttatcatttaaccagaaagaagtccttatcaatacttgtagtttccattgatacagtatttgttttaaaaattgaaatgatgggaaataactcagcctagtaaactgttatgttttcagaagctagtcccaaatagtgctataatgataaatttttggtttgattctggtagttcttaaaagccatattacaattaatatattaatgtacttataaaaatttcttgtttgctttttwagatgctagctaaacagttggaagctcttggtttagctgaaaagcctcagttggtgactcgctttcaagaagtttttcggtcaatgtggtccgtgaatggtgattcaatcagtaagatatatgcaggaactggagctcttgaagggaaagcgaaggtatatctagatctatcataacattacagaatatcctctttttcctctcttcataaagcttttaaatggccttttaaaagttaatagatggtttaaattaatagatgtgtcttagaattctgtttaatgtgcttttatgccttctttgatacttcctttcacagtggatactagtgaataaatggaagataggtatttccctaagtttgggaagtatgtatatataacgtatctagtcatttagtgacaatccactaagatgatatatattgctctttttttcatgatttcccttgtatatctgttttactttttgtattgtttgttttgattacaaatatgatttttaaaaccatagacctcttaataaagggttctctcttatttggctttgcgttccctgcacttaacacagtgcctactgttaatagatgtgtgacgtatgccacttggacaagtaagtccatcaacagcttatgcagtgcttactaggaacccaagattagggcataattgatctttacttatcttaccttagaaaggtggctatcaagatgtgccaacgaagtgtgagatatgggccaggtgtggtggctgacgcctataatcycagcactttgggaggctgaggyaggtggatcacttgagaccaggagttctagtctagcctggccaacatagcgaaaccacatctctactgaaaatagaaaatactagctgggcatggtggtgcacacctgaaatcccagctactcgggagtttgaggcatgagaatcacttgaacccaggaggtggtggttgcagtgagccaagatcacgccactgcactccatccagcctgagtgacagagtgagactctgttccaaaaaaaaaaaagaatggacttaattataattgtctgtttcatcattactttttatttcctggtattatctacagactactttcttctcaagtatttgtcccttaytgagggagtttggaacaatacttgagatagttttcattattttatattcttaaatattgtttaactttttaaggatcctggcctcacttgaatttatcaactttctaaatctccacaatttctcaaattatttcaagaatagaaatgagaacatttatcacttttatagttctcattcagcttcttccatacagcaactgaaattctttaaagaccattcatggtctccaagtcttcttttaatttccaagtcttcctcttctgtgtctcataatatgccatgcctctgcccagaggtattggccttacctgcaaagtttcttttgttcaactcatagaaataatttgtattgacttttacaaatatttacttcttaagtggtccctatttttgtaaacatcaaattgttaaactttgatttattccttttaaacaacataattcttgctattaaaagctgattctcaaactattgcttaaaatattcttttatatacttctaccttttcatttctgcagtgactacaatatatgtacagaggttacatatattttcagtggtcttttatctttaacataatatatagatataaaattttatacattaaatatgctagcctgaattgaactaaaatctaacatctgaactgctctttcttttccttttctctgggttccttttgattaattgcctgataatgtgaatggtgagtgtcttttcaaataatgtcatttgcatatgctattatatagaaagaaataacacttaatgccaaacattaattgcttattaaatatagtagcattcatttaatggcattgaagaaaactggttcttcatttagtggcatttaagaaaattggctctttattctaaaaagaagccttgagttactgttatttctttaaagaataaaaattacatattgcaaactgaagttatttcctaaaagacgcaagttttttgttttgacaatcatcaaaatctgtaagatcaaaataaatcattatggtaactaacatgcctaagtaaaatatatattcattaaaagttataatcaaatctcactataggaataagtttattatcttatgatgtatttttgcatgggcaataaaatgactcaaaatatacaaactgtagtttacatgtaatattcgtttatgaactgtacttgtaaatttcttttgagactagaccttcattcttaggtttagttttaattttaactcatgtaagctatttgggagcaatttccattttctttttctactaccaaagtaatttgaagtttttctaggggcagttaagctcagtgtatcttcttttatctcccatttctccttacccattttatccccaagtttacaaattaccttgtaagaaggaattttcttgttttaaataagttcacttcagtttatttcctttgtaataagcaattttaaacatttgttgccctagatgtaattactggatgaggttgtagcactgagctttttcatttctttgtgcagagctttaatccaaaagaagaaaggaaacagtgacatgttggaggcattttaattgtcatgactatatattcaaaatagaacgattaggtccttttttatactaaaatcatataaaactgatttaaaatttcaaaaaacctaatgagtaaaatcagtaatatttaaaatgaaaatctgcgctcctttcttaacaggctggaaagttaaaagatggtgctcgctctgttacccgaacaattcagaataacttctttgacagctccaagcaagaggccattgatgttttgctactgggaaatactctgaatagtgatttagctgacaaagctcgagcacttttaactactggaagtttgcgtggtatgtgcactttatattttatttgttatttatattcctaaaggtccaagaggtaaatgtaaacttatttacacagaatttttagttggttaaaatagtttttgaagggatttctgtaaaggtaatttttgaaaagtacattctccaagggaagtttgtctgttttaaaatatttgtacaatcagtggtattactaagctgtaaactgaggcccttgcatggtttcttctatagattatgattgaggggtaaataattaagcattgttaactttgtacaaggcagtatttcatagaatattcagctagtacttgtaatacagcatttaataatctaattatgcagaaaaatgctttactgggaaaactaatgcctatattggttattttttaaatcactatcccaaaagtttctgtaacttggtcttaacttttaattgctattgtttgaataagcattaaatcatattaataatttaaagtagtgctaattattgggcactaactgctattaccaattttaatatttgaaataaatatatgaccttcagaataggttttcaccttccactgtgtcttttaaaaaaaaacttctcctatcagtgagcacataaaagtagcatgacgggaaaactcaacattcattgtagaatttaatagattagacttactttttctttctctaaaatgtattgaggtataattgacaaaataaattttttccattttaactttttagcactctgaaaaagaaattttttttctgttagccctaaaccaaactttttaatgttccctgttcaagtgggagaaaattgtttctgcatcaagtaatgtattcttgggtaattacttggtcaaataagttatggattattttagaatttgcatggtgcctaaaggtagttaattacggacagttcctcagggacctgtaagtgggctagggaacttagacctactaaaactccaaaaaatgtctgatcttagctactactttcaacttcaggctttcttcctggcttccaaaagtagagacttgactgatttgtgttttgtcacctctttccacctgtgcctacattgatgtggaggcattaataagcaacaattgaaagtaagtggttgaaggaaagaagaggagaaacaagggacctatgtaatcctcaaacttcagcattagtgtttttagtttcctgcgcattttactataagtaaaatcatacctttaaaaaaaagtacagtcagttctgctgtaacgcttgttctgagaatgggaatttgttccaatatgatatattagggaactgtttgagcataaggccaattttgcatgagcttatgcatgattttgctgggaagcaacactaggtaaatgcagaaaagtgcacccagcagaactaagatggctagaaatatgtacaacatataaaacacacatacacatatgcacacacacctcaaacatcttcccctgcctcagttcactatgtgtgttatgagccatacacattcacatctgttctttcaacttttcattgaatttcagatatccctttctccattattcatattacaagctgcactctgcctgatgcccatttctacaagccaacttcattcaagatgaagtgccttattaatggttatattcatgcatttcataaccatttaacatgtataatgtcttgctactatttttatgaggttcccatcttttttgatgtgtcattgttgaagtttttgaacgtggtaccccaaccccatttttcccataagccctgtggctgtgggaatttgcaaaatttgcatagcatggtgatgtttttagaatgcatttttcttgttatagctgaagtgattatacttatcaactgctaagtcccagaaagaatactaaaaggtgtgtattagggcagtatcttccatatcttcaacatcctccatcttcttaggttttcatatttatattcataatattctcaaacatgtgcgcatgcatgcataacatacacacaggagcagccagaagcgcaggcctaggagcttctgatggtgaaacggtggatatcactgagtcactgtaggattcttcttaggtgcagaaggtttgtatcaatcattgtcgtttatttgtaacacttggtgttctatagctatcagaaaaaaataaagtcatcaaattgacttaagtgaggtcttctcaaaatgttttgtcactatactcaacawtttaattgtaacttgtttttactaatgattctttgttttcttcttgttgcatccatagtttctgagcagacattacagtcaggtacagtatagaaaatcaatctataaataaaagcaattttttcttattttttctgaagtcgatattgtaaacaaataaagccatataattggaaactttctcattttgccatcagatcctaacaggataaattgatatcttgttttaatctgagaaaagaatttcaagcttgagaaaattaagtacttcattctgaagaaaatgtgcagtgctctttgtcttcctgtagcaattgcttaattccagttaaagataattcagctagttttaatttcacttttacatttcattgaacaaatattattagtgttatgccttactcttaataggctgatggaaaaaaatccagatgtaactactttgaattaatttctgagtgccatccgtgatatttacaactactaaacagtgtttctcacatataatatttaagaaggcattgttgcatttccttattgtgaatgaaatagtttcaaaactatagacttgcactaaaatatgatctgaaatcttttaattttaaaaagtgccaagatttctaacaaagaatagttaagtgtgtgagacctaaagactatttattatttttcttgcctatttattcctaggaatctcacgtcttcattctctgggcaaggtttatgatcttgtctttaaacatgaatctgtggcaaaaggaatgaaagcttaactcttgccagaaatttagttgaaaaggatttgctatcacttaagaattgtttggcttagttattgttctgaatgttttgagaagctgttgattattttctcgagaagggtagaggaagagagcacctagatatatttttgagttatataatgaacaccattttctgaaatagtatggtatttagggatggacatctgttgtttgagcatagactcatttcttttttaaaattttttattttattttatttttttgactctctgtttctttaagcacattaaggtggcaccagttaagaataaactaggactattttttatctttttatttcatttaaaaactgacttgactttattagttcatacagtgaggcagtacgtttttattcacacagttcattgtcttgctgaatattttaagccgtgtaattattatagaacttgtgtgttgatatagaatggattatagacrctatgttcgcattggtaacaagcagtgacttcaatttttaagagcaatgataaaccataattatagagaattatttttatctaggtacagtcagctttgaattaaccataccaacaggccagacaagtaatctgctttcattaccacccagacacctctatacaagcaatcaaagcaaacagctaggtggtgagaaatctgcatatctgcccctggaaacaatggggatatacttatctaaatcagcagttccacaggtcaaaattatctttacaagaatactaagacatcactcgcctttttcactctcatttcctcataagactgctatatcttggtatcataagagaatatcataataaaataagatcatgtggtaaaaggtgaaagtagttttgatgtccttttcctgttaccggttagctaccaatgaagtacagatttttaggttgaggtgcttttaaggttctatgctgagaatttaaccaggatagaatgtggtttagaaagggaaaagatgggttgtagaccaaaaaaaaaaaaaacgggagagattgaggwttcaaaatgtattgaacattcattcatttaacaattatttattgagcacttactgcgtaccaggtagtcttttagttactaggagtattcccataaagaaaacagactaacatgtctgccctcatggattttccattctcatgaggggagacagttacaggataaataaataaaatacatagtttataaatgtgataaatgctatagagaaaaataaagcagggaggggataatggaaagttaagggcagagtgcagtttaaataaagtggtcagagaaggcctcattggaaagtaaagacttgaaggatgtgcgggaagagtgttgcaggctgtgggcacagccagtgcaaaggccctgtggtggaagcaggcctcatatgtttttgaaacagcaggaaggccagtgtctgagcagtgagtgcaccagggagagtggaagatgagggtggaaaaacaagacaaattgttgagggccttgtggaccattgtttaagcactttggcttccactctgagtgagatgggaagcatttagtagtgatttcattttcagaaatatcagcttgtatttttctcaaggagccattattcatcaagctgcctgtcagtagctacaatcttaaatgtaaatgttcttaaatgtttttgtttggagaaaaataaaatttatatttttaccagactcttaatgaaaattgtagaaagttaattgctatattcctaaaaatgtatagttcattggatttgtacattaatgtaccatttcattgaaacagaactatttgttctgcatgttgctgcaataattctgtatgtgtagtatttttttttttactttggctattgtatttaatgttgacttttttttttttttaaagatgtgttggttaattgcctcataccaggctttgcattgaaggctgatctttttttgtgcctgtgcctgtatcttttgcttgtttgtgcttgtgataataattgtgctttccagcggacatcgtatctcagttatgaaaatcaatttttataaatggtttgatgcagctaaaattctattgtgtcttctcttgattagcatcttctaaagtactaaagagcatgtgtgagaatttctacaaatattcaaagcctaagaaaattcgagtatgtgtcggaacctggaatgtgaatggtgggaagcaatttcgcagcatagcttttaagaatcagacactcactgactggcttcttgatgcacccaagttagctggcatccaggagtttcaaggttggctttttataatatggatttagttaataaatcctgactgtgttgtattgatctagaaaacaaatatagcacttcagaggatgcattaattgatgaaagaaacttggagctatacatttgaagaccaacaacatctttaaagatcacatctattaaaatctcagctttttaaaatttctagaccattattttctacttcataaaaatatatgatggtaaaacaaaaaatcttttttccataattgattctcaggaaataggaattcacacatagatttctttgaaggcaaccacacatataagaaaatctagttttgtttttattttaaatggacataaaccaagattatggacataaaccaagattatgtccatttaacattgatcatttattaattttaattaaaattacataattaaaatataattgatcacttgagttttatttttcaaacctactatgtcccatttttcaattcttaatcctctatttagttactaagataagaaatgtcagagtgggtcttgagcagccttataaaacttgtgatatttattggtacttatgtaataacttaagarcactggtttatccttgaaaaactttgttggcattcagtttgggttctctgcaccaaactgttaataaatagccagaaccaaacatttagcagaggatacttttgttaaggttttgggctgggcacggtggctcacgcctgtaatcccagcactttgggaggccgaggcaggtggatcacctgaggacaggagtttgagatcagcctcgccaacatggtgaaactccgtctctactaaaaataaaaaaattagccgggtgtggtggtgtgcgcctgtaatcccagctactcgggaggctgaggcaggagaaatgtttgaatccaggaggtagaggttgcagtgagcggagatcccaccactgcatccagcctgggtgacaagagtgaaactctcaaaaaaacaaaaaaacaaaaaaaaagaaagaaagaaaaagattttgattagaatcatgaacttaattttcttctttttaaaaattaactttaattcctttttaaaatagtatataattaccaagttttatatgtgagggtgatgtgtataggaaatggtgtgagataaaatttttcttttttagttatttttcatcagtttcatcttaaaccctgggattctccccaaactttttattaaaatacctttctttcttttctttttctttttctttttctttttttttttttttttttttttttgagattgagtttagctcttgttgcccaggctggagtgcagtggcaggatctcggctcactgcaacctctacctcccgagttcaaacgattctcctgcctcagcctcctgagtagctgggattacagrcatctgccaccgtgcccggctaattttttgtatttttagtagagatggggtttcaccatgttggccaggctggtctcaaactcctgacctcaggtgatccacccgcctcggcttcccaaagtgttgtgattacaagcgtgaggcactgcacctggcctaaaatgccctttcttacttaattgaacctaacttgaagttgtgatagtaatgataataaaataacagctaacactataattctatgtaccttacatgtgttcatttaatcctcagagctgacctattatttcatagacaccattattccaattttacagatgaggaaactgagacattgaaagggaaggaacctgcccatgtttgtgcagtagtggcaaagccaggatttgaactcaggcagtttggctttagagtgtgtatgccaggctgcattttatgtgtgaacttgggcaagcttcctgtttgtaaataaaagataaaaataatctttcttagaagatgtttttatggcagtttaaataagatgatgtatgcatgagacttgcacataatagcagtcaataatttttttttaatttcagtgttagttcagactatttataggctcttcttttttttttctttttgagacagggtctttctctgttgcccaggcagtggtgcagtctccatatcataggtcacgataacctcaaactcctgggctcaagagatcctccctcctcagccttctgaatagctaggcatgccaccatgctaagctaatttttttatttttatttttttgtagtgatgggggtctcactatgttgcccaggctggtctcaaactcctggcttcaagtgatcctctcacctcagccttccaaagtgtttggcattacaggcaggggctgtagcatctggccatataggctctttctagctatttgtcctcatttctagaaacttggggcacccgaagtctccctgggctgctttctcaggcagctctgttctccgttagtccttgtagtttccagagtgccagcagctagacagagtgatgtgtcttactttctggatctctcctagttttcctggatttctttcacccagaaaatagcaaaaagatcaagattatgtttttcaaatatgaatgtgaaaaattcctcccaactgttaccagcaatttgaggtagtttctcagtcactttattctttgtgccttttctgaataatttctctctccagttttatgtgagattttgatttgagaaatgatttgtttctgtgctgtccctggtaaaaactttagcaagagttttttcaaagtgaattctgaaagggcttaagaatcttcaaggataaccgtcttaaagaagcaaacttaggacaccctaatagaaagtaaattttaataatttcattccactcaagagtgtttgcctttaatatgaatttggttaaactcaaaacacagaaatcagtctttatgagacctggtgttatgttgtgttggatggggttgctatttgcctgaggctatatttaaaagtatttcttggatgcttaattttagataaaagaagtaagccaactgatatatttgcaattggttttgaagaaatggtagaattgaatgctggaaacattgtgagtgcaaggtaagctagccacattaatccactgaaaaatttgccagttgagggaaactatggaggacagataattaagtaattgttacaaggatagtttgaaataataaatggaagggtgctcgtaaaactgtaaaagagcatttctcatacttttgggtctgaggatctctctgcacacttaaaaatattgagaatgttaaataacttttgctaatgttgtttatatctttgttatattaggaattaaaaatgaaaatttaaaaacatttaattcacttaaaaacaataataaacctattacatgctaacttaaaataaattttttgaaaaataactttttcaaaacaaaaaatttactgagaagggtggcactgtcttgtagttttccaaatctctttaatgtctagtttaagacagccagattcttacatctacttctgtgtcagtctgctgcagtatgttgttttgattgaagtatatgaagaaaaatcacataactatgtagtttgaaaaggaaatattttaataacctttctagataatttcttctctgatactacaccaaaacagataatttattctctgctgtagtatagataacagagaagtattatcttggtgtagtgtgtggataagacactataccaaatggtagtgtcctaaaggttagttgcaaaatggaatctgaaaccatattgatgaactttttctgctctattatctaaaattcatcttttacctttgcgtgattttgtaacatcatgtattggtcacttgggttccctaagttatgtagcacttccaaattttaacacatttcattatataatatcaaagcatcatattggttaattaccagcattggtaactgcatcagaaaataattgttgggaagctgtaaggatcatggtagcagatacaagttttccagaatactaatttttgcctgaaaaygcaagtttttccattgaaaacaaatgctcttggttgtttttcttaaagagacaggcttagttgaaaaaaatgccacataacctaaatctgaataaccaccgtctgtcattagttcttttaaggraaaattgtattccaaaaaaaaagtggcagtttgactcacaatttaaagcattttctttttttgttacagatcataagtcagtatgcaacacaagtgctttgtatgtatttcctgtgtatcacacagaatattaaaaagatgtgacctgggttgagctttaataaaatcaataatgtctgttgcttcatcaaggacattcttaggcgaagtggcattttttttttcctgcaagtatatggcagtggggattgtaatgatgactagtatagtttggtgcctaaattcgagtgaaagcaccagcacttttacccattgttgcktttgcaccatcagtgcaaatgttagtcaacacagtgaaagatgtcttaatagtatgatgaaaatagttgtgaccccatgggctttgggaaccctcaaagatgtctccagatcacactttgggaacgctgttctgaatccatattataaatacaaattatatgagtgaggcttaaaacttcagtgttttattttaacaaagtatgcttgcttttaaatttcagcagtttcccatcttttatgacatttttaaagatttttaggagaaaattataggctgaaatagtcatcaatcttgcaagtgacaaatattttattaggcaaaatgaaaaacaattcacatcaggaaaattggaaagaaatcaacttcacccattttgttgtttgattatgtttcctgaaaaatatattcaggtcctaaactagactataactctgagggttcctagtactaagtgcatggatcaattgtttgtctaaatagagtttaatcaaattcttctttaggctaggtttaatcaaattctttaggctgggtgtggtggctcatgcctgtaatcccaatgctttgggaggccaaggcaggtggatcacttgrggtcaggagtttgagaccagcctggccaatatagtgaaaccctatctctactaaaaatacaaaaaaatcagctggacgtggtgccccgtgcctgtaatcccagctactcaggaggctgaggcagggagaatcgcttgaacctgggagacggaggttgcagtgagtggagatcgcaccaccgcactccggcctgagtgacagagcaagactctgtctcaaatatgtatatgtatatatatatacacacatgcacacacacacacacacacacacacacacacacacacacatatatattcttctttaataaagtagtgaatatttattcatttatttaagcagtacctactgagtaccactcttaagtacctccaatgaatcaaacagacaaaaatccctatcttcatggacttcgtattctagtgggaagaaacggacagtgaacaataacaacaataagtaaattatacagcatgttagaaaagtgcaatggaaaagagaggaaaaggagatcaactatagggacacagggaagtgttggaagtctcaaatgaatgatcaagataaggttcattgagaagatgaggaatgagtttcagctacttgcggggctgaggtgggaggatygcttgagctcaggcagaggttgcagtgaaccgacatcctgccacagcactccagccctgggtgacagagtgagaccccatctcaagaaaaaaagagagattaggagacatgacaagcaaatgcaatatgtagaccttgtttggaccctttttaaagaaacaaaccaactgttagaagatttttttttaataaatggggaactttaagtataaactattagatgatattaaggaattattaatgtttaaatgtgataaggtgaagaggatggaaaaaatagattggcaaaatgttggtaattttgaaatgggtatatggtggtttgtttaatgattatgtcttctaatttcccatagcaagattttttaaaaagacattagttataatttagaaaaattttgaaaagtggggaaatgtatttggaagcacatatagtcacatatatgtgcacagttagctgtccttatccatgggtctgacatctttggattcaactcatcaaaatattaaatattttttaaaattgtgtctatactgaacatgtgtagcctttttttttttgtcttttttacttgcagacttttttgtatcgttattccctaaacattacaatataacaactaattacattgtattaggtattataggtaatctagagatgatttaaagtatacgagagatttacatgggttatatgcaagtattactccattttatgtaagggacttgagtatccttggattttggtatcatgggaggtcctgaaaccaatctcccacagatacttctatacttctctgtgatcttaatgaatacttaaggaaaaagtaaaatgtataagtttgaatttactcacccagtgagtagccatttaatgtctttatattttctttgtaaagaagtaatagattagattttgaaatgtggttttcttttggctaaattgtagattttcctttttaaaggaaacaaaaacagcctaagcttccttcagagtctyaggatatttgggtagataaaggtataattgacaattgtcataaaataggctattgtcaatacctttttaaaaaattctctttttaatattttcttgtagcacaacaaatcagaagctctgggctgtagaacttcagaagacaatctccagagacaacaagtatgtgctgctggcttctgaacagttggtgggcgtctgtttgtttgtttttatcagaccacagcatgctccttttatcaggtcagtaaacagaacactcctctaaggctacttcctaccattaaataacaagaaaaaagcctagaatgtttattgtttcagttcttcaaacaaaaactatccatagttcttgttttaaaatggggttttgggggttttgattaaagactcaccaatagcttcactgtactatttcaaaggcttgccctcaaagtaccataccatgtgtacttaaatgattatgtatattcctcatttcctatgcacatggaactcttgaaatttcaaatctgcgatttagaattctttgtttcaaagggatgttgcagttgatactgtgaagactggaatgggaggtgcaactggaaataagggagcagttgcaatccgaatgctcttccatacaaccagcctttgcttcgtctgtagccactttgctgcagggcagtcacaagtcaaagaaagaaatgaasattttatagaaatagcacgaaaattgagttttcctatggtaagctcttgctgcttgttcttgaagataaagctttgaaatatattttaatttgccccaaattctacatcaatgtttttggaaatttaagatagttcctagaaacattaagaatattcacctaaatagatatttcatgwgtattaacccaaaatatctgagacagggctcagtcaatttagaaagtttattttgccaaggttaaggatgtggccatgatatagcctccagaattcagaatgacatgtgcccaaggtggtcgggggtacagtttgcttttatacattttagggagacctgagacatcagtcagtatgtgtatgatgtacactggtttggtctggtaaggcaggacaactcgaagtgggggcttccaggttagaagtagataagacgcaaaaggttgcattcttttaagtcctagatcagccttccactgaatacacaatttagtgtggctcagtgaatctgcatttttgcataaacaatagggcagaggaagcagtcagatgtgcatttgtctcaggtgagtctcagagggatgactttgagttcagtctatactttgtccacaaggaatttcctgtgggcaaattgtgagggagttatgtagcttcttatctttggagctatcttatttaggagtaaaatgggaggcaggtttacctgtcatagttcctggcttgatttttctctgggcttagtgattttggggtcctgagatttattttcgtttcacatgtgttattactgttgggtcaaagaaacaggacatgggaggagacaagcatatctcaggcaaagaaatagttgtaaaacatttttgaacattgattgttttgaatttaaaattctatctcattgctttcagggaaggatgctattttcccatgactatgtattttggtgtggtgatttcaactatcgaatcgatctccctaacgaagaagttaaagagctcataagacagcaaaattgggattctcttatagcaggagatcaacttatcaatcagaaaaatgctggacaggtatatctatacttgagaaaatacttgcattaagattttgggtcgtgaaacatgcctttttaaatcaagatgttttaaaattttcttggggtctttttgtacttaaatatgcatctgtaggtaaacagataatagaattatctttccttaaagtgtagcaggatgagctgcagacaagaacccttcagacaccaagttgtagaaggaaagggctttattcagctgggagcagcagcggactcacgtctccaaaaaccgagctccccgagtgagcaattcctgtcccttttaagggcttacagctctaagggagtccatgtgagakggtcgtgatcgattgagcaagcagggggtatgggactgggggctgcatgcactggtaatcagaatggaacagaacaggacagggattttcacgatgcttttccatacaatgtctgaaatctatagatagcacaagcggttaggtcaagggttgatttttaactaccaggcccagggcacagtgctgggctatctgcctgtgattccatttctgccttttagttttcacttctttctttggaggcagaaattgggcataagacaatatgaggggtggtctcctcccttattcccccctttgagaacttcactcattaatgggagttctcactttcatcctcattacccatgtcttcttgcaagacagattgatagtgattcatatggtacacttgcgctgaagcattttggtgagctaaggtagtgatgaagctttttatcatttgaagaagtacaagtagcaaacaagggagcagtaagcaggttcctattactattataactcctattataagagttttaaatcctcctagcactgggaaccatttttcaaacatggcccccggatcaaatccatgccacacttgcacaggcacatgtgtcagttttgtcatatctctaattatgtcttcaactacttgcccttcatcatctgtgtatagacarcaattagtaaggttaaatttcccacagacccccaccttcagctgctagcaagtagtcgagagccartctattttgatagatagcatttctcatctgagactcttgccagggcagtatagtcaaggctctgccagttttattagtgattatttctaagacagcttgtaaccgtatgattcggttgagcatgtaaatgggggtccagtatccccacgagccatcttgtgcccaagtagcaggtctgtaatattgtatgattctctcagggggccattcatcatctttccaatttcctatagctatgcttctcttttctcgggcagcatagacagggaaacccaggagtttgcctgtctttatgggcagtaggaagaaagatggtttaatagtgccaataacacaactacctgtccactggttggataatttggcacaagctctatgcccacatatacagtataatccagtgggggctgtccagtcctggtgggactccggatgggtccamacggtttgcaactttgggaatttactaaatggattcctttctgtgtgatttgaactccaccaagtgactgtttttgtggtaccattatacagtttctgtcccagacaactaagtcatcctacggggtgagtgaattcttttccttctccagctatgcaatattgtccaataattgaggtttttaggacccagaaattatcagggtgattcttttgagctgggaattcatcaggaactgggtctgtaggtactaattctcgggcttctcrtggccattgatctcccattacagttcctccacatacataatgtgaagcaacattgagagactaggctacatgcttggctaattgcaaaaacaaatttcttgtttttcctggaatttctggtactggcacatttagttcatcatagaaagtttgaagcactggctcaggagagtgtttgtaaacttctcctcgaactaagatatttactcgaggatccagtccagccccattgattcctaaggtcacacgctccccttttttccagcgaggatcaaggggattggttattactagctctaaggggttacattgtcccttagtacaggaagggccactttttcctttctgaagctgcactggatccttttcattttttatccaagtggcccaaatgacaccagtatccacattgatttccacacagtcctaattcatgacaaatatacttatttttggtcatatagcctttttcccaatcaaaagccacaccccttcctaacttattgctcttaatgacagcacaggcatcaaatttcaagattatgcgtttgggcacccctttttcttctgttttggctaatacttgtatcatttacaagtccccatcagtcttcagtccttaatcttacttcaaaaactgtggacctgggaggccacagagggatcataacacacatctgggcagtcgtttcctaggctacatacctcgtactgagtgtcattatataaacacgttccttttaaagttcctaggcattcatagtaactatagaacagaaagattgttttaacttgttaccctacctcagtaacctgatgtatacactgagagcagtcttctatgcagggaaaatcagtggaagtttttactatacaagtccaaattataaggaaaatgagtcccacgatgattctcctcatgcctcggccgtgcrtagaccagtcagcttccgggtgtgactggagcagggcttgtcatcctcctcagagtcactttcaggagttgtctgggctcggttttgcctcccaagtttcagcagctgcaggtttcacacggctgtggtggatccaggctgggattccttctcctttacagccgtgggggtggtcaggatgatggtgtgaggtcttttccactgtggccgcaaagggrctacgttccagtccttgatccacatgcgatcacttggagagaaagggtgaactggggagaataagctgacgggacacctctcatttacccaagttgagattgtttgtgtaatttttcccaaagcccgtagctgtcactgtaactcaatttcacctaactctcggggagtgcctggaagtccccctagtataggaggaggcctatgatacagtatttcataaggggagtatcctgttagaagggatgcatctaattttaaacaataccataggaagggcctgtatccattttaatcctgtttcctgacrtactttccctaaactatttttgatagtctgattcattcgctccacctttccagaactctgaggtcagtaggcggcatgtagtttccaagtgattcctaatgcctttgctgtcttctgtaccaagtcagccacaaacaccggcccgttatgtgagccaattcgtaagggcagtccaaacctaggaataagatctcggagaagcacacgggttacttcgtaggccttttcagtttgtgttggataagcctccacccacccagagtaagtacacacaagaaccagcaaatacttgttaccttcacattttggcatttctgtgaaatccacctgaagaccctcaaaaggagccgctccataagcttgtatgctgggtggaaccgtggggccttgcctcacattgcgctgtcagcaagtaacacaccattgtgctactgctttggcaagggctggcaagtgtgagatgtagaagtaccggcctaacaacttttcaagtgactcttgacctagaagagtggtttcatgcatggccagtacgactgtggctctcagcaactgtggcacagctaccttcccatctggcagtctgatccatccttcttttattacttgccccacttctgtgtggaaaaagtctttttcttccttagaataggtaggtaccaggtcaggtgtttgagggagtaagggggctgctactgatgcacagtaaggggtagatgctgcttttcgagcttctgagtcagtttgggagtttcctaaggccactgaggtggaggctcgctggtgtcccctgcagtgcatgactgccaccttctgaggtttccacactgcctctaataattgtagaatttcttgttgatattttatgtcctttcccctagagtttaacaggcccttttccttatataatgctccatgcacttggagggttagaaaggcatatcaagagtcagtgtagatgtttacagtcttaccttcactgagttctagagcccgagttaaagcaatgagctcagccttctgggctgaagtgccctgtggcaatggtttggcttcaatgacagcrttcaaagttaccaccgcatatcctgcacatctttctccatgtggattgatgaagttgctcccgtccatgtataactcccagtctgctgatgcccatggctggtcccgaaggtcaggtctgctagaataaactgagtccaacatgtctacacagttatgcttgaccaggctctctgatactgggagcagggtggcgggatttagggtgttacagacgtcagtgrttatgcggggattttcwcatagcaagctttggtacttggttaatctagcatttgttagccaatgatgtcctttggtattcatcaaagttaccacagtatggaaggcctttatattcaggttttgcccaagggttagtttatctgcttcttgtgctaacagggccattgctgccagggcccttagacatgggggccagcctttggaaaccccatctagttgttttgagagataggccactggccttggccagagccgcacagtctgggttaaaactccaactgccattttttatctttctgacacatagagtgtaaaggggtttgtcaaatctggtagtcctagggctggggccaacataagtttttcctttaactcatgggggcctgccatgcgctgctgtggtgaggcgttcgaccggggcaattacctacccggaagtgctctcaggatccgcrttgctcaagctggccggagtcccccacagggatgtgccacagggcaggcctaagccacctaaggggctgccttgaccatccgttaatcacctcacttcccggtcggggaaccaagaaatgtagcaggacgagcctcagacaagaacccctcagacaccgagttgtagaaggaaagggctttattcagctgggagcatcggcagacttgcgtctccaaaaactgagctccccgagtgagcaattcctgtcccttttaagggcttacaactccaagggggtccgcgtgatagggtcatgatcaattgagcaagcagggggtatgtgactgggggctgcatgcaccagtaatcagaacagaacaggacagggattttcatgatgyttttccatacaggcctraaatctataggtaacacaaacagttaggtcaggggttgatttttaaccaccaggcccagggcgcagtgctgggctatctgcttgtggcttccatttctgccttttagtttttacttcttctttctttggaggcagaaattgggcataagacaatatgtggggtggtgtcctcccttaaaagtaataaaaataggaaagagaaaacccataataattcccataaagaaaaatatattatgtatctataagattcactttcaaatagaaggataaacttttttttccttggtgatagtttagaatcttcatctttagggctgttttttttttgggttaagtcctgtggttattgacttttcttttgtttctatgtcatctgacttttgaaacacttcttaaagcttatgaccacaaaatttgggaagaatttattaaatttttttttttttttaggtaaaaggatcagtggccatctggtatggtgcctggtgatcaccagacttgaatctttgggcaccacattaccttttcaggcctcagcacctcattgagaataagatatcaggctagatgtttccagaatcccatttacagttccaaatgtctcatatagctcaaagatcaggcagaattcccttattcatgtagttagtttaatcaaatgtcaaacaagtggtattgaagcaggatatttccctgactgcttcgcaggtgggaactggagtgcatgggcactggcggggcgaactctgctcacttgacccactgcactccacccctgtaggagggggagttctggtaagtgagtgcaggagctggggtgagcgcttttgggcaccggcaagagcgaactttgtaccaggcccgtggcagtgtctaggggagggtgcctccaacccctgaagccccacagaaagtgttacagtgctgttttagctctgctgcctgcagatggcttaagtgttaacagcttagtggggggtcagtgcgacagccttatgctcccacactcatggcacccgagttcttatctggtgtccaggaggaatgaggtcacatgaacgaattgaagatggtaaatatggggtattttattgcygatgaaaatggctcttggcaggaaggggagctgaaaaggggacagagcaataagataatcttcccctgaaatccagccatcccatggccagactcctctccaaaactgtgctgccaagctgtccctttgaagtcaagctgcttctctctgacatccagctgcctctcctctctctgccagctgagcctggggtttttatgggcacaggattgggggcaaggcaggccatgggtggttttggaaaaagcaacattcgagcgagaaaacagggatataagttctcatttggggctgtggtaacagactttttggcttgagggtgggacccagcaaagggacccacccacttctgcccagaatttccctgtctcctgtccctatgggtatgaaaaatgctatgtctcaggttatttttctaagctttgttccattcagctagaagtgttcatcagacgcatacagatwtcttctgagagcatccagcatgtaatagacatttaatggatgactgtctgaatgaaaacagaacttgttgctgtttgggaataacttactttgtatatgtttattttaggtttttagaggatttttagaaggaaaggtaacctttgctccracatataagtatgacttgttttctgacgactatgacaccagtgaaaagtgccgcacccctgcctggacagaccgtgtcctttggagaaggaggaaatggccttttgatagatcaggttgggaaatgggcttctttatttaaatgaactaatgtaaacttatgaggaagcagggaatgacataatatcaaatgaggagaatattgtttttcaagaaacattaactggaatagaataaataaaatttaaatatgtcagatttttagaaatatcagatctgtttataataacttatttaatttttcagcctattttcatataatttcatgtaaagagaagcaaggaaatatttttgtgaaatytttaattgaagctaatttaggtttttaagctaactttagtggtttgcatatgttttgaactgccacttgtctcttgaattgtttatgaaacaccatttagtcccagtcctttaagtaatcttggaaataaagccagatcttaatttttactaaataaagcataaaatgataactttaccaaaacctttcgaatttaaaggtatttagactgcctgcctattaccaagtgtttctggcattccagcctcaaaccactgaagctcatgaaaggaaggagaatgcctctttgctctacacgatctgtcctgcttatacagcttctcttgtgttttcatttcttctgactgcagctgaagatctagatcttctaaatgctagttttcaagatgaaagcaaaattctgtacacgtggactccaggcactttgctgcactatggaagagctgagctgaagacttctgaccacaggtttaagcagtctcagtttttctaatagtgtttgaaatttgtttgaaatacacccttttaaaaacatttctaatacatctatcttcctttatgccttaaggcctgtcgttgccctgattgatatagatatatttgaagttgaagctgaagagaggcaaaacatttataaagaagtaattgcagttcagggtccaccagatggtacagtattggtctcaatcaaaagttctttaccagaaaataatttttttgatgatgccttgattgatgagcttctgcagcagtttgcaagttttggtgaagttatacttataaggtaagatgtttattatgcaaaagtagcttgtgattcataaacaatcatttctatatagaaatcaccttatttggggaaggagagaattttaaaaaagaaagataccaccttatttagtgtttagtatatgagtatttttatttccaaactaaagcaagatcatactgtggatattattctgtaggtttttataactgaattctcaacttagaaagtttaaatgaatagtgaaactttttttttaagacagggtctcacccagtcacccaggctggaatgcagtcatgtgttcatgtctcactgcagccccaaccacccaggctcaagcaattctcccacctcagcctcccaaatagctgggtctgcaagtgcacaccaccacacctggctaagttttgttttgttttgttttgtttttgtagaggcagggtttcaccatgttgcccaggctggtctcaaacccctggccttaagcgatctgcccagctcagccccacaaagtgctgggattacaggcgtgagccaccatacccagctaaacagtgaaactttatgtgaacaattgaaaacaaaaataggtgcaagttcagatatgaactctcacgattcctatacaatagaacatgtaacaaaaccctataacaaaatgaagctgtgattgctatttttttttaaggagagataagaatgactccctccctgcctcagttaaagaaatttgagtaattttaagtatgtttaatttctaacagagatgtgatgactagtcaagagtcattccttctagtcttggtttccctcattgatctagccatctgccttttgcagaaccagatgcctgtttccttgttttaaaaatgttctcttccaactatacagcagttttgagagactgaatgatgtgcatgtgtgcatgtgtttggatttcatagggaaagaggtaccattaaatccctttaaataccattcatttgcttagttaggtatgtttgatagatatttggtgggcagatctctatactagttgctgtagaagagcagaggagaaatggaagatacaactcctgcttgtaatctagtagggaaagtcagcatgtgtgtaatgacacccccagatcctaaagggcgtagtccacagaattaagatggtatggcttctacagagtgaaaatcaaagacacctcaagtcctttcagagagtaaatgaacaaatggagaagaarttgtgtttagactttcctcaaatcttttgacaaaggtctatcccaaagctttcaaattaaacaaaacaaaacatttcaaaaatcttaaggttcttgaaagtacacagtgaaatctgcaagtgtacagatgacagtatactttgccaagtacagaaatgccaaaccaccagaagcatcatgtagactgtgtgagtgggcagcagagtagcagataaatgtcttcctgagcaaatgtaaaatactgcactgagctacaaagaatccaaactgtataagggatgaaagactctgatacaggaaagggacctgtctttataacccaacctctaaagaacttgttaaattgaagccagaaggtttcccacaaatgtttgtcatcattaggaaaagtattggtaagaaactaaggcattaacctaacattataaaaccatggggtgtctccaacctggaatattggttgttaaaccccaagatgactaagttggaagagaaaaagcaaacactgaaagtcaacaaggagaggatctctataagtagtgagaagaaactgattattaccttttagtctagattaagacagccattaaggagtgagtaaaccctgtgaacccctttatttttaaataagaggttccctggaaatgtgtatgggataaatttaaatacatatagatgcttacattaattgaaggaagagtctagaagcttttactgtagtgagtgaaagcaggaagaaaatatagcttccaaaagaacttacataaatcaatagatataagaaccagaatcccttgttaaagttagaaatgtgtaaggggcacattgctgattgagaataaggacaaagatattagccctaacccaggaccacaaaagtgttggtacctatcaaagaacaaataatgtttggggtcttaggggactggtgcagcataaatgtatgcttacagtggtgattataacctttggaggagggatagtctccattgccaacaatctgaaaaagataccttcgtgtagttaggtaagaatggtctccctgtgtatttcaaaggatagcatcctgcaatttagttttatgccaaagaaattgagtcrgttgccttggtcatatctgtgggattgtagaaatcggttccctccaggcccttgattttaccagggtgaagtacttatgcacacttttgttttggccttttcctcttaatattcataattcatactttggaatcctagtttaagtagggggttagggggagagtgatactctgtgtgtgtgtgtgtgtttgtgtgtacatgttttcctctcattgtggaaaaatctgtaaagatttctgaacttgtggtttaactcgccaaattttctgtaataagactgataacatcataatttgttcttttttgaataataacttcattacatacctgcgaccctcttcagaacttcttctgtcctttttattttttttttcctcttgatagtttttttatttcaaaagtaaaaacttggaatcctatcaaagaccattgaagtcccaaaagagtaaatgtttgtcaatgatgaaagacaaggagcataacttatctaaggcttcttggggccagtctggttttgttttctttcactggcaactctcatcttttttgatcataggaaattttcttcagggaagtcactgagacagtgaaaatacatagtactgggttgtggggtccggagacttggatcccagccctgtaacwtattctccttatagagtcactttgaacaagtcacttaacctctgtccctttttgccttgtcaatgaaatggaggattggatgggactggattagcagtgatcacaaatggaggtgcacagactcatttcttgtggctgttccattaacatagtatttgaaattggagttagagtgtttttaggggaagagtgccctctccaggtcaccaccagccctacctgcgctccctcctttactttttacttcctggcctcttgtggcccttgttaatgatcaataatcatgggagtagtcactgagcttgttatgtctatggtattaattatggttttttattgtttttcttaaagatttgtagaagataaaatgtgggttacatttttggagggaagctctgccttgaatgttctgagcctaaatggtaaagaggtaaggtagcatttgttgattctaaaccattctgaaattaaatgtctgaagatggtatgatatttttatagacatgcagcaagattatctaaatgggaggggaaaagaccttatggtatgttcgaggagttatttaatgttttttatttagactggatttctgactagcctaggcttattttggcccctccccagagatattaactgttgatatagactaagaaggaaacatgtttagcacctaatttgatttattacattttatgatgcaaaaagttttaaagttttaattgggggtagtctggcttatctgtatagtagaaaaacattctatcaagtgaagaaaatgcattatgtaccagaaaacaagggagagaggtgctcattattcctaggaatttgtttcattggcttggcttacctagttatcttcttcaaacataactaaattaatttccagagataacagatccatcccattgaagtattttagaaatttttaacaaatggagatattcctaacctgtgatttgaaaagtcattgatgacggaaacttacattgttggcctggaatagttttacttctctgaagtgcttcatctgtcatttttttctgaactcctttagacccaaatcctaaatttctaagtatatagtcagtgcacaagatggattgtactctaggcctgattcctgcagcactgagcaactctgtgagcactgtcctgagctgcttcttctgtcacatcaacttctttggagaaaaaaaattctttgtatgtattaggctgggtgcggtggctcacgcctgtaatcccagcactttgggaggccgagacaggtggatcacctgaggtcaggagtttgagaccagcctggccaacatggcaaaaacctgtctctactaaaaatacaagaagtagccaggygtggtggtgggcgcctgtaatcccagctgcttgggagactgaggcagcagaatcacttgaacctgggtggcagaggttgcagygagccgagattgcaccagtgcactccagcctgggcaacagagcgagactctgtctcaaaaaaaaaaaaaaaattctttgtgtgtattgcttttgaaataggttttgtagagttttgtttgttttcctaaatgtaatactartatactcatgtaaaatcatgtatcaggaaacatggaaaagaattaaaaataagaccactcacataatgctaccattctgaagtaatttctcttaaccttaatattagcatatacatatgtaaatacaaatgggattttatatacacacaaacacattaacacaaatgggatatgcatatacgcaaacacaaattgaaaccgtgttataaagctattttcttactacctcttatgactgtgtcagggacatcttaaacaaatatgtcatttttaatggcttcattaatttcattttgtgaataaatatatacatttattaaaccaaactcctatagacatctagattatttcctattcttaattattaaagccaatattccagtgaacctctatgtatctttttgaatatttttttggtcttctaaatttcttccttttcatttggccctggtctctaccaaggggatagtcctaaggaattacatcttaattggccattatggtgataggtatttaagaatgcttgttagtattttttgatgaatataaaagaattttgttgactttgaaaagtaatatatgacttgtaaagcgtgttaagttctgaaattggattgattttagtactcatatctacttggcaagtaaaggattatgaattcttaggattctgactttaaagctcagtgtggatgctaaattactaataaacacagctgtgccactcagttcagcaactttcaacctctccattattatgccttcaaggaattctaatatcagtaacactttgagccaaggaagatctgtacccacaaaggtgccaactgtcagcacagcatattgatcacagctacacagttcatttgcaaataccaaaaatattcacatcttgttcacattaagaaactcttcaaacaaaggaaattgaaactatgtgggagagagattaaatttagaaagcaagtttgttataagaatatgggttttaaatgagaactcctttctagtgcacattttstccttgaccaaagagtcttgctgttatcagcaagtttttttgagagtattttttaaatacattgacacgatctgctataatttgattataatgtcttggttgtcttagattatactttagtctaaaagtcacccaaatttatagagaaggcagagtgccagtttcacaggtagaagtcattctgtttttagaatgattaatttttgttkaagatttaaaatggtgttcagttctcttaatattcttctgacatttgaaatgctaaaactgtataggttagcacttagcagctgacaatatagcagctcttaggaccatatgccaagttaggaaagaccaaatgaacaggaacaggaaatgcattttaaagattttctgctgtctcttttgtagttgtttcacgtgggaacaattacttaatctgtgaatcaaaattaagaaagtataaagttatgtagcagagttgttggtgaatttacatctggccaggaaaacatagtggttgtagcaaaggaaacttgcatctctgggcatcctagaaaagatctttatttatcaccacaggtgtttaaagggagaactgggaacaacctttaaactagtttgaaatttagtatatgtgaaagaactatttctttagttagctgaattgtctaactaaattaactgtctataccattgcatagtttaacgaagtcagcctctttattccaaattagttagctttcatgttaatctttattttatatctcttttactccgctagttattgaatcggactataactattgctttaaaaagtccagactggatcaaaaatttggaagaagaaatgagtttagagaaaattagcattgcattgccatcatcaacaagctctaccctgcttggtgaagatgcagaggttgcagcagattttgatatggaaggtttgtttcttaaacacatttacttcttgtagttctagatatgttttcttccaatctgtaaagtcttattttccaagttcatctttcttcttcttcttgggacgtacatagcactattaattagaatgtattttggccaggtgcggcagctcatgcctgcaatcacagcactttgggaggctgaggagggtggattgcctgaggccaggagttcaagaccagcctgtccaacatggcgaaaccctgtctctactaaaagtacaaaatttagctgggcgtggtggtgcatgcctgtaatcccagctactcaggaggctgaggcaggagaatcgcatgaacccaggaggcagaggttgcagtgagccgagattgtgccactgcactccagcctgggcaacagagcgaggctgtctcaaaacaaaacaaaacaaaacaaatttatttcacatcatattgtgtttattttgcgtatactttaaatgtatttaccattcttccattcaaatattaagacctttacaaatgttaatttatattcttattggataaatacccaaattagtattgttggtgtatggtttagtcccaataattaaagttgaggtaaaaaagtagaagttccaaaagggtattctaagaacagaaatgaatttaagtaattacgcygaaaatttccttaaacatgatttaaaaatgcatttgtttgatggcaacattatcaaaagaaaaaatttttaaatgcatttgttttctaacacaatatgctattctagccagtttttcattaaaatgcataccttagattataataatattgtaatgccctgtatagctaggtaccacatttaagagttgaacgtcttacaaggttatctcattttcacattatctgttcatttgtttactcagtccacacatatttatgtagtacctttatgccagatacagctgggtgctggagattcgacagctgtggttcttgcctttccagaactcatagcttattgggtgttacgtgtaagtaagcaggcaattataataaagtgacataaatgtgataatgaatggttttgtggtagctcatgggaaagttgcttaacctggatttgggaaattgggcaagctttcccagaggaattgaaatttaagttgagaatccaaagactcagggagaatggaattaatgctatagaggagtgatccaagaagaaagcatgtgcacagtctaagtggggataaagaggatccaaatggattatggagggatgtttgtgagggagtaaatgaagaaaagaaatgcagagagagaagtaggtgtgggatggaagatgaattttgtttyggatatgttgaatttgagatgttcatggagtcagtcaaacatgagtctggtgctcaggaaagagctctggagtcaaggcagctctaatagcctgcaaagcrtgggcatttgttaatataactttggccaataggattatgacgagacagaagagaatgaatcgaatatggagaaatacagacctgggattgagtatgtggaaacacagagtttaaatatagacagaagaaggctgcccrtgaaaagaaaatgagaagaaacaatggcaattgtttctagaaatgtcaaagagccaagagaaattcatggcttaaaaatcaaggaaagaaagtggagcatggaaggggagtagtcagtggtgtcttgtaacacagaaagatgagaagaaatgaggacagaaatgtgtccttctgatttaataacaggaagggaagctgttgttgacatttcatgagagtgatctcagaagtgatgaagtcagatagtggtaaattgatatggatggaaggtgaagaagtggagaaaagtgtctgtagacaactctttaagaaagtttggggggaaagagaagagggcaattgctctaggaagattggaggtcctagggtggtggttttggatgggacaggcttgagaatgcacagtgctaatggaaaagtagaggagaaagggctgatggtttgggggaagggcaaggcagaatagtagagcagtgtcactgagaaaattaggctgggtggggcccatttgttccatcctcagatacccaagtgacaaccatgtaatgagactccagcttggggrcaggctgttgaagtaggggttcccatcttaagacttccctcttctctgtgaagtgttgaagtgatctgcaggagtgggacagctcacagtttcaggagggttaaggagttttgcagtaaagctcctgaagagcaaagggtgaggggaagagcaaaccagcaaatcatggaattgccaggcactttaggccagaagagactgaaaagcataatttcaaatgtgactgcagttgtcaggactgggtggttttctttagcagaggcagtcagcaatccaagtgttatcacagaaagattaaacaggggaatcagtgcagggatggggttatgtcaagcacgtgcaatggaagaagagtgaagtagggtaatgtttgagatgaagaaccatagaatctgaaggtaggtacagaagaaagcagaatcagatggaggtaaaagttagagggatcaaaccctggcttctgaagaaatcaaaagagaaggagtagccaagggagagaactgaaaagctgggaggccaaagtcagagtgaagcttttgagtttattatttcagaagagtgcagttctgaggggtgagggttaggagtgaaggcgaatgtccataaggataggaccaaggcattttgctattgaacgagttgtccacatggactttgatgccacgcagaaagatggtgcgggacctgacttacagtcttgctctctgcttagtcctcagtgagtgggttcaggaaatggaagaatggacgttggagatgactgtagcaagtgggggtagaggatgttacataaattcctgatggcatagcctcagagcagtaggactttttgttcagggttggaagactaatgttctggaatggcagttaggttgcaagggttaccttgtgcccactttcctacccagaagtaagtggagatgaggagaccctgggggagaaccagtgtttacttaattaaagcaaagcgggtctttgtggggtgagggttgcagggaggagccttctgggggaagactgtgtggctcctgagagcttgttgactctgaggctggacctgggttaggcaagggagtggggcagttccacagagcacagtggacaggtttggaaggagagcaggaaacttgagttggcttgcactggagaagctgctctggggcatattgaaagcccattgggtcaccccagctccaagtggttggtcacctgacatcttattgctcagagacaatagatacctttacatcttctgaaacaagcatttctactaattgtggttttatacatgccttcatgcttaatccatgtgtgtttgcaatgacataatgttcatatttgttttgtgtattttaactttttaaaacctaaggtgaaaaaaatctctgagcaagttaaaatggagttatctctgatcaagcctgcttttccttaggtgatgttgatgactatagtgctgaagtggaggaacttcttcctcagcatctccagccaycttcaagttccggccttggtacttcccccagctcttcaccccgaactagtccctgccagtcacctacaatatcagagggtcctgtaccttcccttcccatcagaccaagccgagcaccgtcaagaactcctgggcctcccagtgcacagagtatgcattttatttgaaagttttgtatggcttcctgtggccaatgtgcttgatgttggagagtcatcgtttaagtttcatacctaggtgataaagtgcaccctgttttctccggtacagaataggaaaacttgtagatgataagctctcaatggaaaggaaacttgctataactgtcactagatgacaattgttcttaatcttttttctatgtggttaggtttgtctatgtcttataactgatgattttctatggtatgaacccrttaactatttgagctttttcttctctctactggccagactacaaaatggcttaactcaaacaatactttgtgcatatcaatagggccacttagtaaattagctttcagcacctgaggcctaggtaagaagtcagcacagaggtagcattattgctgccatggtaccaaagggcagtttaatagtagactgcttttgttattcatactgaaaatacatgccctttctttacaccattgtgcacattttatagaacattacacatatatatgaaggactgttcccttctgtcaacagctacttagaagctgatcttcttacctcctgtgcgctttttaggttctcctattgacgcgcagccagcaacgccgctgccgcagaaagaccccgcccagcccttggagcccaagcggccgccgccgccccgcccggtcgcccctcccacacgcccggctcccccacagagacctcctccgccttcaggtgacaaccttttatttccatttctgctagatgtaaaattcttcactctattttaaaatgttttgcatgttttccaatctctagcttctggattttacwgttttttctatcattattgctatttcttagcttttctctaaagaacatggtaggcgcaacagacaaggtagagtgtttgcagagtagattcctctaaggtgttttcacagctgcctttagctgscttctcaccagccagccagagaggtttattttgtttttgctaatttgatctagttaggcatgtaaactgttcttaggtaaaattaggtttaatttttttcaaaatcctcatttctggatgatttataagcataaaataattaaaatgtactaatttctgtaaaagtataataaaactggagagcatacgtattaatgtacaattgtatgtatttgtttaatgttcttttaaattaaatatagtgctgttacttcaattataagcatatgcattgaataatagtttttgtagtacgtagataatatgtaattcctgcatgatacttgatgtcatggatactatagcaatctttgacatttcacttctgtatttaatgtcatttcctttctgctgcctattttcttatgaactataaggggctaggagtcctgcacccactagaaaggaatttggaggtaaccatttacatttgttagcatgtgtgaatcgtggttcattaatgttttacacctgaaagacattttagatttgtttgataaaagtcaaaatgaatgacattctagtttaaaactaatccacaaataaaactaataaaggctttcatttcccaggtaggctgggattgttcatcaggcctaattttttttttaataaatgtggtcgattcatttacaaagatttaatacccaaaagttatattaattttaaaagtcattcaggtacagtaaatacagaacatttcccaagtatctgattagtgatacatttattttctagtggaaaagcttttggattagcaaagaactgtatgattttcttttcctttcttcataaggaaatttttattcacaaagggtcactttttgtttgaagtatagtttatttggtttacatgaaaactcacagagctcagttggagttatacatttgacaagtttatttaatctaaatctcaagaaaagatgagatgagttttcacaattcctcagaagaacttttacaaatccagtgttactaaggctcactgtgcatgtgtagcctggtctgtttctatkgtagcttgcctagtgacatggctgagcaattcaggtcttactacagactgactttgcctgtgtgtagatcttaatgactgcgtgtgataagaatagctaaattatttcagcattacagcttctgccgaatacagctaagtgatcatttctccattgacctacagaaaacatttaatttttcccttttcaagctcctgcttttatagaaaacatttaatttttcccttttcaagctcctgcttttatttaaatttccatgataatttttgcttatcttctgctttaattaggaaaacatcctgtagaaaataaatttaaaatgaatctgtcaaaagttaggcaagccagtggattacagtgaaatctgtcttaattttaaaaattgctccccttcataattcttttgtaagtagtgtttgcaacatgttttttcatcctataaacaataattcctttacgtcattatagtacattagagtttttaaaattaatgcatcaaaaactaacttcaaaagacttacgtagtctcatagaaatttatgatttctttccttttgactatcaaatatcagagtttttacttgctctggatataaggagtaagatgatttttaaagcaaaggtcttcattaaacatattttttaaattccctactggtagtaattgcatacataaaaagaaaactgtcatcctgtttctactcttctgtttgagtaaagggaggattcagatttgggccaagcatctaaagtcactttggtttgtattgatatctttgaagaaatttaaagcaataaaagagcctttttgcaaaagtgagtttactatggaaattgtcttgtgtgcctgcctttcattctgtgctgtgggccctgaacaatatatagtttctgttctttctctaaaaaggtattggagcccctcccagtcctggggtagctaggagagagatggaaggtaacaagactcttgcattatagaagtggttctctcattttatttctcagtgtcagcgccccacctccccaccccgcagtgtttgcaggcatactaaatcttttcttggtccagctgtaaacttctctttcccctccttatgtataccttgtattttttcctctcttcattctatgtcacctatagtttctaatggatatccatttaatttccctgagatccttaatgttgtttgtactctgtttcatatatagtttatatatgcccaggttgtgaaattactgtttaagaatgtcttcaaaattcttttcagaataagtaaaatatttagaaatgtactttactaatctgaagttttaaaaattaatgattataattaaaccctattaattcagatccaagaatatagtattttgtagttgatttcagataacatagctattttatagattagcactgagccagatttgtttaaaagacctttaagactagaggccatttgttatgattttagttattaaaaggctgatgtatttcttataacaattgtacttgaatttctttacaaaaaggagagtttatttaagatgctgcccttgatagtcactcctactccttttggctccaagagtaatttatttcattttatccttcagctacctttctaatgagtttgaacatatttttaacactgtcttccataaggcagatatttggtaataacatatgcctgtcttctgtcttaatgatgggattttgttatagaaatccgaaagatctcatcataagataaccttatccacagtgacatctacagcgtgaagccctaaagtattgctactaggagcctcttgtgtaatttgacaaatgcagtcctgtctgttgctcagaagccacttgtctgccagactctaaggggcagcagtgccgcatcttgtgaccattcacacarctgactgtatgttttcaaggttcacgagagagttctatggggaatgccaccctaaaagtggtcccatgagtgagatatcaaactaaagtcaccacttgtctcccataaaggtctatctaaatattgtaatttttctctcttttggagtatttcattcaggactgataatacccttcatcattatacaaagcaaagtgctttgttttgttaccatctcatgcccccatttctgctggtaatgaagcagaacagcaagctgatgttatgcaatattgcttaattgttaacttacaactaatttttttttcccttcttgcttcaaagcacccaaaagccctggaacaacaaggaaagataatataggtaaaaacacttgaatgtagctattcacccttaaaactggaccgtgaaatagacacttggaatataagtacatggtttcttgtttatttttttaaacttaaatatatgatatgatgtctttnttccaggacgcagtcagccttcacctcaagcaggacttgcaggcccaggacctgctggatacagtacagccagacyggtaggtaaaacctygcctggggccaaggggtctcggttctaagtcctgtttactactagtcagttttgttaccttggagaaatcatgtgacccttcaaggcctcaatttcctcatctctaaaatgagggaattgcacttgatgatcttccgactctaacattattttaacatactcttcaaaaataacaaacttcattatttggataaaagtgatacacttaaaacaattatggtcactaaataaatatcttaagagtctcagtatatgaggaaatgatggatttgggcagctttttatcattttacctgagtaattaatgaagatataaagtaatccttcattaaaaaggattttaattacatttcagaaaaaaaaatgataaattcagtatagtaaaactggttctaaaggtttttttctctttttggtttttttcttgatcaggttcatcatattccgtaaaggtattagaaataggagagtagatgttgttacaggatttttccctacctgatgaatgtgtcttttctgtatgtttatatgttctcttatacacataggttttttattatttgaaaackttctctggactataacaggtaatcaagaacagagagaaagagcaaatagaaaccagtaatcagtgacttaggctagtccagtaggagctgggactactgagaggcccatatctgaagagtaggaaactgagagctattactgtacctagaaattaagattattaagattgtgagaactgaggaaaccacttcctatgaagatagaagctttttgtcttttctgttgtagctgtccacttaacaatctgaaggttcttttttatatgtaatattactcttcaaatatttatcctccttttttcaaaaaaagggaaatttgccattcactgatcccatgaccacacttggcacaagaactttcttgattctgttgaataccataagtataggaaaagaaagtcaggatttttgtgagtttaaaagttcatattttgcttaaaataaatattgttagcttagatccttcagcaaacatatgaaaatagaaaaaatatttttcactgatgagtctttcagtgtatttaattcggaatattgagttagtcattcaaaagttgtacttctgtgtttaaaagcaatatatatggctgggtggcagtggcatgcacctgtagtcccagctacgcaggggactacattggaaagatcgcttgaacccaggagttcaagtctagctggagcaacatagcaagaccccatctcttaaaaaacaaatcttgaccaggtacggtggctcacgcctgtggtcccagcactttgggaggccgaggcgggtggatcatgatgtcaggagatcgagaccatcctggccaacatggtgaaaccccatctgtactaaaaatacaaaaaattagccgcgtgtggtggcgggcgcctgtagtcccagctactcggaaggctgaggcaggaaagtgccagaacccaggaggcagaggttgcagtgagcagagattgtgccactgcactcccgtctggccacagagtgagactccatctcaaaaaaaaaccaaaaaaaaaacaaatctcagggtgttttttccccaaagtctcctagttgctcaggtatgtatctctctatctccttgtatattttaaaatcatcccagttttccccataaagacagcattgcacatggttaagaaccctagccctgcagccagtcagacctgagtttggatcctggctctgctttctgtgtggctttgggcaagttgtatatatttcttcatcttaatttaaaatagagatgataaaataatacctacttctgagggatattttgaagatgaaatggaaatgcctgtacagtacttaattaacataatgtctggcacatagtaaatagtcagaagtaaacaggaagattttaaaattcatcattataatggcttcaagtagagagcacttaaaatgacaaattagggactaataccatagaagaaagtaaatgagatgcaaaagcaaatgttttcacagaattttacctgtggaaggtaagtaaatgtctcaagtgttatgtttcctatctgtagacgattcctcctcgtgctggagttatcagtgccccacagagccacgcgcgggcatctgctggaagactgactcctgaaagccaaagcaaaacatcagaaacgtcgaaaggtaggtcctctttgggaggctgaggcaggaggatcacttgagcccagaaatttgagaccagcttgggcaacatagtgagacccgcctgtaaaaaaattaaaaactcttaaaattagccaggggtgatggcacatgcctgtggtcccagctactcgggcggctaaggtgggaggatcacttgagcctgggaggttgagactgtggtaagccgtgatcacaccactgcactccagcctgggcaaaagaacaagaccctgtctcaaaaatcaaaaatttttaaaaattgagagaaaagaaaggtagatactatattagaaatactgtactggttttgttgtatatttttctctttttccttctgtcatctcccaccttctacaacatatattcagatagctatatccttccttcattataccacaagaaatgaggctacttattgggggaagaaataactagaatgttctcctaacatttcactaaagaaggaaaaaaacatggttttctagaatatacctaacatctgacaaccactggttttttaggttcaactttccttcctgaaccaytgaagcctcaggctgcttttcctccgcagtcttctttgcccccgcctgctcaaaggttgcaagagcctcttgtccctgtggcagcacctatgcctcagtctggcccccagccaaatttggaaaccccaccacaaccaccacctcgaagcaggtcatcccatagcttgccttcagaagcttcctcacaaccgcaagtaagtctcatttgttacacaaaatattatctttgatgcatatgatttagtctttgaacatacctattttaattattgcctgttataagaagtaaaaataaatacgagttttaattttctttttatatttgttattatacatatatatgtgtatatatatatatatgtttgggttttttgttgttgtttgtgtgtttgttttttcctttttaagacgaagtcttgctctgtctcccaggctggagtgaagtggcatgatctccgctcactgcaacctccgcctcccgggttcaagcgattctcctgcctcagcctcctgagtagctgggattacaggtgcctgccaccatgcccggctaatttttatatttttggtagagacagggtttcaccatgttagccaggctggtcttgaactcctgacctcaggcaatctgcccacctcagtctcccaaagtgctgggattacaggcgtgagccaccatgcccagcctactctgaattttcaaagtgatctttccttaaaagtatctcattaaactcttttgaaaaaactgtgagatgagtgaaccctaacactttggaaggctgaggtgggcagatcccttgagcctgcaagttcaagaccagcctgggcaacatagagaaaccttgtctctacaaattaaagaactatccaggtgttgtgccatgcacctgtggtcctggctacttgggagtctgaggtgggaggattacttgagcccaggacatcaaggctgcagtgagccatgatcgctccactgcattccagcctggtgacacagtgagaccctgtacctccaaaaataataataaataaataaaaagtcttcttttacactttggaaagatctgaaatacagaaataatacgtattggcaatgtccctttaacacatttataagtaatagtttacatttatttttacagatatataggtatgtccagctagttggcagaagtgagcagtttcttaagtgtctacagggtgaaaacagatattaaagtaaatatgattcaatacaatatgaataaagttagcagttagcatttattaagtcacatttgtaaaagttgaaggatatataatacagaaaaataaatgttcccttaagctggttaataccaaaaagaattctatatttttttagtttagaaaattgaggatgaagtctgggagcggtggctcatgcctgtaatcccagcactttgggaggccatggcgggtcgatcgcctgaggtcaggaattcaagaccagcctgaccaatatggtgaaaccctgtctcttytgttttgtaaaaatacaaaaattacccaggcatggtggtgtgcgcctgtagtcccagctactcaggaggctgagacaggagaattggttgaacctgcgaggtggaggttgcagtgagctgagatcgcaccactgcactccagcctgggtgacagagcgagactccatctcaaaaaaaaaaaaaaaaaaaagaaaaaagaaaaattgaggatggtgaaaatatataataatggtagaactctttcaaataatgattttttttttctgctaatccatttttagtgaatcgtgaatttttcttattttcttgtatactcttttgtagtttttaaaatgtaattgaagggcaaaaaactttttcaactagccactctgagctttctaggactgttttagggcatccatctcattgtagttgcgtgccataattactaaaactctgatggtttaagtgtccttagaccaatacaaaagtagataaagtactctgaaaaacttccggaggtgcaaactgttagctgagattgtagttatcattataaaatcattctaagacacatatcattttctcagaaaactttccattgttttatgtttttcattgaagtgagtatagcgatttggtggccgacgggcacatgctttgtgtgtgcccccttagattgtgttcttgaatctcatggttgtcagttcatcaaaaagacaaagatatttgtttcaaatcctgaagtatcyttttgcctcagtcattgatatcaaactccttaatattagatacacagacacacttttctttcttggagggtggggtcttgtttacatgcagagtgtcattgtgagggatcacaaagtggttacagtttcctccagggaatgcccaatgctgggggccaggaggcaggtgaggaggagtctttctatctttttgtaccttttgaattttgaaccgtaaaataatgcctattttaaaaataataaaaaaaattttaaattattggaagtagctgttaagttgaacaatttacaagattttcaaacctgatggtgagatttttaaatatgacaagtttgatattttgtaatgacatgaaatagttttagaattgaacatttgtaatttttacaagtctttacttatcctattccaaatctacaaggtatttaaaacataatgtatatgacccagttttactttttattatttatcctttgactttataattttgtatagaagagattcrtttaattcgagtgattatataacatgttatacgtcctttacaaagtataaaaaatcctcacttatctatctgacttctagcatcttagtcatctttatcagctgagagccagaaataaggaaatgcaactggaartaaaggaaccgaactcactgctatactgttactgtgagacctggtagaaaaatcacagcattctagacccatttaatggaggatacagcaaccttgtacctctcagtataaacctattcctgatctcctgtccactgccagagctgatacataaaactctgagtgttaaataagagtctcatgtttactaggcaggaaattctaaagtacttaatatatttctgggtgatgtctctgaattgtcaaaattagttttgctatttagtaataggtttagatattggagaagatttacctcaaaacttgcttgaggatactagattttaaaaaataatggtatattatagagggattatgatttcatttttaaacaaaggtaaattccaaatttcttgtaaggtacaagtttcttgtaccttccaactaatacattatgaagtaaattaatgatattaagagtatcatccttcagaaaatttgagtaagataaaacaagctggatgagtactaattttcagtagggtagtctttttgcaaaatagtatgtaccaaaaatggtaccattttgtaccattacattgccattttctctaataatgacatccctaggctatcctaaggctgtgtcttagtctgcttgggttgacatatgaaataccatagactgggtggcttacacaacagaaatttattttctcacagttttggaggctggaagtctgagatcagggtgccagcatggttgagttctggtgagggcactctttgtggtgtgctgacagccaccttctcactgtgtgttcacacagcctcattgcatgtggtgcctggaatgagagcatgcacacacccttgcacacgctctctggtgtctcttctcataaggacactgattccatcatggggtcccaccttcatgacctcatctaactctaattacctcctagtggccccacctccaaataccatcacacaggggcttatggaatcaacatatgaatttgggaggggagagcacacaaatattcagtccataacaggttgcttaaaatattttagaactctgaaatcatttggagtattatttttggaataacaaaactgaactggttagtaatcaacctcagacaaaactaaagtctggaccctaattcaacaaaattataaaaggaattggaattgtcttttgaatttatgttacaacctgcaaatattgctgctcttgggttctgtctgtaacttagaaagcattttgttgactgaattgttagggttgctggttgatctcggattgtcctcctaactctttcctttgatgtctgtttcctttctcaaagcaggagcaaccatcagggtaacaggtatctgacaatttatcaatcttacatgtgttttcatccgtctcaacacattagatgtatgaatctctgcttcatacatctaaagtttcacccatttttaaaaccacctgtctccattaataaattctatcataccataaaacctgctttttctttttcttagtattttggattttaggaaccatgtagttgttcttgctaatgctttaccactttttgcttcatttttttatgaaaattaacaaaactaaaamgtgtaacttcaagaaagtaagatttaggtatatgaaggcctttttggcaaaaccagatcggttcttggttttaacaatggcatttatgtaattacataaacacaaaattcagtatgttttttaggaaaaaatatttgggggaaatattttttcaaatggttttagtagcaagattgttattggtaaggaagaattgatggtttagaaagatgaaagttaccagtataacaagattatctaaaggtccttccaacacctttctctgtaaaaatagcaccaattttaatattgtcatcacaaatcctgcttagattacaaattaattctaatgtgatgaatggtgatgtggttgtcattgtaatttcaagtctgggaaaaatgatcctgattctatcaaattaacttattttgaaataaaaattttcttatatatgcawataaaggtgtttaaatgtatagcactgatgcagcaggtgacttctgttctaagctggcagagcacaaaattctcctttcctataatgtctgtgttgcagacgattctatctgccataggagaattttgtctcagacagaagtatttcattttgtattaactataaatagtccagagatttttggtaatatagagttaattttataatatctatataaatttccttttaagtacatttccacatataggtctacttacctaagacatttagagtacagtttaaagtctgtgacatgttttctctttagttttgtacaaatttatcacactaagtttgaagaaaaatatactgtttcaaccaattataaagcatattctaggatagttgaataaaacagatacttgaaagttattcacttaagtcatccatttccttttacaagtgaacatccttccatattcttaagcagtaactaagtgtttcatagtatgcagttacattttattgagactgctgctgtttttttccaatatatttcatgaaagtatagttatgttgctttaacaactatccaaattccttttgggcagtgctcattttattacattgccagtcttgaactgaatttttttttgccctatcgtatccaaccctgaagttttcttaagttagcataagtgtccaagtcatctaccctagttttaagaattatatacatttttttcaaaattaataatgtatgcctgataagctaatttgcttatgaggcaagaatcatagttcttttccttcatccgatcatttgtctttgctcagtcccttggctgtgctccactccaaccaccttctttatggagtagggaccaagggatttagggcaggagtgaaggaattccaagcactcttcctactgataacagttcacagccaactctgtcacatagaagggaccaggcaccactctaggcacatcattgtggttgtagacttcataaaccaaatagaaaatggaactttttttcctctggttttaagcaatggttgcatttggttactaatagtgtatctgttttggaatatttttacaagacaggagggtcaatttttttatggaaagttgtcacattactcagtttttgttttttgttttttgaggcggagttttgctcttgcccaagctggagtgcggtggtgcgatctcagctcactgcaacctctgcctcccaggttcaagcaattctccttcctcagcctcctgagtagctgggattataggcgcgcaccaccatgcccagctaattttttgtatttttagtagagacaggtttcattatgttggccaggctggtctggaactcctgacctcaggtgatccacctgcctcagccttacaaagtgcagggattataggcttgagccaccgcgcccagcctcacattactcagtttattcaacaaaggagagcttacattaaaagtcagctgtgccgggcatggtggctcacgcctgtaatcctgacactttgggaggctaaggtgggcagattgcctgcactcaggagtttgtgaccagcctgggcaacatagtgaaaccccatctgtactaaaatacaaaaaattagctagacctggtggcacacgcctgtagtcccagctactcaagaggctgaggcacaagaatcacttgaacccgggaggtggaggttgcagtgagccaaaatcgtgccattgcactccagcctgggtgacagcacaagacttggtctccaaaaaaaaaaaaaagagggggtgggcaaagaactctcaaaatttatttttccaagtagaagacagaaagatggagtcttcgtcttaggaataaaatatgctaatagaattaattttatctataaaattgaatttccatagtaacattaattttagaaaacacacttaaaagaacaatgaaaccacatcatcatcatagatgggtgttagaattttatttatatagatttagcataagttataagtatggatttcttaagttcatgctgaaatgtgatagaactgggcatgaacaaatttgttaattctgtacaattctccttcttaccatttcaaaacttgcatgaatgaaataagctctttgattttgagggatttaaaaatggatttaattagaaaggatttatttagaaagaagtttttaaagactgtaggtgtttcatgttatttaaaccaccggagtaacaaactacacaaagctactttttagtttctaaatttacatgcttgcccctaaaagggaagaataattgagacaggaagaatagggggtattaagagtaaatataaactgatttttcagtgctccctttcttttgcaggtaaaaacaaatggaatctctgatggcaaaagagaatcaccattaaagattgacccatttgaagatctgtcatttaatctgcttgctgtatcaaaggctcagctatctgttcaaacgtcacctgttcccaccccagacccaaagaggttgattcagttgccttctgcaacgcaaagtaatgttttgagttctgtaagttgcatgccaacaatgcctccaattccagctcggagtcaatcccaggaaaatatgcgaagttctccaaacccatttattactggcttgaccaggacaaatcctttcagtgacaggactgctgctcctggaaacccatttagagccaagtctgaagaatcagaggcaacttcatggttctccaaagaagagcccgttactatcagtcctttcccttctctgcagcctcttggtcataacaaaagcagggcttcatcttcacttgatggctttaaggacagttttgatctacagggccagtctacattaaaaattagcaacccgaaaggatgggtaaccttcgaggaagaagaggattttggtgtgaaagggaagtcaaagtcagcttgttcagacttactgggtaatcagccaagttcattttctggctccaacctgacattgaatgatgactggaataaaggkacaaatgtctccttctgtgtgttgccgtcaagaagacctcctccacctcctgtccctctgctccygcccggcaccagccctccagtagatcctttcacgaccttggcctctaaggcttcacccacactggactttacagaaagataacgccatgcaatagaaaacagtgggtacttgcttttggcaggatagagctaagagaattgggcattagtatttcattatgtgcaataagtcattgtaagtgcactgatatcttcacaaaacaccactatttgatgtgtacagagttggactatgtgtatattggaaataaggaaaaacccttctcattgttaactggagttttgatgtatttctctttggatgaataggagacagtagtagccataaaaagtacttatactttagaaaacagtccttattcagaaacttttcggtcagtcttctgaagaatctcaaaaagcccacccaactttcagctgacatttccaccagccctctcatacttgttaacaattggtatctttgagtatttaccaaagagctgccaaggttacagtgaacagagttttgaaaggcattgctttaaaggaaaaaagtataggtatgtgtacatatataatacatacaaacacatgtacttctgtatacatttacatatttttacaattcatactttaatttctaggctataactcagaccaaattatacctaaaagttccaacaaagtccctttttcaatatcacattaccaaaaagatggctgcaaatgtaatttggacctttcattaattttgttttcaaaactagaataatctcaccacagaatcagaattttctaccgttccacacccaaccccttcaaatacacacaaccttgttacttttcactccagcaccttcatacgcttttctccaggaggaggttcttgcagctggaaacagcctattttgtggtcactgtcaagtggatggatattctagcgctcccaaaaaagcactatggccttatatgcagggaaggcacataccaccaagttcaatgagaaatattagagctaaccgtactctcttctctgcgtacgttcgagtatacgttgcccatatccctcccatattttctttttgctgcttttgctctggaactttgcttttagcagggaaagcagctgtcccctgagtgctttgaattgggaatatacccagtgtgtgttctcccccctcttacgaggctacataacacatctatgatgctgctttaagtttttagaggctatacctcaaagtagctgcggattttgtctcctgcactgccaatatgcaactgatcccgcttttattaattttttgaagaagtacacagaatttttacagaatgtagtattttgatatcattaagtaaaccaatcagaaaactccttgagcaatagttgtttctttgtcagtttcagttacaatcatctttacccattaagacttacattaacattccttttatataaagagttgtatatgtccacctaaattcctatgtccacacttaacctttaaagatgtacattgagggaatatcaaaaaatagcgttcatggctacgaatatgtagaatgttaaaagcacagcaaactgcactgcacttataaagcaaatctattagaaaaaaagcatttttctaaatgctcaaatgttatcaaaatactatatttatagaagtaatcttctctgttaacagccaagatttgctgttagaaataactcttgtgagttttatattgtgctttttggaggttctaatcatttcagcagtagcgtcttaaacagcagtattactataagcagttgcttcaaaatgtgaattaacttgttgaaactgtggctttaacatccatgtgactagtgtatatggtatttgctctccattagcaaaataattcattgttaggtaaacttcaytagtgcaaattgcagatctgtgagcaatgtttcctattgaatataaactactgtctaaaatatacatatcagcagcccagcctttatcaggaaaattatacttggcaagttgctgaaaatgcacaaagttatgaaagttaaaggtatgctgcaaataactagccattattctatgtattattaaatatttactagttctgttaaaagcagagcagaagttagacactaaggatctctttgtgaactctgtgttctctatattagattgctgtttatatgtaagaattttattgcttatgtggcatacaatatttataactataaactttatagaagtacagtattaaagtcagtggtacacagacattctgtacatatcctgtgaaacgtgctgtcatatgaaataaatatatctgtctttaccatgctgacttctttgttagaaagggaagaatttttctcagccattttccttgtactttacatacacaagtttggtgacgttcaaacaaaataagcttaacccttattgccgaatcagatattttaattcaagaccttattttcatttctccagatagtgcttcctctaaaactaagaagattttccgagattactaatcattattaaaaagtccatgcccagcctggcccacatggtgaaaccccatctctactaaaaatatgaaaaaaaaattagttgggcgtggtggtgcaggcctgtaatcccagctactggggaggctgaggcaggagaatcactagaacctgggagggagaggttgcagtgagccgagattgtgccattgcactccagcctgggcgagaagagcgaaactctgtttcaaaaaaaaaaaaaagtccatgcacttattccataagagaggccctcacgcaaaaacatgctgacttgaaaataatacaagaaatatgaatgatttttcttacccaaagtagaaggaacaagtggggggcaaagaggaattgggacaaaaatagccartcagaaaaagggactgcctaaagagacccaaattaaaaggccagggccgggcgtggtggctcacgcctgtaatcccagcgctttgggaggccgagatgggtggatcatgaggtcaggagttcgagaccagcctgaccaacatggtgaaaccctgtctctactaaaaatacaaaaattagacgggcgtggtggcaggcgtctgtaatcccaactactcaggaggctgaggcaggagaatagcttgaatttgggaggcagaggttgcagtgagccgagatcacgccattgcacttcatcctgggggacagagcaagactgtctcaaaaaaaagaaaaagaggccaaggctaggcaaggtgcaatggctcatgcctatactcccagcattttgggaggctaaggcaggaggattgattgagcccaggagttcgacactagcctggacaacatagactttatctctggtaaaaatcaaaaaaattagctgggcatggtggtgcgtccctgtagtcccagctactcagaagtttgaggtggggcatcacttgagcccaggagatcgaggctgcagtgagtgagctatgatcacacaaccacactccagcctgggcatcggaccaagaccctatctcaccaaaaaaaaaaaaaaaaaaaaaaaagccaaggctagtattgccttttttcagacctgtctgattgatatttgaaattcttactttaattcttaatgttcattaaccttttattaagaagttacagaattattggcttacaaaaaccattttaagatacttgtaggttaatatggagttataagaaataatacagagaccccgtgtacccctttacccacttgcccccatgggtaacagcttgcaaaactacagtaccagagcatgaccgagacatgaacaatacagagcatttccatcaccataaggagccctcatgttgcccttttcccactgccctttcatcccatctccttttcccctgcccttaacctctggcaaccactaatctgatctccgcatgtataattttctcacttcaagaatgttacataaattgaatcatggtatgtaaccttttggggttggcttttttcactcagcataattctctggagattcatctagtttgcatgtactctgttcctttttattgctgaatagtattccatggtatggatgtaccaccgtttatttaaccattcatccactgaaggacacttgggttgtttccagtttggtggctattacaaataaagctgctatgaagataagttttcatgtctctgggataaatgcccaggagtgcaattgcttggttatgtggtaatggcatgcttcagttttttaaaaactgaaactcttccggagtgcctacccttttacattcccatcagcaatgcatgagtaatccagcttctccacatccttttcctcatttggtggtgtcactattttttattttagccattatagtagtggatgtttcattgtagtttcaatttgcatttccctaacagctaatgataaaaatcttttgtttttgttttgttttctgagacagagtcttgctctgtcaaccaggctggagtacagtggcacaatcttggttcactgcaacctccgcctccagggttccgacgattctcctgcctcagtctcccaagtagtggagcttataggcgcctgccaccatgcccagctaactttttgtgtttttaatagagatgggtttcaccattttggccaggctggtctcgaactcctgaccttaggtgatccacccacctcggcctcccaaagtgttgggattataggcgtgagctactgtgcccagcctgaagatcttttcaagtgcttatttgccatcttatattcagtgaagtgtctgtggtattttacccatcatctaaatggattttgtttttacagttgagggctatgtacatattccagattctactcatctttcattggatatatggtttgcagatacttctccagtctgtagcttagtcttcatcgtttttacatgacccacagccagattctgagctctgcaggaccagaaactatagcaagggtgataggcatgtaataarcaaactcacaagaaactgatgtataaattaaaacaccaatttattaatgttagaaaaatgtctgactgtatcaaggattaccaattatatggagaggggggaactcttaacatggttggtgaaagggtaaactggcacatcagctcaagaaaacaatttaacaatgttaggtaaaattcatataccctatcaataagaaatccgacttctagagaaactaggacctgtggagcatgagaggcattgtttgtaatggtgaaaaccacaaataaacatcaacaggggagtggagtggcatagtcatacagtggaatcgtagacagcagtgaaaataagtgagtgaaaagaacatacgagaaaacctcacggtgtagccataaagcaagatacaaaatagtaagacaccatttatataacatttaaaaggccaggcgcggtggcttatgcctgtaatcctagtactttgggaggccaaggcgggcggatcacgaggtcaggagttcgaggccaacatagtgaaactccatctctactaaaaatacaaaaaaatcagctgggcttggtggcgggcgcctgtaatgccagccacttgggaagctgaggcaaggagaatcgcttgaacctgagaggcggaggttgcagtgagccgaggtygcaccactgcactccagcctgggtgacagtgtgagactccgtctcaataaataaataaataaaataaaaaaatttaaaatacacgaggatatatttttaggggtacatacacgttaatggtataaaaaacatgcaatggaaatgataaacaccaaatttagaatagcaatttacctctggagaagaagacgagaatgggattagaaagaggtatgtgggggctttaactgtatctgtagtgtattaggacaaaaaaaaagtagtcaatagagttaaattttctctttttctttctggctgcctgacatccagcagccatcatgaatgactcataaattatccagaccaggacgttaatcactgatgaattgcttaacagatacaaatggtcataagatgctcttcatcctagaacagaaacagcacctaaaacactaagagaaaaccagccaaaactcacaagaccacacaccaggtgtcatcttggtcttcagattcagaagtcacttgggtgcctgagggcaagacaacaggctttgcatgatttatgattgctgaaaccacaccaagaaagagctaaccacagatatttaagacaagacctgtatgagaagaaaaggaccttaagaaaatgctgaacagggccaggtggtggctcacgcctataattccagcactttgggaggctgaagcgggcggatcacctgaggtaacgagaccagcctggccaacatggcaaaaccccgtctctactaaaaatacaaaaattagctgggcgtggtggcaggcgcctgtaatcccagctactcaggaagctgaggcaggagaattgcttgaacccaggaggcagcagttgcaatgagccactgcattccagcctgggcgacaagagtgagactctgtctcaaaaaaagagaaaaaagaaaaaaaagaaaatgctgaacagaatgcagttataataaagtcatgaggacaacgaataccagggctgacaaatttaaagatactgcacaggcttgatctgtggtgattttaataatcactagatgattactaacctacatatttaaacaaaactggatggtcagtacatgggttcttatgcaacgattttctacatttctcaatattattaaaaattatattgagaccctgtaaaatatgtaagtttgtggacatgtagctctctatctggaaggctatactgtaaaattttaagaagttgatgggtacagaattggattcaagagaaagggcatgaccttatggcgggcagtcaggagctaagaaaacatagtagcccatttctccttccggcgagatagacatttgccaatcagaccagtactgcctgttccagcgtttgggtgatccctgtctcaacagtactagaaataataacacatcttccccctaaggctccatcccccttctatccactatcagttatcagtcttcctatgaagccgggattggctttgggcatttccaggccttcagtcatacactttctccccacaggcccccttccccaatacacactccccagtgatattattcggaatatccacaagagatgttatttttgatgtcacagacggggtccaccctttgatattttttgtcatatcttagggagatattacttcaaatatcacagtgggtgtacacccactgtgatgttattcgcaataccctagggagacataacttttaataccacagtaggtgtacacactatttgtgtatatctgctgtgatattatccctaatatcctaaaaataaatagaactcctaatatcacagttggtgtacacactgtgatattattcataatattccagcgggatgttactcctcaggtcacagggggttaataccctgggacagtattcctcatattccagggcggtgatactcctgaagtcacagggtgtgtaccccctgcaatattattcatcatattctagggggatgttactcctaatgtcacagggatgtaccccctgtgatattattcatagtatatgagagggatattattactaatgtcacaatgcgtgtacaccttgtgatattatttgtaatatcctaatgtcacagggggtgtgttccctgtgatattattcctaatatcctagacggatgttgcttctaacatcacagggtgtgtacaccttgtcatatcattcataatatcctaaaactacgttattcctcatgtcacagagggtgttcaccctgtgatattattcgtaatagttttgtgggatgttactcccaatgtcacatggggtgtacacagagtcacacagtgatatgacttgtaatattctatagaaatgttactcgtgaatcacaggggctgtacctcctgtgatattattcgtaatattctaggggaatgttactacaattgtgacacgtggtgtacaccctgtgatattactcgtcatatcatagcgggctgttactactaatgtcacaatgcgtgtacaccctctgatattattcgttatatcctcgggggatgttactcctaatgtcacatggggtgtactccctgtgatattcttgttaatatcctagggggatgttacttttaatgtcaccgggggtgtatatcatgcgtattcaacgcctgtgatactattcc

SEQ ID NO: 95945 - DNA, 13127 bp, Homo sapiens
gtgagaacatgtggtgtttggttttttgtccttacgatggtttgctgagaatgatggtttccagcttcatccacgtccctacaaaggacatgaactcatcattttttatggctgcatagtattccatggtgcatatgtgccacattttcgtaatctagtctatgactgttggacatttgggtcggttccaagtctttgctattgtgaatagtgccacaataaacatacatgtgcatgtgtctttatagcagcatgatttataatcctttaggtatatacccagtaatgggatggctgggtcaaatggtatttctagttctagatccctgaggaattgccacactgtcttccacaatggttgaactagtttacagtcccaccaacagtgtaaaagtgttcctatttctccacatcctctccagcacctgttgtttcctgactttttaatgatcgccattttaactggtgtgagatggtatctcattgtggttttgatttgcatttctctgatggccagtgatgatgggcattttttcatgtgtctgttggctgcataaatgtcttcttttgagaagtgtctgttcatagccttcgcccacttgttgatggggttktttgtttttttcttataaatttgtttgagttctttgtagattctggatatgagccctttgtcagatgagtagatagcaaaaattttctcccattctgtaggttgcccgttcagtctgatggtagtttcttttgctgtgcagaagctctttagttgaattagatcccatttgtcaattttggctttttgttgccattgcttttggtgtttcagacatgaagtccttgcccatgcctatgtcctgaatggtattgcctaggttttcttctagggtttttatggttttaggtctaacatttaagtctttaatccatcttgaattgatttttgtataaggtgtaaggaagggatccagtttcagctttctagatatggctagccagttttccctgcaccatttgttaaatagggaatcctttccccattgcttgtttttctcaggtttgtcgaagatcagatagttgtagatgtgtggtattatttctgagggctctgttctgttgcattggtctatatctctgttttggtagcagtaccatgctgttttggttaccgtagccttgtagtatagtttgaagtcaggtagtgtgatttcttttggcttaggattgacttggcaatgcaggctcttttttgttttcatatgaacttttaaagtagttttttccaattctgtgaagaaagtcattggtagcttgatggggatggcattgaatctataaattaccttgggcagtatggccattttcacgatattgattcttcctatccatgagcatggaatgttcttccatttgtttgtgtactcttttatttcattgagcagtggtttgtagttctccttgaagaggtccttcacatcccttgtaagttggattcctaagtattttattctctttgaagcaattgtgaatgggagttcactcatgatttggctctctgtttgtctgttattggtgtataagaatgcttgtgatttttgcacgttgattttgtatcctgagactttgctgaagttgcttatcagcttaaggagattttgggctgagacaatggggttttctagatatacaatcatgtcatctgcaaacaggtacactttgacttcctcttttcctaattgaataccctttatttctttctcctgcctgattgccctggccataacttccaacactatgttgaataggagtggtgagagaggacatccctgtcttgtgccagttttcaaagagaatgcatccagtttttgaccattcagtatgacattggctgtgggtttgtcataaatagctcctattattttgagatatgtcccatcaacatttttaaagaaaataattttcaacccagaatttcatatccagccaaactaagcttcatamgtgaaggaggaataaaatcctttacagacaaacaaatgctgagagattttgtcaccaccaggcctgccctaaaagagctccagaaggaaacactaaacatagaaaggaacaaccggtaccagccactgcaaaaacatgccaagttgtaaagaacatcaaggctaggaagaaactgcatcaactaacaagcaaaataaccagctaacatcataatgacaggatcaaattcacacataacaatattaaccttaaatgtaaatgggctaaatactccacttaaaagacacagactggcaaattggataaagagtcaagacccatcagtgtgctgtattcaggaaacccatctcacgtgcagagacacacataggctcaaaataaagggatggaggaagatctaccaaggaaatggaaaacaaaaaaggcaggggttgcaatcctagtctctgataaaacagactttaaaccaacaaagatcaaaagagacaaagaaggtcattacataatggtaaagggatcaattcaaaaagaagagctaactatcctaaatatatatgtacccaatacaggagcacccagattcataaagcaagtccttagagacctagaaagagacttagactcccacacaataataatgggagactttaacaccccactatcaacattagacagatcaatgagacagaaagttaacaaggatatccaggacctgaactcagctctgcaccaagtggacctaatagacatctatggaactctccaccccaaatcaacagaatatacattcttctcagcaccacatcacacttattccaaaattgaccacatagttggaagtaaagcgctcctcagcaaatgtaaaagaacagaaattataacaaactgtctctcagaccacagtgcaatcaaactagaaatcagcattaagaaactcactcaaaactacgcaactacatggaaactgaacaacctgctcctgaatgactactgggtacataacaaaatgaaggcagaaataaagatgttctttgaaaccaatgagaacaaagacacaacataccagaatctctgggacacatttaaagcagtgtggagagggaaatttatagcactaaatgcccacaaaagacagcaggaaagatctaaaattaacaccctaacatcacaattaaaagaactagagaagcaagagcaaacacattcaaaagctagcagaaggcaagaaataactaagatcagagcagaactgaaggagatagagacacaaaaacccttcaaaaaatcaatgaatccaggagctggttttttgaaaagatcaacaaaattgatagactgctagcaagactaataaagaagaaatgagagaagaatcaaatagatgcaataaaaaatgataaaggggatatcaccaccaatcccacagaaatacaaactaccatcagagaatactataaacacctctatgcaaataaactagaaaatctagaagaaatggataaattcctcgacatatacactctcccaaggctaaaccaggaggaagttgaatctctgaatagaccaataacaggatctgaaattgaggcaataatttatagcttaccaaccaaaaaaagtccaggatcagatggattcacagccaaattctaccagaggtacaaggaggagctgttaccattccttctgaaactattccaatcaatagaaaaagagggaatccttcgtaactcattttatgaggccagcatcatcctgataccaaagcctggcagagacacaacaaaaaaagagaattttagaccaatatccctgatgaacatcgacgcaaaaatcctcaataaaatactggcaaaccgaatccagcagcacatcaaaaagcttatgcaccatgatcaagtgggcttcatccctgggatgcaaggctggttcaacatacgcatgtcaataaacgtaatccaatatataaacagaaccaaagacaaaaaccacatgattatctcaatagatgcagaaaaggcctttgacaaaactcaacagcccttcatgctaaaaactctcaataaattagtttggatactttctgttgctgttgttgagacagggcctcactaggtgcccaggctgatctcaaacttccagcctcaattgatcctcctgcctctgcctcccaaaacgttgggattacaggtgtgaacaactgtgcttgaccttaaaattttttatagatatttcattgttattgatttcccatttaatccccttgtggtcaagttctatattatttcctatttgaaatttattaagagttatttaacagcccataaaattatagatctttgtgattgtttcatgcccatgaatttggcctccaccaggtcaaatgatttacagtgtaatacatctcttctatattataatttatctttgcctatttattatattaattatataataggggtattaaattctataacaataatcttgaatttgtctaatttttttcttagtctgtcaaatattgctttatgtatcttaaaggtctgttattacgtgcttaccttttactggctcttttatctctactaactttggtctgtccacatcctgacatcctttaaggaagtgaaaaataaaaagcttctattttgctttaggcacttttcttttgggtttttctgtaatatgtaatcatatctaatgctaaatgatacaaatactatgacaaaaaagtacaagacaccgtgaacatgtgtgtaacggggatctaaccttgttattggagtcagagttttcctaggtcatacatttaaggtaaagtgggtattagctctagtcagaggttgtgaaagagtattccaagagggagaaagttatgtgcaaaagccctgagtcaagggaagcttggctctttggagaaacagaaggaggtcctgattagcttccctgtatactaaaagcagaagtggtaaaggaatgataggcattctagatcacactttcattaggcaagaagaaagatttacaatgttctaagcttctagatgtggaggctttggagcttcctgagagtactagaaatattaagagattttaagatgagaaatgccatcatctgacatgcaattttaaaagatactcaaagtactgtgtgagaataaattgtaggaggaaataaatggatgcagagagatcagttaaggggtgattgaggccaggcacagttactcacgcctataatcccagcactttgggaggccaaggcaggcgaattacgaagtcaagagttcgagaccagcctgaccaacatggtgaaaccccatctctactaaaaatacaaaaattagccgggcatggtggtgagtgcctgtaatcccagctactcaagaggctgagacaggagaatcacttgaacctgggaggcggaggtcgcagtgagccaagatcatgccactgcactccagtctgggtgacagagcaagactgtctcaaaaaaaaaaaaaaaaaaaaatgaggtgattgaagtttgaagtgtttaaggtgggagagaaatgatggaattttcggttaaattatatgcagtagagctgagggaagtggaaaaaatcaagatatattttgcaagcagaattaataggaggtggtcatgaattggatgtgtgttggaagggagaatattataaaatgtcattgatcacttttggcatgtgtggaaatagggaaatatgaaagaagaacagattgtgggaggsggggagataggtttttaacatgttgattttcaagatgcctgagttacattaaagagaaccacacaagctatgagatacatgagctggaaagaagatctaggttgaacacatatatctgagagttatgaatgcagatggtaaccaacgctatgagagtgcatgaaataatttaggcagggctctctgctcctcctgtttgacagacagctgcatcttctcttgcattgccaaccacatccctgagacaccatggggaaagtgaaggttggagtcaatggatttggttgtattgggcgcctggtcatcaggrctgcttgtaattctggtaaagtagatattatcgccatcaatgacccattcattgacctcagctacatggtctacatgttccagtatgatcccacccatggtaaattccatggcaccrtcaaggctgagaacgggaagcttgtcatcaatggaaatcccatcactatcttccaggagccagatccctccaaaatcaagtggggtgatgctggcactgagtatgtcatggagtccactggcatcttcaccaccatggagaatgctggggctcacttgcagtggggagccaaaagggtcatcatctctgccccctctgctgayccccccatgttcacgatgggtgtgaaccatgagaagtaygacaacagcctcaagatcatcagcaatgccacctgaaccaccaactgcctagcgcccctggccaaagtcatcactgacaactttggtatcgtggaaggactcatgaccacagtccacgccatcactgccacccagaagactgtgaatggmccctccaggaaactgtggcgtgacagccacagggctctccagaacatcatccctgccactactgggctgccaaggctgtgaggaaggtcatccctgagctgaatggtaagctcactggcatggccctccgtgtccccactgccaacgtgtcagtggtggacctcacctaccatctggaaaaacctgccaaatatgatgacatcaagaaggtggtgaagcaggcatcagagggccccctcaaaggcatcctgggctacactgggcaccaggtggtctcctccgacttcaacagtgacacccactcttccaccttcaatgctggggctggcactgccctcaacgaccactttgtcaagctcatttcctggtatgacaatgaatttggctacaacaacagggtggtggacctcatggcccacatggcctccaaggagtaagacccctggaccaccagcctcagcgagagcacaggaggaagaaagaggccctcactgttggggagtccctggcacactcattccccaccacactgaatcttccctcctcacacattccatgcacaccccttgaagagggaggggcctagggagccccatgttgtcgtgtaccatcaataaagtcccctgtgctcagccaaaaataataacaatcataatagtttaggcagaaaggataacataagtaaaaaaaaaaacttgtaaagcagccagaaataattgaattttaacattcacaggccacaaaaagaggagaaaccgacaaggatgagaaagagggaacagatatataagtgatgttacagaagtcaatgttttccctcagttgttattcacatttgcttttgtgtatagtgtgtatggattcttcaggttcaagacagtttctccaagatcagaggggggtcatttatctttgtatggttcacaggcaggtgagtcctactgcaaagttgctgagtccataaaattatggttcatttactggaaagtttttaagcatttattcacatataaccattttccttaagaagcattcctgggtcatcgggatggctggtaggagatagcttctggaatcaactaaatgcttgcctagaaccaagtatttttctgatgtcttgggtttttaaaagtaagtccttgaaatacagctggtttctttcctctatcatggtgagtttatttcccctcaggctctttttatcttctcctaccctgaaaccagattgctcttcagtaataggaatatgagagcagggtgaaaaggcattccccattaacacttggaatttattaccagatttcttggaccaaagtttgttgatatccatgaagacagatatgttagagtagtaagtgaaggaaatcacaactcagacaatactcaattaagagtgacaaaacttttcttggtatagccaagccaggaaaaacgggcagaaccaccatggtttggccctcttatcactatatgcttgaatgtatgactaaaagtgtgggatatggccttgaaacatggctatgtgaagagagactgggctaatggctttgaccggtaaagaatacagattgggtgtacatattgggtcacaccaaaacaatgaatatccaatgtaagtaatttgtagttgtcattcttaggaaaggagtagcatatgtaccttagaaatatgcatcaggggttgcaaagctgagaaggcattctgatatatgattctggtggaggtggtggcgggtgaacctaacttattcccagcattcaatatgcctagttgaaaatcattataataaatttagtaagagacaaatagcaaactgggaaaatatatttgcaacatatgcagacaaactgttaataactttattataagaagatgtcttataaatcaataagaaaaagtagacacaactaatggaaaatgtctaaagaattcaaacaggcaattcctgaaagaaggctaaaattgcaataaacatgataatctgtcaagcaacaatgaaatatcaatctttacctctcagactggtaatgattacaaagcatacattcagtaaagagaatggggtggggaaatgagcaccttttcataaattttggtggaattgtgaattggtacatttctggaggttaagtgggcatgatgtgtcaaaatttgtaaacttaaaaccctttgaccaggtacagtggctcacacctgtactcccagcactttgggaggccaaggcaggcagatcacatgacaccaggagtttgagactagcctacctaacatggtgaaaccctgtctctaataaaaatacaaaaattagctgggtgtgatggcacacacccgtaatcccacctactcgggaggctggggcatgagaatcccttgaacccgagaggcagaggttgcagtgagccgagactgggccactgcactccagcttgggcgagacagtgggatgccgtctcaaaacaaaaacaaccacctctccacccctaaaaaaagtcccaaacctttgacccagaaatttcccttgtaaatatttatgctaagagttattaaacaagtgcacaaaattgcatattgtggatactaatagcccaattgatacagtagttcaaatttgaaacaatctaaatgctaatctatagggtaaatggctacataaatgagtgtgtatccatataatggaatattaagtacttggtattacgttgaaaagtattcctgatgtattaaatttttaaaaaagcagattatagagtagcattattttaaaaaaccatctgtgttaagaaaaaaaggcttatataggcatgtaaaatttatttagaatggkagacaaaattataggggggattttcattttgtttctttttttgttattttatctgtgctaatgtattatcaggataatctatgtccatttaaataaaataaaaataattcatacaagctaacaaaaaggtaaacatctttaaaagtttgaatgaaacatatctcgtggaaaacattgtaattccaagttagtcaagcacctgtgttatatgatggctataacgtgggggaggagtaatgagcagaataaaacaaaagactggaactaatagtagttagtgttatcaacaattttctccattttctctaagtagcatccatgtagcaaaatttacttctagaagattcaaagtctttctctacaactctttaattaggttatttctttttactcctgactcaacaggcttccaggttcacttttctttgaaagcagaggttgctgacaatattaccaacatggaaaggtggactaggaaaaaaaagatggatagcttgatttatgttgctaaccttgtatggactgtaggacatttaaaaatattttgtactgggtgtggtggctcactcctgtaatcccagtggttttgaaggccaaggcaggaggattgcttgcaggcaggaatttgagaccagcctgggcaacacagccagtcctccttctctatcagctatttaggaggctgaggcaggaggatgaggcaggaggatagctcgagcccaggaattcgatgttgcactaacctatgattacaccactgcaatccagcctagctgatagagtgagaccctgtttctaaaaagaaaaaaatattgctattttatacaaaaaaatttatgataaaatgtcctctcctttaggttttgtaggtaactgtatcctatttgcatttgatccacatgaaagaactctgttctcaaagtttgcagatgctgttgttgcttgtatttgcttttactctgttatgatgctaccaagattttggttagatggctgttattctaggtggcagacatgcgggtttccctccctttgcacaactaaacaaggtaggctttggttctgggcagtcactggtatttacaaaccacttattcatgccaggtaatagggttccagattgggtaagttttatgttctggttcttggtatatgtttagacagcttataaatgtaaataaacattctactcttacaggtggagtgtggacacggtgatatccgtgtgaccgccattcccagctgaaggttatctcatctatgattttcttatacgtgactggcrccccctagtgaatagggacttaagttgacctccacggtagaagaaataccagggaaatacctgaagctgttttaacaatttctccttgtattaagtattatgctgcagttttgcgtgtgtgaatggaagtatgggtagagatctgttctccctaaaaactccaggattccacaatatagaaatagtaatcaaatttttaggtgaagctcgaactaatccgaactttgttagatcatcactgtaaatgaatgggtatttatccactccctaaatgaagagacttgactggatttcttttttttatatagctactagaatctgttacacataatttaggattgagacttgagaaattgtcattccaatccagaaaactttagatttgcaaatatatttgacaaattaataaattaacattttatttggttaatttcaagaatagggcatttaaagaagtctgtgtttgctttagttcggcaataaagttcctgccactcacaataatccttattattctctgaaagacatgttatatttttgtcatcataaatatttattaattactgtttatagcactgggttaggtactcatcaagcaaccaaaaataattcttaccatctaggatgcttccaatataaaatatagacaatatataaccaggtcaattgggaaatagatcatttcagtatgataaaagatagtattcacattaacagtgtgaaagggcaggaacaataagacacttgactcactggtctttaaaatgtagcatccaaaatgagcaagtggagaaaaggttaaacaagtaggtgacacatttaaaaaacaagtagatgaaaggactattctcaaaaatcttgttttatgtgagaaaccatcaaattatgaattccaagtactgtattttttttacttttcaagggtaggctctcctataccttatctaaacaatttttcaaaatagccacaattactttgttttcctctctacactaaattgccctttgcctcttgagcgattatctttttcagattcacctcaacttcttcaggttcaagcggacttcacctgtaagcccctctcggttctccctcttctctgaactactaatggcctaatttagcacaattatattgctttgttcattccatgtatagtaaaagagtctacaaaacacatgcaagcattcatgcaattatatgttgatttgttcatgggtcgaccccaaagtctattctccatcgctgaagcatggaagacaaatacccttcacttcttcagaggcataacacatgcacttctcttgtcatggtgacaggcatgtgctggtggaggtcaaagaaacaggaacacaagtgaaatcgaggtgagtgtcaggtaaggaccaaagcaccacgcctacctcatctttgcccacagaacacccattcttcccgtgtcctgtttcccaggacgtatccggggcggataagaaatcacccgtggggaggcggtgaactcctccgcaggggccgatgcccgggacaggggcggggaaggctaatgaggcgacttgtgcggggaggggccaaggaggagcccaggtgtcccgctcccgctcgacggcgcgcgcctgcgcgagcccagttggcgtcgcacccttgagcgcagcatccctacgccagcgagtcccaatactagggagggagggagggaggaggggcggccggccccccgcccccgcgcgcggccacgtgacgccggctgaggagattggaggggcggctgcgcgaggctgcagactggtgcagcgcactgtgctggcggctgggcctcctccacctcctcgtctttctcccgggaaccttgacgacgccttccgcttggccctgccttctgccgcatccccgccgccgcggcgccttgaggagcaggagaagacgcagccgggccgccgccgttagaggggttcccggccgccgctcgccccgtcggccgccaccgcctccggggtcagccctctctctgggtctccgctttctcctgccgccagcgcccgctcatcgccgcgatggggctcctggactcggagccgggtagtgtcctaaacgtagtgtccacggcactcaacgacacggtagagttctaccgctggacctggtccatcgcaggtaaagccgctgacttccccatcctcgctcggtcccccgcggggggtcaccggcccctggtctcgcagctcccgggcccggccccacaggcccccgcgccctgcggctttcggatgctgcggatcagcggaggggccggcgcgggcactgcggttgagcactggttaatctgatccgaatgttaaggcctcccctcccccgacactcgcagggttttcttctgagctccctccatctctcatcagctctcggatgcgggagctgacatatcagatggagcctgtgcagccaggagc

SEQ ID NO: 95946 - DNA, 17557 bp, Homo sapiens
  misc_feature (1)...(17557): n = A,T,C or G
gagtgtcactggggttggttcttctgaggctgtcagggagaatctactccaggccctcccgcaggctctgggagtggctggctgcctttggcattccttggctgggagacacaaagccttgagccctgccttcctcttcacactgtgttttctctgtttgtgagtctgtgtccaaatttccctggagaaatacccatcatatgggttagggatcccccamtgacctcactgaaacttagtgtggagcctgtctccaaataaggtcacattctgaggtattggtggtgaggactttaacatgggagttttttgggaggaggccctcacccacagtagtagaacttgtgactttgtcaccaaaagaaatcacttattttcacatcgcaccgtagtagcagtggacatctccaaataccggcgaagctagtcctgcctgcaaagttaaggcagttttttttatcagatctagagctggaaatcattgttaaatgaggcgatgaggaagtgtgtatattattctggctcacttttaaaaatattttgatccatttatttcaacataattgatttcccctgtgattctgtatgttttgtattatacatgtaaaaacgttattcagaggagttcacaggcttcacccgactgtgttgaaaggacccatgatgtaaggatgtttgttgtggggggtgcttgtggctccttaactggctctggaaagagcctacttcccatagtgaaccctgtgaggtccaattctgttcctccccctggagctccaagagaaggtcattgtccttgtagcagcaggtgcccccccaagctgggttctcactgcaggtgccagcgggctctcagtaggtatgacctggatgtgagtggtgagccaggattgaggcactcagcaccttcgaccacacttcccactctccctggggttcaagtcaggctatggaaagtgtacaccctgtttgtcatataactggatgggtggtgggcagaacgcctctggcaaggtagaccttgaaggcaaaactgagttgaggtttgttaggacggaaataattactgctgggcatgcagcacttcccaaccgttctgtgaggcaggcagtgttattgccagtttggcacaagggcacaggtgtagaacacgtaagtgccctgggccgtgctacaccaccactgtgtttgagctgagatgtgaaccagggccttctgattccaaattcctcattcctttcatcctagcaggctgcctgcggttagcagaaggggactcctgtatctgctctgcagcttcttcagctgatttataatggaaaacagagtagatattgatttggcaattagtgaaatattatgagaatcatcatagcaaacttcacagtttgatcaaggatcctgccttcaatatctggccaactgatgtgtaaaagcagctgcaagaacttcagagctgacaaaaaaagcaaactccagactttatttcctggaatctgttttgtgagacactggcccatgaaatgctctcccagaaatagtcggatttgtggtcaaataaatttgggcaattctacagaacatgtgtctttttcagagatttatttttaattaaacttatttaaaaatattaacatggtacaatttgcatatagtgaagtgtgcaaatcttcgctacatggctcaatgagtttttacatatatttccacccatgtaatcaccaccgagatctagaatagaatgtattcgtctctccagaggttcctctgttcccttgcagtcaataattctccaccaaagataaacattctgctgacttccttcatcattgataagtttttcctggttttgaacttcatataaatggaatcatttcatgtctagctcttttcactcaacataacatctgtcagattaatacatcgcatgtcaatagtttgtagtttttatggctgtgtagcatttcattcattcattctgctgttgatggaaatttcttgactagagttgtgttatcaatttattgcctcttggctccaaattcaccctttttgcctggtctctggaaatgggtctgggccctctaaatattttccctttgcaatctggctcttgaagcttatcagtggagggtcctggaggggcattgcaggggaaacagtttttccttcctggttcagggacgctggtttggtagcccctgtggtgttacaggagtacttggcaagacagcagtttccccgggtacacccgctaggtgttttgtagcagagtgcatctgtgagacaactggtgaactgctttccttgcaacctagagggcagatttctggcaagttccagagggtggattccaaacatgttcctctaatgtggatctgcagtgatgtctctgccattcagtgggcatagctgtgcccttttagtggggtctagatctcagccctgggattgggggcattttctcagttgctcaatctcagccctargggcagtgaccattccttatatatggttgtttgtatattctttggaactgtcttgattttattactgttagtctctcattactccactcccttattatagtaaatgattctttgtatttgactttccctggtcaaggtactaagtggtttttctctcctgtttggatctagattgatacaataattttttgcaattatgagcaatgctgctgtgaacattcttgatcatgtcttagtggacataagcaataattgctgctgggtctgtgtgcaggaatgatttgctagatcatagcacatacgtttatctgtagcagaaactgccaaggtatatacagctttccaaagtgtgttaatttacatgcctgctagcaaggtaggagaaatacagttgcttcccaagtagctgggattacaggtgtgtgccaccactcctggctaattttttgtagagatagggttttgccatgttggccaggctagtcttgaactgctggcctcaagtgatctgcctgccttgggctcccaaagtgctaggattacagggatgagccaccatggtcgacttcatgataaaacttcagtggatgaggagctgcctcttatgatgaacaaagaaggtggtttcttgaaatggaatctactcctggtgaagatgctgtgaacattgttgaaatgacaagaaagaatttacagtgttacatagagttagttgatgaagcagtagcaggattcgagaggatcgattccaatttcaaaataagttcttctgtgggtaaaatgctatcaaatggcgtcgcatgctacagagaaatctatcatgaaaggaagagtcaattgatgtggcaaacttcattgttgtcgtattttaagaaattgtcacgaccaccccaaccttcaacaaccatgaccctgatcagtcaggagccatccacattgaggcgagaacctccagcagtaaaaagattatgattctctaaaggatcagatgaacattagcatttttttaagcaataaagtatttttacgtaagatatgtatgttattttttaggcataatgctattatgcatttaatagactccagtatattgtaaacataactttaaatgcactgggagataaaagtatttgctcttttatgatatttgctttattgcagtagtctgtaatggaaactacattatctcttgggtacacctgtatacagaaagaaatttatcatgaggaaatgctcatgcaatgatggaggctggaaagtcccaagatctgcagtcagcaagttggagacccatgagagtcgatggtgtggccccagtctgtgtttgaaggcctgagaaccaggagagccaaaagctggcaagctctggacccaggaagagctgatgtttcagttcaagtccgaaggcaggaaaagactgaaggcccagctccaggcagtcaggcaggagaactttccttttactcacgagagggtcagcattttgttctgttcaggctgtcaactgagtgacccagaaaagctggcacataacattcaccatcgtgctgcaagagctgcaaaaccctctctgcttctaacactgatgctcagcccacctccagtgggcagggagctgggtgccgggaggacttggggttgccagcccagtgtgggcctggacagttgctgagaatctccctccgccctgtgacttcttaattacttagagggtcaccctggttgctcacttcagctcacttgggagattctctctgcttgaggccaggggtaggtccaggtctgatggggtctgaagcttatacaattggggtggggggcattcctctttaaggaaaagaaaacagcagaggtgagtcgtcctgcagcttagcttcactagtctcgtggaaaatttgcctcctaaaatgtctttcctctgagaaagcccaggcctccaaaggcccagccaggctggcgtcagtctggggtcagctgcggggaggctccaggccatgtgtgacacgggagtttaccccatcccagtttccagtggagaagcatcgttctcgtccacccccgtcatgctcttttccaccttctccaggggaagggatattttcagtctgtacaacgaatccactgaaatgttaaggtgggcacagtggtctggggtcttcgaccttgtttatacgtggtgcctgttactggtcgggtctgtacaggcagtttccactggcgttttttaccaggccagcctagagtagaatgaccgcatgttaaaatatagattcctgggccccagacctgccagaatctctgtgagatggaacctttcaacctgggttttaaacaagcctcccgggtgattctgacactcactggatttgagaaccgtggggttgttcagacagcagggacgttgatgttgttccttctgcgttcctggtgatgctgttctgttctcccaaggcctatgcggtggtgagaatctccaaggatacaagacagtgatctggagcgagtgtcctgaaagcagactctagcactcaggactgccaacaccctccccgggtttccttggtctggaattcccatcccctggttccacctgttacatcacacctccccttcaaggaccagtgcagatgccacgtccttcacggggctcagaatgctcaccagcttcctctccaccgagggccacagcccctggagaccccttgagctgagtgctttgtccttgcatactctttctggcctcatagtggggcttggccattgtcccttcactccagatctctcctttcagatccaggaagtgcatcttgaacttaactttccagacccycccttcagttttccagtccttagagaggtggacttctgattcctttgtctctgtgccctgtagcctcaggtcaggcttaaggcaaggtctcctcacctggcctggggagagtcccaggacgctgcacgtgcctgtgcgggtaggatgctgatgcccagatttcccgttagagagcctttccctatcctgacggctctagctttgtgtgttacttacttgttccactttaattcaaaatgtacccagcaaccagcttgtgcacagttctctggggtttcaggagggatgtaagacataccccttgcccttcaggcactatggccagaaggggggcagtgacctaggcagagggcgggagccagcagatgggatacactcagaggagcctgcagcaggcagaggcagaggagaagggaggtctacacgttctgcactgtatttatctccttcagttccaaggttctctcctggcatctatattgctcatgagttacagagcaaagcctggtgtgatggttacttttaggtgtcaacttggctggattaataaatacctagagaactggtaaagcattatttctgggtgtgtttgtgaaggtgtttccagaggagattggctgtgagtcagtgggctgagtggggaggagctgccctccatgtgggcaggcaccatccattgactgggcccagatagaacaagaaggcagaagaaatgtgaattcctctttctctgctggagctgggatattcttcttctcctgcccttggacatcagagctgcaggctctctggcctttggacccgaggatttataccaagcaggtttctgggttctcaggcctttggccttggactgatagttacaccattggcatatctggttctgaggctcttggtcttggactgagccacactcctggcatcccagcgtctccagcttgcatggcctgtcacggtatttcccaacctccgtaatcacgctagccaattcttctaagaaatttcttctcatctrtctgtcbatctatctatctgtctacctaccgacttacctacctacctgcctatctatcttttgattaatctacctatcaatctttctatctatccataacctgttgattcgatctctctagagaaccctgactaatacacctggagtgcagaatctgctggagaaactgccattccgttattgactggctggtcaggccatacagcctggtggtctagatgtgtttggaggtagggcttcngtagcacagatagtgcctgttcatggctctgtcccaggtaaggcagagctagcttgtgctgagggcttctgctttgcagctggcctggggtggctaggatctggggacacaggctgccctttccaggctctgtctgctggtgctgcaggtgcccctacctcctccttcagtggaaggctggcccccaggtcctctttaggcccaatacagactcagccaaagatgcagatgtctcatatatgaggattctgagctgtgacttctggtggtaactccactttaggcaggaaaaatgttcaactgcccatgaaaacaaatgaccccgggtcatttgggtttggcacctgctctgccagttgggtttggcacctgctctgcctcctgggaaacagtttggccaatgcactgcatgaggtgagcgcccatccctgggaatttagagccctgtgaagggtcctgaggagaggcacatcagagagaatgagaatttaaggtttactgttaaagcaacccatagaaaaggagcagaattattcaagcaaggaaacaaagtagaaaaatatcttctttcccttgcacttggtttttatgtttctctctaaaatgtattgtgggggagaaagcagtcccccaacccccctaatcagctgcatatcttagccatgcaaataaataatgaaagagagaaagaaggagagaaagagaaagaaaagtaaaggaaggaaggagagaaggaaggaaagaaagaaaagaaagaaagaaactttgcagcatcctggagcaccagttcagacaagttctggtctcctgcttgccttctgctgtgatttctctgaagttgctgggggcaggagctgggcaggaactccccaggggtgccaagcagagcaggtagttggctaagtttgcctccaggaaagaagtcyctggagagcgagctggttctagaaagctccattattatttcatgttgcttttggcgaatatatgtagaacagaattttgacaatgaaattttcaggtgctcttttggccatcaaaataaccagctcttggctgggcacagtggcttgcccttgtaattccagtgttttgggaggccaaggcaggggactgcgtgagcccaggagtttgagactagcctgggcaacatagtgaaaccccatctctacaaaaaatacaaagttagaagagtatggtggcatgcgcctgtggtcacagctacttgggaagctgtgacccaagtcacaggaggatcgcttgagcccaggagttcagggctgtagtgagctatgattgtgctactgtgctccagcctgggagacagagtgacatcaggtctctgaaatattaaaattaaaaagcccaaaccaactctgcttttcactctttcagtttcatttcttgctgtcctctctgtcctctcacccagggtaacatttttaaagtgccgctattgtgttaagaattggatttattctctgtgttaaattctctcagcattaactacagactctgttatgtaaataaggtaaattatcaggatgagaagtgagactctaatttatgagtttatcatgtctctttaaaaagctgctaggtgctatcctaacttattaggcttgaaggattctgggggattggcatattgttactgttgtggactttgtttgccttgatcatacccattttacagatgagaaaagtgaggctgggattggggctcaaatgcgtgctcagagtcacataagtaggttggaaggtgacgctacagacayggtaaattgtgaaggcctgctggtaaggcacgagtgatttgaatgacactctttttttttttttcctagtgattcctgtcagaatcaccatttttggtaaacaaaccaagcccagaacctgataattatggagcattctacactgacagttctttgagacaaatttcctcttggcatttacactgtggctttagctttcaaaccagaggttcctcttacccagcaaaaagtgagttatacgctttcttaatgttataacgttaccatggatgatcctgaacttgccgaggatagcagagacgggtgggcagaacaggaaagaatcagatcagagactgtaaaaagtaacttaaaaaaaaataattctggcagagacagaatttgaaggtacttgtgcacatcagaacactggacttgcttttttctgggagcaggaatgctgcttaattagatcagagaagaatgcaagtggtccatacatttagatctacaatgcgtggtttccagacctgcagcttgttttgctgcgcttcatcatggagtcatagaagggcagagctggaggaccgagtgagggacctggtgccatatccctacagacaggcaattggagactcccgtaggttaagggctgcagagcctggaccaatgcccagaatctctgagctttttatcttacaccatgaagtgacagatgctggcagatgttagacctttgtgcttaactgtttaaccacacagcacccgacttctgtatgcagcgaggttctagagtttccaaaacacgggtctcctctcccacctcagcctcctagcataaaactagacacatcctcatgcttttgaggtctaatcattggattttgttcctttcagatggctttcccgaagatgagattgatgtatatttgccttctggttctgggggctctttgtttgtattttagcatgtacagtctaaatcctttcaaagaacagtcctttgtttacaagaaagacgggaacttccttaagctcccagatacagactgcaggcagacacctcccttcctcgtcctgctggtgacctcatcccacaaacagttggctgagcgcatggccatccggcagacgtgggggaaagagagganggtgaagggaaagcagctgaagacattcttcctcctggggaccaccagcagtgcagcggaaacraaagaggtggaccaggagagccagcgacacggggacattatccagaaggatttcctagacgtctattacaatctgaccctgaagaccatgatgggcatagaatgggtccatcrcttttgtcctcaggcggcgtttgtgatgaaaacagactcagacatgttcatcaatgttgactatctgactgaactgcttctgaagaaaaacagaacaaccaggtttttcactggcttcttgaaactcaatgagtttcccatcagrcagccattcagcaagtggtttgtcagtaaatctgaatatccgtgggacaggtacccaccattctgctccggcaccggctacgtgttttctggcgaygtggcgagtcaggtgtacaatgtctccaagagcgtcccatacattaaactggaagacgtgtttgtggggctctgcctcgaaaggctgaacatcagattggaggagctccactcccagccgaccttttttccagggggcttacgcttctccgtatgcctcttcaggaggatcgtggcctgccacttcatcaagcctcggactctcttggactactggcaggctctagagaattcccggggggaagattgtccgcctgtctgaggggagcccagaggcacatccggacaagtttcagataacccgtggggatagyttttgctagattttggaagagggggcgggacagaggatgctgttcttcagtgctgaaatccacgccagaatgtcggtgttcatgaagtcactgattagttcccacttggtgccccaggcaataataggcccgtctcttgggcacgcacactcttcatactaagtgtttgacatacacctggatttttgcatttcaggggtcagtatcctatgacatgatgggtgttaccatcctaattttacaggcaaggacacagcagctgcgagaggtacagaaacttgtcccaaggctcacagccagtaggcataggagcrggaatgaaaatcgagcactgtcagaatctgrtgggcagcccctgacttgaaccactcccacgtgctgcctcccttaggaggggacactgatgatgaggtctcggagccggcatccttccatccctgtcgagtcccctccacctcagctcccagtccttgtgctttttggagctaagcctgggatgaccaaattcaccccagctccttcattcacagggctggatgtagctgggattgagtccatgttatcggctcggtactcaacacaacccaagtttcatccgaggaaatgtccccgcagtggatgcagctcacatgctgaggaacacccagctctggacagagttcttataaatgtataaattaggctcagaaaccactgcattctgacctgctgtacagactgcccacactgctgacctgcctagcragcaggacatcccttctgagccatctgctgctctctcatttcatcaccccaactgtcccttgtttttgatcaatggggaccagccactgccccaggagcactttagggctctcagttcaaactgaaggacagttgaactcagatggggttcatgtgggattctgggagctttctgggaattcagttggagtcaagtcaggatgctctcaaggacccctcgggctcagagccctaaagtgggccctggtgaagcagggtggtcctgcgtccacttcccaagcctgagccaagctcatcttcattgaatgtctcatttggccgaggaacaactgaactttgtggtttgctgtttagccttcagtttgctccgctgcctcctacccagaggtttgtgcgagcctgtgttgcagggttgtataaaaccaaggtacttcgttagttttgcccattcagccatggtcacgtgacatgcaaagtaatcttgctcctaattatagaaatgatttttcttttaattttttactttaccagactttactttgtactcagagaagaggcctcacatggctgtgtcacatataaatgttggactaaactcttacttgaactcaggaaaagttacttgctgcaaaatggttttgaccatgttcaattgcaaaagtacgtctgatatcctattttgcataccatttcttgtgtttggattaagctgcttctttgtagatgtgtttcctcatcctggctgctctgaacgcactgggtcatgttcagaaaagcctccttctcaggtggaaaaaatcagggactgagcttgtcttttgaagcccaaatttaagagccacgcctctcggttccataggatgggccgcctctcattctgaagatgactgtgctttgagggagaagtcgtctgtttggcagtaggcctgcgtctgtgtttcgtggtctaccttgtcaggtgtgtgtctgtgtggccactggtctcagtcggcgaggccggtccagctgctgcctctgtgtgactggctttgggtctggccttcacagcatcagctcacagcccacagctccagggacaaatgaggacaggcgtgggctctccctactgcttctgtgtgttcttaaaggattttctttgagacccattgtttcccctcccctcccctcccctcccatccccttccctcttcttttcttttctttttttctgacagggtctcaccctgtcacccaagctggagcgtagtggcctgatctcgctgcagccttgaactcaacgagcctcaaacgagcctcctgcctcagccagtgggtagttgggattacaggtgtgtatttctttatacaatgaataattctttttcttgaggaaaaaacattatttcatgaatctagaacttgaaggaaccttagagctcattcaatcctgcctcctcttttatgtgggatgcaaacgaggctcagagagacgtaacaacttgcccaggaccttcccagcttgtttgttgcagaaggagggttccagctcagcgtgggtttcctggtgctgtcttgtctggatgtgagagtgagaaacaatgtgaaagcatgagtgaggaggccaagcagtgcttccccaggaacacccagcgctagctccagagtgggaatggagaggtccaggttggccgggccggggcttcaccgcaggcacccagagaggaaggattccgatgggcaggtgctgagctaggggctgtgtaggtattgcctcatctacatgctctcaatgagttttccgggggcagagacctgcagttgctcaggtttacagattaggaaactgaggcagagagagagagggtgaacaactcattcaaggttacataggtgaaaagtggtggaaacggggtgaccctaagctgccctgtggcctccccagccacctgctgacggagctgtgggagcacattgcattggctgctcccactgcctctctggggtgcctcctcagactcccccaaccatacacgcctacccccagcccccaaacctccgtactctgccttctactgtgactgtggcagaagccacttggcccccgtggtgccagaacccctggtattggactgactccagctcttcttccacagctcctgatgtggcctcactctcgtcctaccacctgctgtcccctctgctggatcaccccattagcacacagacacgctgccattttccacctgaccagaaatggccaccaccttccccgaccccttccctgacccccttccccgtcccgctgccccatcctgttgcgtttctggtggaaccccgcacgagagttttacttgtctgttgcctcgtcctaatccttcccttctttcccaaatgccgtctcatcagacttctgcacccccactccacccacgtggcccttctcagggcacccaccaccccctgtggctgggtcctgtgggcagttcttgttctcctcctgcttgacgtggcgagtcctcatcaccagcttccaggacaccgggtgctcttggtctccctcctccttgctgctcgccttttccatctcccctgcttgctccttctctttgctctgacagtgtcgtgctggaggatcctgggctctgcgtggggccccctttcttccctggttatacccagtcctccgaggggcccaccttgtctcatggctttaaatatgttgatgatgtttccatttatctccagcctagaactctttcttgctcttcaatccactgcctacctgatttcccatagtgaacaatccaacactgaccttctggttaactgccccacatccagcccatctgcagccattcccgtctcaggtaatggccactccatcttcctgcagctcaagtgggaagccctggagccattccgactcctctcccatctggtgcatcaggaaagactgtgggaactaccttcaaattctctccaggagccaaccacctcctgcccctccactgcgaccacccttgttcaagcctgcattgcctctcacctgcattcgtgcagctacctccagaccctccctcagcttccattattgcatcctttggtctcttcccagcagcatccagagtgatcctttgaaaatctcatttctctgctcaaaaccctcctgaggtttcccatcaccaaggatattaaggataaaaaccacatccttcataccattgtctacctgtgattccctaatcgtgtccctttgctcactccctctggcctcttgctgttccctgaacagcagtctgttccagccacagcagcccctttgccctatgtgcccatccccgtcagccttggcactggctgtcctctctgctgggagtgccctttcttcagatgctctcatgcttcgcttctttgccttgttgacatttggtcaatgtcaccttctcagtgaggcctaccctgacctccctgtaggaaaatgcaactcacctcactcccatgccccgtaccttatattgttttccttgcgcttaccaatttctaacaaagcatgtaatatctgtttattataacatatctatattttatggtttatgtttcacgcgacttgaatgtaacctttgtgtgggccgtgggtctttctctgtttccttcactgacgcaccttggattcttagcatggtcccagcacatagtagatgctcaataaacatttgttgagtggaactgaatgtattggtatggtaggtgggttttagaagggaatgggtgaaccaggactgaaaaaaaagaaatatttttcaaagtaagccaacactgtggtttcacttgagtcagtaagtaggaaatgggtgcgactctgtgacctgaaaacctagaaatgctccacagccatgctcttcaccccttttcttccaaaacggaaaacctcacacaatgcagggtggacagaatcacacggtgcagtctgtgcgcctgtcctccagcccgacacctggccagtcctgtctcatctacactgtcatgcaaactcttgtttttgtttgtttgtttttgagacagagtctcactctgtcacctaggctgaagtgcagtggtgcagtcttggatcactgcaacctccacctcctgggttcttgtgcctcagcctcccgagtagctaggattataggcatgcaccaccaaccagctaatttttgtattgttagtagagacggggtttcaccatgttggccaggctggtcttgaactcctgacctcaggtaatctacgtgcctcagcctcccagagtgctgggattataggtgtgagccaccacacccagccatgtttcaagaatttgtgcttcagctcagcacttagtggcagtgggaagaccagacctcctgacccttcagcctgctggcatccaccatgccttaaaaaacaaaacaaaaccctaaatgtatttaattcctgctcctcttcaaacacaccattgtaaccacataatacactgtgtgaaaagagaggaaagaaaaatccaagtcaacaataacttgccaggccttctttccttgagccccatatcccacgcccgctgtgctaacctctggcttgccgcccacacctgtctggattcatcccgactcgagccacctcctcctaactggtcccacgggcctgtccctgccactttccaatctgtcctccacttgacatttggagtaattttttaaaacagcaaatctgattaggaaactcagaggcccagggaagccagtgacttgccctctggcaccctgtcctgagggtagagcttcctggcacagggtcagtgagccccgaggccacctccctggaggctgcaggagggtgagcgtggtcaagagcagcaattttcattgtttcatgtgtcattgcctatttaacgagcttcgcagtgccctcaatttgctaagttaactttggccacgccgtccgtgagaggtcagactggtgatttccaactcccaccgggcaccgggtgctgcaccggttatcccaacaggctggcacagagggctgaaatggacttggaaagccaaataattaattttcatgcgagtttttgatccccttgagtgtggttatttttgtgcaaaaaattatcccgatgtttactttggtttcataagtaatttattaaaattccttcctaagctttaaatttcagctaacaaatatgagcatggcctctgggaatggtaagaacaaggaagcattgtgtgtgtgtgtgcacaccccaaggttgtgcagctagaagtgcagaatgtggattccgtccgctctttagggcacagctagccctgtgcacctgtagaaactgtactgacgtacagccttgcagagcctccagcttccatggtggcaggagccatggaaaatagagacccacccggtaaggaggtaactgggacaccaggttactgtctacctggtggggaagctggggaaaagggcccatgggaggatactaactggggaagaggagaccttgcttccagggctgggcgacccacttacggaggccccattccatttacatctccgctcaagcctccgcctccgggttccagccctggctctgcaatttgctagctgtggccccaggtggtcattctctctgcacctcagtctctgcatctctataaaatgggatgataatagtgttcacctcagaaggttgtcagaggtgtggaaattaagataattcacattgagttcttggcacggctgtgcctagcactgggtgcaggctgaatgcatgggctgctatcgcgatgttgtatctaatggcctgcagtggttgcttagcagcaatgggtttgcttggttatttcctgatttggggtaaatagatccagagaccaaggctccatgttatccccagcaccgggctgaccccaagtaccagagaggtctccatggccccaggctgcagaggacccaggttacaacttgctcaagtagacccaggatctaggcttatcctagtagatcttggtaccaggccagcctctgtgacctgagactccaagaccaccattgcagacccaggctctaagctagcctctgcaaactcaggatatatattccaaatatccctgatttggggggcaaggtctgtgtgtgatttgcagagtaacgatatgaagaaggaggtcttgttaagatggcgtggtgtggagtgcccaggtgtgaaatggttgtctcaatggaagttgtagcctcctcctcccatgacatcatcctcacacgtgctcagtgttaggcattttttccccctcctgctctgaatcaatgcgagtgagatatgcatgcgggagggacaagcttgcatggcacccagctgtggtacatttagaactcggcctcagccctccagtgtgaccttgggcatacccttcacccccgggctctgttcgctggggcagggtctgcgctctggagtcaggctgcctgggtttgaattttacctttctcgccaagtcccttgagtggcaagttacttatcttctcattgtctccgttttgttatctgaagaatgggaccatagtagttcccgcctcatgggatgatcatgtgggttaaatgagag

SEQ ID NO: 95947 - DNA, 52868 bp, Homo sapiens
  misc_feature (1)...(52868): n = A,T,C or G
aggaaaaaacagaggatggaacagggtctggttgggtagaggagaaacagaattcccggagaggagtgcaggggtgtagctggagacagtgtacttgagaggacatgatgaaagcgtggaggtaccagcttggttgtgtggccaggtgaggggaacaggccagcagggtgaggtcagagattcttgtcaccttcttctgagagctgtgagaacccgttgttgaagattaggcagagaagtgatctggtcacattttcttttaagaatggcatgtagggcaggaatcttgagaggtgggtgctgcagccatccaggtgaaattcaaagggaataagcctgagtttgttagcaattggtgtgaagagaggggataaaatttgagccatatacagaaagaggtattaatagacttggtgatgttgcgtatgaccaccaatcttaaactggcactcagcatctcctgactgtaatcctacatccccagactctatttcatgtcttctcattctcttcaaacctccaacattcttagatcatgtcctccttatttcactgagaaaacaacagcactaagaagagaacctcttcctccaccaaatcaatccctgcttctccaaacacacactactcaactcagggatctttagtgattagcttcatgtaaagacttaaataatgctatttcttaatcttgacttgacattgttgacttcctacaatggaagaggagttagcttctcttacactgtctttcccacaacatattatcacccccaccctcgacacccacatttcctctcctattagtctccctaagcagtttgatattggctgaaacctgcattcacagtttagtataactgtatgtttaccatttcctgttgagccctttattggtttatgattacatttcctttaggtacaacttttgatttttcctggagttaattacattgtttttctcatttgcttggttttctatgctcttgtcactactttacccaaaagtcgctgccctaaatgtaaagctcttcccaacaaagtcatgtgcatcaggtaatatgctccactttctcttcgagatgttcctgagaaccccctgtcttcttgccataacttggacatttcctggattctgaatcatattttcctcttgcttggttttctcttcttgatggagcctgtcctttagtagcctcctgagcttgaatatctaaaatgtctttatttctactgtaatattatcaaatatatatctggtctttgtctctgccttctgatatacaactcctaaaatccttgagatctctaaagtgatgtctttttgtatgctagtaagatgactgatggcggacagctcctatgtagcttcaggatagggactggacatctgaaagaccagggcatgattagaggggttgaaactttcagcccaccccccaaactcccagaggttgggggagagggactgaaagtgacgttgatcgccagtggccaatgatttaatcaatcatgcctatgtaatgagggctcctaaaaacccaaaaggacagggttcagagagcttgtggatagccaaatgtgtgggggcttccaggaaggtggacaagaacacgtccacatgctgagagaatggcacttcgcaactccttgcagacagaagctcctgctcttgggactcttctaggcttcatcctgtgtatcttttcatctggctatttgtagcctttaaaatagccttgtaataaacatgtgtttccctgagttctgtgaactgctcttgtaaattaaagccaaggaaggggtcttgggaacccagaaggacaggtaaaacaacctggggcttgtgattgacactggacatggggctcagtcttgcggcacagagtcctcaacttgtgtgatctgctgctatctccaggtagacggtgcaggattgaagcggatacccagctggtgtctgctgtacagctgaatgcttgcttgtcggtggggagaaattctctacatctggtgccaaaaggatgttgtgagagtaaagaaatggtttttttttgttttttggacttatctatccttacgtttgattcatcatttgaatgagaatagaattttagattggaaatcgttcctttgtgtttttgctttttttgttgctggaaatttttgagatcatctctattcctggtgttctcaaatttctcaatgacattacttcatatgttgcctccccattccctccccaacccctgcccaatttattgtgctgggcactttgtagtccttttttctagtttttttgttgctattgaacaaattaccccaaatatagtagcttaaatttgaggaggattcagctgggcagctttctgttgggatctctcatgcagctgcagtcaggtattggctgaggttatagtcatctgaaggcttgactgggtcagtggtccaagatggatcacttgcatggctggaggtaatgttgcactgttttccccaaatgtctggctcatgctgatgatggtgcttgttggaaactgtcaatgggtacagtctgccagctaataggtttgtttttctactaggtcatagttgccagtgtttgcaggactcttgtgggccagctgctccagagggatcctcccactatctcatgctatctggctaagtgggagaagtgagcctggacccacatgtgtagactttaactcaatctgtctgctttcagtggtcctcagctatgcctcatgcctgaggtaacacctactctgattcaactactggagacttcctccacccaagtaggagaggggatctatggtcatactgttcctcacaaaaattttccaccagttattccaatttctgcaccttcctggtatttgctggcaggaatggtctcttgttggcttcacccacaaacgtaagtctcaactttctctagctaactcagttatcacttctccatccattcccagtctctataattttgttgacttctcttgcttactagtgtctcctctcccattctttgtggggtttttttggtcttttattactttatgtgagtagggtttgggcaggaaatggaggttaatgtttatgctcagtctgccatgtttaactgaaaatttctttcaaaattctgccattaggcttttccccccatgtctctttagatagctcttgtcagtcaccaatacattgttttgttgcatccaataataaattctgtcttcattttgcaatcccttcaaagcctcagcaaagatcaccatgtcttcacttatattatgacttcatattcctctggttttcctcctctctctggccattcctctatactggaaaaggtcggtgccccagggctcattctagaacttctcttttttatgtgcatttcctaattcatcttgtccaatctcatgatttcaaatactacctgaaagcaaatgactcccaaattcctatctctagcattatgttctctcctgaatgccagcctactcaatatttcacttgaatgtctaataagcatctctagtataacttgtccccactttaatctgaattttccaatcaaactttccctattttaggccaggtgtggtggctcatgcctataatcccaacactttgggaggctgaagtgggaggattccttgtggccaggagtttgagaccatcctgggcaacatagcgagaccccgtgtctctaccaaactttaaaaaaatcagccaggtgtggtggcacacgcctgtagtcccagctattcaggaggctgagcccggaagatcacttagccctggaatttgaggctgcagtgagctaatgattgtgccactgcattcccacctgggtgacagactgagatcctgtcactaaataaataaaagacacctctattttagtaaatgaccaccaccatatacccagttgttgaggccaaaatcctcagagccttctgtatctggcttaatgaataagctggatgcagtagtatgtaagcagataggaacagtgttttttctcatgactgcccctagaagcttaactgtgtcaattctcagacgtagtttacagctttttcttttctttcagacattaaaaagagcggattattttactcataaaaagtccagtccattaagatatcaaaactcaaactcttatccagttgaaacctcttccctcacctagctttgccaggttcagtgtgagattccatccaggctgaagccccttatccctattcttcatgtttctacatggaggaacttacctggagaaaaacttccagcctctttctgcttccagagaagtagagtgactcatttgattgaatttcagagaacagatagrgtggagtgtgctcaggctcctctgggtactctttctggggtctgtgggttgactggaggggtgtcttctggtgggcactcaattgcatagtgcttggtgaggcagtttcatggcctagaggctgggggatatgtttgtctgacttacgggtgatttagtagcttgccctcttgcttgcagatttaagccttgtccttcaagctaggtttttaatttgtggcaaagctgatattttgatacccacccatcttattgctgtgtctttttcatccgtttctgaactgggataggaagaggtgattatccttgattgtctaaaaccccgctattccactgtggggaaggtgcctgtgggtattcttttgtccactctctcttccaactttctcctccggcttgctgtggctcaccgccccttcgaagttaggctgggggtaggaattgaggagtgggtgccgaaatgctcactaggctggggcagttgtaactggatgtcagggcttctgtgggccaggtgaagacatgctggggtcttctgtgggtccttgacctgacttacggaccactggctgcagcctccagacgtcagccatgtttccaacagtcagacgccccctgccctgttgcgcccggctgtcccttccaagttcggtcactcgctctgcctccatcttcctcttccctctgctgctaaggcttttcacctttaatttctcctggggccacccccaactccagcgaccccgtgagcagctgaggctctaccgcgctcggtcctggccagcgacgcagcccttccctggcggggctccagggcttctggcccctgtggtccgccaggtgtgggggcccacggcctcaccgcgcctaccccactccccccggcgaagctacgcggcgctcagcttcccagggacgccggcggcgccctcggctcctccgctccgccccgccctccccctggtctcgcactggagccgacggcccgcgcccacctcacctcagggcggcctcccgcccccacccccggccccggcgtccgggcaaatcctgcagcgcgagagcaattccctgccacccgaccttcgcactcgctgtcgctcgctcgagcctcgctccccacgtccttccttccgacccgcggctggaccctcctcacaaatttctcagagaggctcacctcaaagcgcggcgcacgaggccgggctcccgggacgcaagcctctagagggcgcgcgagaggccccgcccccgcccttcggccccacccaccagccccgcccccacccgcacccaccaggccccgcccccacctccccacccaccagccccgcccccacctccccacccaccagccccgcccctcatgccccgccaataaggccccacccgcctcccccgtcccgtcgccttcacccaccatccccgctccctcaggccccgccccacgccgcatggggcaccaagcgctccaccactgtggtcgcctggcacaccccggggtcacgctcgcggcgctctgattggttgcgtgggcgtcggcccacctaagcctgagcgcctgccgaggcctgcgcctgcgtagtgcgcgcgggaggggcgggaggggcgggaggggcgggaggggcggggctgggcggcaggtcccgggtgcggacatctggcagctggcagtgggcggcgtagagcactgcagcagcaatgacggagggcacgtgagtcccctcgccccgggctcctgacgaatgcrgggtggtcctaggtgctgaggagagcgcgactggggcagtgggccggcggccggcgttggggcggggcctgggtcgctgatggccggtggtcctcaggtgtctgcggcgccgagggggcccctacaagaccgagcccgccaccgacctcggccgctggcgactcaactgcgagaggggccggcagacgtggacctacctgcaggacgagcgcgccggccgcgagcagaccggcctggaagcctacgccctggggctggacaccgtaagttgcttccgcggagcgtcagcgagctcgggaccctgaggggtgagccgtgaggagcacgttttctctcagaaaggcgggtgggaggacccggccagcgacgcccatccccaaggcgagcgcccacgggaactgcgttcgcgggcccctccgcttcagccccttcatctctaaaccacgcataggagactcctaatgttttmttttttagcaccttattttgagataatttttgacttataggagagttgcaaagatagttgtaactttgtttttattcacaaaaagtgtttggatccactgtcttagttgtgtgcattgtaagagattttggtcgtcagagtctgcagtgtaaacagggtctcctgccgagccccggccaccgagggaaaggctgtgccgccccttgggccctctttgagaggcccgagtcccaggcccaggtcggcacccgtgccccaccctacagtctgggtgcctggtttattccagacatcttggagaagttgtgaagaatacatgactggcaaataaagcaacgaaaatgtgcagctgttcttttactttgctgaggtgtgatgctctcatcaaagagtttcagacttttgatggaaacagctgaaacttttaaagtaatttacattcactgttttgacttgggctgtatgtgaagagggttcctctggccgggcaacagtcccgtcagctatctctttttttttttttcgatctctttgcagaagaattactttaaggacttgcccaaagcccacaccgcctttgagggggctctgaacgggatgacattttacgtggggctgcaggctgaggatgggcactggacgggtgattatggtggcccacttttcctcctgccaggtaggagtatgctgccccagcctgatkgtatggccaccctggatcacccttgggatcctggcccagcctggtctagggttttgwtgaagcaggtgaaaatccaggggctcacaagaaaagggctggcaaactctgccctatgtcagagtcgtcctgctattggtctaggggatcagctagccttgccagtgtagggtgacaggctctctgataagagaagcaagtggttctctagggctctgtgttgccttgagggaggaggaaggtgggctttgaagtctcagtacaggatgggatggacattccaggtggaaggcccagcctatgccaaggggctgtaggtgggcagagtggtgggtggggagctgatatctgctgtgaacttcctyggggctattgcaggagagcttcaggttcaggctggtgagtaggaggagcatagcagttggactgcctgggtattgaactgatttggctacacaagactattttgcatcctgggagtgtttctctacagaaatcctcagccttgtaaaatgggaaattccctcctatgaatttatgcaataggacttttttccctagtgacttgtaatcacattgtttcaatgacgtgaattcctacataaataggttttgtttctgtgataactcttactgatacatcattttcttttactacrctgactttgtaatagatagaaagtccttatatacctttgttgcctttctttttaaaacatctcttacctgtgtctattcatttactcatccaaattgcctttatcctgattttgtcccagacttgaaatgaagttgcaataggcttatatgttagtttgggaagagttggcctttaacgttaaaaacagttccatggtgtttactgtaggccaagccctgctcaaggcctgttcttcttttagtccttagaataagcctaatgagatacattagaaagctgaggcacatttattccaggtaaccagactagcaggaggagcactgggatccccatctctgctttgacttctagccctgctgccacctggactgtacagcattgagtttttctgtcctgggatttgagggcctgtccttaggggaagtcaaggtgctcttcttcccttggccccatcagggcctgtttagactgttctcagggctcgtggtaaggcaatgacatagagttggtcaggagatgggtcagccccactttgcctctgtagcctgacctgtgacaggattggaatcaggtttggtcatgtgcacagtgtcaggcatgcagtggtgcttggtcagtggggattactgtgttgtttgttcttgctgctttggctctgggcttagctggctgggacccttcctgtgggctggctgtgagttggagtttttttgtatttttttttttttttgagacagcrttcgctcttgttccccaggctggagtgcaatggcacaattttggctcgttgcagcctctgcctcctgggtscaagtgattctcctgcctcagcctcctgtagggtccagccccacagggtcggtaggtttttctccctgtgtgcggagatgagagattgtagaaataaagacacaagacagagagatgaaagaaaagacagctgggcccgggggaccactaccaccaagacgtggaaaccggtagtggccctgaatgccaggctgcgctgatatttattggatacaagacaaaggggcagggtaaggagtgtgagccatctccaatgataggtaaggtcacatgggtcacgtgtccactggacagtgggcycttccctgcctggcagccgaggcagagagtgggagagagagagagagagacagcttatgccattatttctgcatatcagagacttttagtactttcactaattttgctactgttatctaaaaggcagagccaggtgtacagggtggaacatgaaagtggactaggagcgtgaccactgaagcacagcatcacagggagatggttaggcctccggataactgcgggtgggcctgactgatgtcaggccgtccacaagaggtggaggagtagagtcttctctaaactcccccggggaaagggagattccctttcccggtatgctaagtagcgggtgtttttccttgacactgacgctaccgctagaccacggttgggtccgcttggcaacgggcctcttcccagatgctggcgttaccgctagaccaaggagccctctagtggccttgtccgggcttaacagaaggctctcactcttgtcttctggtcacttctcactatgtctcttcagctcctatctctgtatggcctggtttttcctaggttatgattgtagagcgaggattattataatattggaataaagagtaattgctacaaactaatgattaatgatattcatatataatcatatgtatgatctagatctagtataactcttgttgttttatatattttattatactggaacagctcgtgccctcggtctcttgccttggcaccaaggtggcttgccacccacagcctctcgagtagctgggattacagccatgtgccaccatgcctggctaatttttgtatttttggtagagacaggttttcaccttgttggtcaggctggtctcgaactcctgacctcgtgatcccccaccccccacccccagcctcccaaagtgctgggattacaggcgtgagccactgcacctggctgagttggagcttttcttccctctttttggactttggaaaatgctcttggtccatgatgctatgtagacagctcccrttgactgtggcctgtgcggcattgggcagcactctggtgaacactgaatcgggtctgacctcctagccccaccatttactggctgagcctcagtttccttgcctgtaaaatcaggaagatgctggctctgctcctctctgcacatttccccgtcctaacaacattataactgttaggaaagagacgggcttgttttgggatggctcattttatgtgaccctgtgcgctgtctctgagtycatctgcccttcttccagggtgtagggaccagccccacagggtcggtgggtctctccctgtgtgcggcgatgagagagtgtagaaataaagacrcaagacaaagagataaaagacagctgggcccgggggaccactgccaccaatgcayggagaccagtagtggccccgaatgtctggctgtgctgttatttattggatacaaagcaaaaggggcagggtaaagagtgtgagtcatctccagtgataggtaaggtcacrtgggtcacgtgtccactggacagggggcccttccctgcctggcagccgaggcagagagaggagacacagagaaagamaacttatgccattatttctgcatatcagagacttttagtactttcactaattgactactgctatctagaaggcagagccaggtgtacaggatggaacatsaaggcggactaggagcgtgaccactgaagcacagcatcacagggagacaggcctccggataactgcgggcaggtctgactaatgtgaggccctccacaagaggtggaggagcagagtcttctctaaattcccccggggaaagggagcctccctttcccggtctgctaagtagcgggtgttgttccttgacacttttcgctaccgctagaccaccgtccgctcggcaacgggcgtcttcccagacgctggcgttaccactagaccaaggagcccttttgctggccccgtccgggcataacagaaggctcgcactcctgtcttctggtcacacctcactatgtcccctcagctcctatctctgtatggcctggtttttcctaggttatgattgtagagcgaggattattataatattgggataaagagtaattactacaaactaatgattaatgatattcatatatctctaagatctatatctggtataactattcttgttttatattttattatactggaacagctcgtgtcctcggtctcttgccttggcgcctgggtggcttgccgcccacacagggcatgtctggatggtttgaacactagggcttctgatgctctaagccagagtcaggtattcattccatggcacatgtggctggggtctgccctgagacctgtcccgtgccaggctctgggggcacatggctgatggaaccaagcatggggagtgaaggtggagggtggcctgtgagcaccatgcctgagaggaccaggctggggacggaaggttcttagtggataatatttattgtctctgcctcccccctgacatttgcaaagcggcatatgcttgtaaaaaaattttgaaacagaaaaatataaataaataagtaggtattaccacatgcaagggtgaccaattttgtatttttcttcccagcagatgttaaagcaagaccaacagtctcccctcatggaaggcccactgatctaaaatgctggttccttttggaccttcagggcacttgggggagaccttcctgaggtgctgtgcagtgtctggtgtttctcagaccctggtggtcatgggagccaggcgtggctgagtgggctctacaggccctaggcagggagcatcgcctgtgctgtggctgacgttccttctggccctgttcccaaagttccccatgggggcctgggaggaatggcctttccagggggtgtttttatgagaaggaggtagctccctgttggagtgaggtgctcaggaggaaaggggcctggtcttagcagtcatgaccacctgtccccagtgaggaacatctctcctgccacacaggcctcctgatcacttgccacgtggcacgcatccctctgccagcyggatacagagaagagattgtgcggtacctgcggtcagtgcagctccctgacggtggctggggcctgtgagtgtgcctgcccctgtgtcactgcacatgtgcatgtgtgtgttctcatgatgtaggagatgcttgggtttccaggcagctgccaggggttaggagtgattgcagctgtgggtgtggggtgggtgagggagagactagcaggcrgggagtgggctgaaggccatgcaggtggggcctcggcttcacatcttttgttaaatggattttgtggctgttasgacactcttgagacccacatgtgaaaactgtcagtctgttatcacttaagrcagaagaaaattgcccttgactctgggctggcagcaggtggagacaaggcctgacagctttcctgccatgtggcacacactttgggagcagagccatagcccaaagtggaccgcccttgagctagaagtgttgactcaggcgtgggaaggtgtagagcaggcgggtcacggtgaggaaggagtsgggggctcagttgtcatgggaggtgcatgaattcgtactgcagagtggctgctcaggggtctcctgtgttgrcatgttatgtcaggttaagscattttagcattcttagttttctgaggaaactccacagaaagttttgctttatttcttagaagtaaggacagataccggtttctcacctgtcctctgctcctgtaggcacattgaggataagtccaccgtgtttgggactgcgctcaactatgtgtctctcagaattctgggtgttgggcctgacgatcctgacctggtacragcccggaacattcttcacaagaaaggtacggcatgtgcagcatgtgctgggccaggggttcgtgtcaactcgataatgagctctcacaaacgmgatacagaaagatgcacttgcagctgaaacagtgggcaaaagcacatgagcagggaatttgtcaaagcagaagtaggcagacactgtttaacctaggcatcattttttaaaaaagcaaattaagagccaggcacagtgagtggctcacgcctgcaattccagcactttgggagactgaggtagaaggaccacttcaacctaagagttcgaggccagcctgggcaacatagtgagacctggtctctacaaaaacaataaaatattagccaggtgtgatgatatgcacctgtagtctcagctacttggaggctagtaaggcaggaggawcacttgagcccaggagttctgggttgcaatgagctggttgtactacygcactctagcctgggtgacagagtgcgaccctgtctctaataaaataaaaaagccaagcaaactaagacaaccaggtaattctgtttgtttcctgaattggcaaaaacttaaacgaaccgtgttaatatgtcyaccttctgggggcagcctggctgcaggcaagagcagccctggagcttgcaccttccaagctgatcgtctacctctccaagcccggggctgtccacctctccaagcccggggctgtccacctctccaagcccggggctgtccacctctccaagccccgggctgtccacctctccaagccccgggttgtcttacctctccaagccccaactgtctacytctccaagccctggtctggctacctctccaagccctggctgtccacctatccaagccccggcctggctacctctccaagccccaggctgtccacctctccaagccccaactgtctacctctccaagccctggcctggctacctccccaagccctgggctgtccacctctccaagcgccaactatctttctctccaagccctggcctggctacctctccaagccccaggctgtccacctctccaagccccaactgtctacctctccaagccccggcctggctacctctccaagcccctggctacctctccatgcccggcctggctacctctcctcttgcctataggccctgaggggcaattccagcccaagggaatccatggctcctgctgctccaagaaaacctagttyatgttgtggctctgcagagcctggcctggtcttgtcctctgtgtttcacagaccttccgtagccagtcccacctgccctgctctctgctgcatgcgcaggggcctcctgtcagctcctcagagacccttattatcccagggctcgccatgcactgcctccttcgcctggagcctcttaccttccactcctgccccgctggctcacactttacgtgttccttctttgaggacctcttcctgacctaccgtgccaggtggagtgtcctgttacgcattctcatgagatcctgccttctttcttggtgagcttgtcactattgtcctcagttcactgtcagcctttggtgtcgttgatgctgcgtccccaaggctgctgtccggttcccaccacactcctggcgcctgcctggtgaaggaacgtgtttaggctgcactttgcctagtagctttgtgggtctttattgacttttgcataccttttggggtttggagcagggactcctcagaagcatgtttagatggtgtggctgtgccaggactgctgctgctgaagtggctctggcatggggccagcgtgcyggagctactctggagtctagggtcgtctttgttcccatacaggaccagtctgccaagtggagatgacacagactggggcagctcaggcttggctcagagggcgaggctgagtgtgcgctgtcacttccccaccttgccttctccaggcgcatgtgcacctgggcccctcgctcacctgagcactgaggtgtccctggaccttcccaggtagctgtcttcatgtgctccttcctggggccaggggttgcaaacacctctcctggggctggacacacacactcccaggaaagccactggttccacctagggggccgtgtatccaggcaagttctcagcactctggaacctgcttcgcacatgggggtcgcaagatccacatgaggctgcccttgcctcatggagaggggcacacgtgactcccagagggtgaagcttcccagctaraggcagtgcagactttgctgacaggaagcagatgacgtgggcctattctctccccsctcaggtggtgctgtggccatcccctcctgggggaagttctggctggctgtcctgaatgtttacagctgggaaggcctcaataccctgttcccagagatgtggtatgtctgctgttgattgggttgttgggtcrctgctgctgtcccggggagtagagtgacagggaccgtgggtcaggtgcaggctgtgacagcagagaggggtgggcattctgtgggtgggtggagttaggctcctggcagaggccctgatcaagcttgagtcctgtaggggtacagaaagggggaggttcccaattgagcaggaagaaggctgtgccatggatggaggtaccccgagtcaggctgcaggcagggctgggtggcttccctcttgctgtggaagactcagcatctgtagaagtgggggggtgcccctcccccagcctgcacaggggcgtcctgtgttgctgctgctgcgtttgtctcctttgctggtgaatgtgaagtgtgtcccgacgtgacacctcacctgtggactcagcgtgtgtgcctttaaaagatcagtgtctgtggccaggtggggtggctcatgcctgtaatcccagcacttcgggaggccgaggcgggcagatcacgargtcaagggatcgagaccatcctggccaacatagtgaaatcccgtctctactaaaaatacaaaaattagctgggcgtggcggcgcgtgcctctagtttccagctactcgggaggctgaggcaggagaatcacttgaccctgggaggcagaggttaccgtgagccgagatcgtgccaccatattccagcctggcgacggagtgagactctgtctcaaaaaaaaaaaaaaaaagatcagtgtttgtttttttaaacagaaccacatactgtttaaatacccagcaaaatcaacattaatttcttattatctggtgtgtgttttttttgttttgttttgagacggagtctagctttgtcactcaggctggagtgcagtggcgtgatttggggtcactgcaacctccgcctcctggattcaagcaattctcctgcctctgcctcccgagtagctgggattacagtctcaggccatcacgcccagctaattgttgtatttttagtagagacagggtttcactatgttggccaggatggtctcaaactcctgacctcaggtgatccgcctgccttggcctcccaaagtgctgggagccatgagccactgctcccggccttatgtggtgtctttaaccgtgtcttgtaacattttatggctatctattgaaagcagtggacatctccccagaaaacactcgtgcatatgagtttaccccgttatgcattttgggaagtgagaccctggaaccacacagagcccctgctggcttccttgagtgttgtgggaaccctggtgggggtgtcccctagagagctatcagcagggctgggggggtcccttgtgttagatgactttggtgcgggggtggrgggtggggggtcaagttaggggaggcaggaagtgaaggggccgctcaagaaaggacagcagcagtgtcctgatgcaaaggccgggggcttaaccccggaagccagtttgggtggtgacggggaggcacagggatggtgagatcaccccgggagggtagacagagataccagagtagggggcagggttagggtgccgctacctgaggcgggccgtagagcacataggttgggaggtgtcctggggccattcaaatgcccrctggactctgcgcctcgcccgtgtgtaatgagcggcagaggaaggactgagacggcagtcagcacagctgccagggcaggaggggtgtgggttccacacgctggtgctggtgagggcgtctcatctgccccacttgggggggccgtcggtcagtgctgccgcatgggcacgccagggtgctgcttgtctttgctggagttgcttggagggtgggttgggaggtgaaaggaggaccacagacctgaaccactccagctgcgaaatgctggaagtgtaacccaaaatgtgagaaaaaaaaacacccttttaagtaagtgggtgtgaaagtgggccaaggcctgatgccacagtcagggagcagggaaggctcagcattgctcaccctcacttaaggatggggctagcatcacataaggcatcacataaggatgggggctagcagggaaagggagagaaaacacatgaggcacacacagaccctgggaagctggtggagctgtgctaacgtcagcagaccagtgatcaaagacccaggccttggggagattccacagacctacagtttcttttttctttctttttcttttcttttttttttttttgagacagagtctctcgctctgtcaccaggctgtgtgcagtggcacaatctcggctcactgcaacctcctcccaggttcaagcgattctcctgcctcagcctcccgagtagctgggactagaggcacacaccaccatgcctggcttatttttgtatttttagtagagatggggtttcgccatgttggtcaggctggtctcaaactcctgacctcaagtgatccaccagcctcggcctcccaaagtgctagggttacaggcgtgagccaccgtgcccctcctaaagtttcttaaatacacttttaaaagtaaactttaaattttggagtagtttccaatttctggaaaagttgcaaagatagccaagagtgttccctggggccctcacaccatatccccattgttgatgttttatgttaccaaggtacgtttgttgtagctaagaaacccacggacaatcctaagcatttaggagctccatcacctggttttaggatgcaaaatgctgaccgaactaggaggtgcagctcctcagagggtgcacctatggttcaactgtgcccctcaggagcacggttgggaaatgcccgcagatgcactgacrtggtggggaatagccatccaccagtgttcgtgcttgaaagggcccaaggtatggatgctggcggagggggcaggcttgagtcttggggtctcccactgactcctgctgttgccccaggctgtttcctgactgggcaccggcacacccctccacactctggtgccactgccggcaggtgtacctgcccatgagctactgctacgccgttcggctgagtgccgyggaagacccgctggtccagagcctccgccaggtaggacctcatcagggaacaaagtgaagrcctctggggctgggacccacagggcctggggcttctggaatctaaccacacctgtccactcacctggtggccctgtggagcggagagccctgtggagcagagcctccaccttcctccatcctataataaacagtgagcaagctctgcccagaggggacttgtgctatgggacagtcagtagctgtagcccagggttcctgggggggacttccaggactcaagggatgcaggaggcagatgtgcactgtgtcctctggaagcaggcctgaggcgaggtttgaggtgcaggatgtttatcaggcctgccatggggaagaaggaggggcagagggaggaaatgagcttctgggcagacctgggactcatggagctggggagctcctcagagcggtcctcccatagggggccttcatgtgscctcggggtcagttgctggagggacccccacccaggaagggactggcccagggccctgagggcggatggtgggaggccacccctcctggtttgagccaggcctaccaggtgctcccaggccccaaggctcagacactgcccctaccaggagctctatgtggaggacttcgccagcattgactggctggcgcagaggaacaacgtggcccccgacgagctgtacacgccscacagctggctgctccgcgtggtatatggtgagcgcctcctgaggggccrgcagggcagcccagggtcagggtcagggtgtcgcccactcattcacgcactcatcccctgccagcggcactgggccacctcctctgtgccaggccccagggggcgggatctcatcgccctgcccctccaccctgagaaccagctggtcttctactctcaggagtccaccctgtgcaagggtgtgtggtaggaggtgtggggcagcccctcctgggcagggaaggaggagctcagagaccaggcctgggggtgggtgggagggggaaaccctggggaagggcaagtccaggcgttgcagtgcatggagctccaggctgaggccagtgtcatggtgtctggcatccactgacccctgtcycctgtagcgctcctcaacctgtatgagcaccaccacagtgcccrcctgcggcagcgggccgtgcagaagctgtatgaacacattgtggccgacgaccgattcaccaagagcatcagcatcggcccggtcagtgcccctgcccggcctctgactgcagcccctgggggttgaggtccgaaagtgaagtcctagaggccgggctgtgagctgggagtggggtttcctggagcctggtgtacctccatttgggaggtggccctctgatcgcacaagtgtctgagggcttctgtcctggacccctgcacgcccagctcagtgaagttgccccaccacactcgaccccccgcttccgtcccccaccggctcttgtcctcagtgtgcctggacactctcctagaggcccctccctgagatcttgctggctagctggctagctgggaggggtgctttttcctcacttggttccctctccccaaacagttcatcattcgccattctcccgtggggtttagacatgcccagggtgggtgggagtagcaggtgccactcctgattcctcctgcctagctagggacttggagctctcacctctgtggggcctgcaggggtccaggtgtggccagttcagtgaccttagagggtgcaatycccgggctgtgctggtgcgtggccgcctcctgacagagtcagcaggccctgggctgtgctgcagctgctgccrtagctgtgcgcgtagctgctgcggtgtagtgggttggcttaggcattctctggacatacccaggtggcactgggccactgagtcccaccctgacactgcatctcggattttctgggcctcatgccacctcagtggatcacaaatcctgactgaccctgcagcgggtcccttgttttttgctcagcagtgatgtggttctttgtgggttttggtttaatcccatatagagcacatctgtactaaacgcattagaaacatgcttgcaattggatcttgacttgtgagatgcataagtaaaaagttgggggcctctggaacattctgttctgaggaagaaggggggcaagtggtccctactgctacagtcctgtcttcgcatctcttcctgggcccctcaggccctgtcctctgtcccctgtgttgtctctaaggcacctggtagcccatgcccctctggtttctcctggaacccctcgcttctccctggtggagtgctgctccttctcacagcctaaggcaggctgtggccttggccgacactgcctctgtctgagttgggtcctggggacacagttgttgcccatcctcgctcaggaaatgcctgttagagcagaaggcccctgtcctggccctgagtgatctgcacggcactttatgcctgggggctgctgtggatctggacgagaccttgtccctggaggctgctgtgsgtctggagcggagccttgacagggctgtctctcctgcagatctcgaaaaccatcaacatgcttgtgcgctggtatgtggacgggcccgcctccactgccttccaggagcatgtctccagaatcccggactatctctggtgagtgtggctgggatatgctggcggggcctctcacgaagactggatctgagccccagctgcatcccagtgagggggcccccayggtgccatctgggaatactgccagggaatacctccaggaaccagcagtgtcagggcttgtggaagccactgagggttgtctttgaattggaagatttgccacccagtggaagtgtggggtgttcccagaaggtagagtgaggaagggggtggtaggtagcagggcaggttcaggttggcatcaggaggcctgtggacaaggggagcttgtcagccatggactgtgccctggaggtggggcccctgtcatggagggcagagagccgtcccatggtgggaagcttccgctgtacaggcctcttcctctggtgcctcagcactgcacgagggcggcagggctggcacagcctggggtcggggagcctcccgctgccccttgscttgggtgtggcccttctgggtgagtgtgtcctgttttccatagagtgtggccctcacccccaggagcccagcagcccagctggggtggcatccaggccagtgccaggcctcgggaggggacagacggcctctctgggaccctcctgagtgcagggtctgggtagcagctgggcttccagctttctccttgcrcctgacttgggcttttttctcctcacaggatgggccttgacggcatgaaaatgcaggtaagggctgcgggactgcggctgcatgcttcctttgcaatcatgtctccccttyattatttttcctttggggttcagaaataactcctcctggaccaggwcccggcagcgtgcgactagaggctgagtcagttgaggcctctggccgtgtccctgtgggtgctgttggtctctgtgtgggtgcccaccgttctcgatgtctgtctgcagctgtcctgtttgctttttgccctgatgatctgagtgggctcagctgtgtaacgacagacccagagctgcagaagctctcatcttgttactgtggcaggaggtggctctggttagtgggggcttctcctccatgcactcttaatttaagrggcttcttcttaaaggtcctgggtggacaggacaggagcctggaggaccgtggtggcgtgtggccgggcctgggagctccccgtggacttggcctgagtgggctggaacccagtcatgaggggcaccaagcacaaggagaggggaggccggtggatcctggctgaccctggtcctgtcctggctctgggggccctgtagaccgcagtcctgtccgactgggctgagcctgcgcccctctgtgcgtgtcagaagcccagacagtgttgccctgtgtcttgtggtctaaggagggttacgccctgyggtgcctgtcttctgtcccccacctgattcagtgtggaaatgtggagtctccagaggtgtcctgggtgtcacatttgggatggatacacgtgggcccagcactgcccgccccagggctacccttggtgccaggtgcccccagccacgagcttttacccagctggccttgagctccccagaggctccccggacactgtccgtgttttgtgaaaaggttttcaaaacacatgtaaagtggaggtgagtagcaagccctagagcaggccctggcctccctgcccctccctgtcccctccctgcccctccctgcccagcgctccctcagcaccgactcatcagtgcacctcaagctgatgagggcgtctgtgttttgacaaaattgctctgaggttgtcacacccaacaaacttatgacggttcctgagtgtagtcctcacgttgtggctggtgtttgtgaatcaggattcaggccaggcctgcacaggccttcagttgttggtctttgagctcctgttagtccagccgtctctcgtggtctcttttctcctcctggaaggtttgttcctgaagggcttcacattgcagatctgactggttgcttcttatgttccctgagtttttgtaaactggccaggccctgaggctcgatcccattgtgtttctttggcgagaatgcttttctggtggtccctgccttgtccctccagtgcacgatgtctggatgcctctgccacacaccaccccctgcccagtccccatgtctgtctggtcagtgcccagctctgtctcactagggtttggtcaccggccctttgaactgagaccaggctgtgtacctgtgagcccagctcggggtgagatttgaggtggagccttcccagccctgtgcagaattcccatcacctccaggtgtactcagaaatggggatcattggccaggtgcggtggctcacgcctgtaatccctacactttgggaggccaaggtgggcggatcacaaggtcaggagatagagaccatcctggctaacayggtgaaaccccgatgctactaaaaaatacaaaaaaaattagctggrtgtgctggcaggagcctgtaatcccagctactccggaggctgaggcaggagaatggcgtgaacccaggaggcggagcttgcagcgagctgagatcacgccactgcactccagcctgggcaacagagcgagacttcatctcaaaaaaaaaagaaatggggtcatttccaggcatcaccatgactgaggtgcgccactgtcattgggtgagagcagctggatgctctatgtgtaggtgytrgagcctctragggatcgtccagtcctagaagtgtcctcagagggacactgtcckgcctggtggcccatgaagaaagggagggctccctgagtctcccygacgtgtgtctgcctgcagggctcagccttctctgaggcccttgtcagccatgaggggtgcccagggctcagagcctgaggctgagcgttggctgggtgggagcccccacacctggccctcaggcgcccattggatcctggaggcagtggctgggagtgggaggggctgcatctgctgctgtaacaccatcctttgtgtgtagggcaccaacggctcacagatctgggacaccgcattcgccatccaggctctgcttgaggttcgtggctccttctcttttctcagcctcagctgaccttcctgtgcacgtragcccacgcatccacctgagggcagcactgctggccacacacttgccactcctcgatacttccagtgacctgggctctggcctctggcttcagagggtcgtgctgtggagggggcggccttggccagcagccttgggtgttgggctgggtcgggggccttgggagggcaggggctggaggctgtgtgagaaggggagtctggtgaaggctgtttctgagagtgcaggcaggagtgggactccaggctcttcttagaactggaactgcttgggccaggcacggtggctcacacctgtaatcccagcactttgggaggccgaggagggtggatcacgaggtcaggagttcaagaccagcctggccaagatggtgaaaccccgtctctactaaaagtacacaaaaattagccaagcgtggtggcgggcacctgtaatcccagctacttgggaggctgaggcagagaattgcttgaacccgggaagtggagggtgcagcgagccgagattgtgccactgcactccagcctgggtgacagagagaggctccgtytcaaaaaaaaaaaaaaaaaaaaagaactggaactgtttgttatgggcattctcgagccagtactggagaaaaacgagagtggatttttatgccggtgggaatgaggtaggtgggattctgaaggtgtttctggagagccctgagggctgggccacgcaaagggcctgcctacacagggtgctggagaccctctgggcatggatgctggccaggcaggggggtgctggcatccataaatggtctcctgcgcccttccatcttcagtcatatctcatggacttttgctgttttgtctttaaaggtaagtgcagcaggagaccctggcactctctggagatgtctgctggtttgattctggtccccggttggggcaggatgtggccaggaccatcgggaaaccagcgcagccatgctggccgtgcaagggcagctgagcctctctgtcctgctgtctcttccaggcgggcgggcaccacaggcccgagttttcgtcctgcctgcagaaggctcatgagttcctgaggctctcacaggtgaggccggtgcctggggctctgagggggctgaagagggggatcagggctgggagctcctgcaggcagaagtgcccacctcacctccaccctgccctatttcctgcactggtgtttcaggtcacccccaccctcccatcccctccctagcccctgctccatccaccggtcctcctcgggctggcctcacctggggcagytctctgaggcctgcagggtgctgggggtgctggcagtttctgcgtcctgctcatgttggagccactgtgtgcaagggccaggcacgggcaggggctgtgtaccctgagctgcacagcctacacggcacctccatgtctctgaagcaccttctgcccatggaggtgacgccagcctgtggacttgccctcctgagactgtttgcagcaaaagccccggtccctcctgccagatcagctgcccacagaccctgcccgagcccatagtttgacctcagtgtctctcacacgtgcctgcaccccagtctgcagccacagtcatcccatacatgcgccccaacctcccgtgtctcccacaccctgtcccggccacggcctcagccagtgtccctctgcctggaaccgctgccccccagccccgtctccctcccttcagctctcactaggacattgttctgcagggcttctgggtcttcctggcctctgtgtggccaaggctggcacccatcttgggctcaagcagaggaggggcattgtcctgctgtgcctggcccaatggyggcctgctcctgctcctgcctcctgcccaggacttgctctgggtgatggggacttggggaggctgactgaaccctacggcactccaggcctcttcccttctcactgaggtgagagaggcagccagaagctgaggttgttcaggaggcattgggggcgcctggcacagagcacacccgcagagacctgggccccctccctgccttctggccggtggggagatcacaggggagtcaggtgctgactcccagtcccgtctgggctggtttgagccctcgctggccagtcacgtttcccagcagctgtgggtggtgagctaaacaggtgcaggccctcgmgcgcctcgcagcacyagtggtggctgtggccggcagagtaagctcccaggcacgttctgcctytccagtcctgcccagtctgtctcagcgatgtcccagatggggacgtcccgtggtgacgtgttctctgcttccacatttgccctcgatgctgcccaggtcccagataaccctcccgactaccagaagtactaccgccagatgcgcaaggtatgcgggagccagccccatccctgtcccgtcccccrggggaggccgccctcagcagggtgggtccttccctctgaagggggggctcctccctgggggactcctcccttggcgtttttgggtgtcctgctgtggtggatgcctggcctaggggctcatgcttcatgttgctgagctgcctggcacatggaggcacagttggcttgcacacacagccgtgcctcagagcagttccagtggtcacggcacacacaggcttcagaaggacagccgaagtgtagccagtgtgtccggggaaggcagaggaaagaagtagacctcagagccggtgtgggctgtgaccacaggtgcagactgtgaaattaggcatggacccagctgctgctgcctgtttacaatgggggtggggggcacctgggccccatcctgtccgtcgtgagatctgcaggtgttgagggtgtgagctgcacccctgagggtccctgtgctggaagctggaggtctgtctggatgtacccagcttggggccctggctgcacccacacctttggtggctgggcccctgccctgaccgggtgctctgtggyggggagggatgcgtgcggctgtggggaggttctgagaactggggtgtggacacccccagcctggagtcatggcttgtgctctgcagggtggcttctccttcagtacgctggactgcggctggatcgtttctgactgcacggctgaggccttgaaggctgtgctgctcctgcaggagaagtgtccccatgtcaccgagcacatccccagagaacggctctgcgatgctgtggctgtggtaaggctgtggtcccagcagccccgtccatacctcgtgtcctgcagatgagctgcgtgctcacttccactcctgtgggctccagcccagcacacaktccggccaggccgtaggagcttgtccttggatggtgtctatatgtggagaactgtgagctctggctggacccctaggggccttgctgggctgtgtgcacagggccctgcactgcggagctggtgtccagcccagccaccgatacttgggggagccggcgtggcccccaaggtttctctctggtggtttccactgggtgtctgaagagggaatttgttggtgttggttttggtgccacatcctttcagcacatctggcttttgtgtgtgtttcccagtggagaccctgcccttttctggcagcacagacttggtttctaagtcatgggcacgtgtgggggcatgttccctggtggctgtgcatggaggccctgacagatgaggttgcagctgctgcttggggcacccgagggcttggttaacgtggaaatcagctctccgccccctgttcctgccccatcggttgtcagccctagtgttgcctctakagagttccgctgtgccctgggcgcctgtgtrtgctcagcacatgggcgagttctagggtgctctctgtgatttcagctgctgaacatgagaaatccagatggagggttcgccacctatgagaccaagcgtggggggcacttgctggagctgctgaacccctcggaggtcttcggtgagtggtcggccagcactgcggcgcgcaaacccggggctggctagcactgtggtacacaaacctgggggccagcttttcccccttgcccgaggctgcaagggcccaggttcaccggcagatctgtctggagccctccctcagcccaggctgttctgcgctcctccatcccccggggtggcaggatccttgtgttgtggataggagggcatcaggtcagacctaggggacagtggagggttccagtgagatccacagcctgggctggttcctgctcagtccacagggcttgtgttctgtggaggctgctgtgtatccagagcgcctgcagggaggtgtctttggggactgtggggactgtggggacccatgccatgggcagtaggctgctgtgtgtgcatggttgccaccgtactggtcttgggggaggatctcagccctggtccacctctgggcacctcacatacccgccttcctggtcccctccacatcacacatggctttttggggtggggtcgcagctttctgctgtgttcccctcatcttcgctctcaggtagcacaggtgtgtgtcctggaccagccggcgtttgctctggaggttggtcagggaggcagcgtccgggcccgggctcactgcaacactcttgcttgttgtggctttgcctgagctgcagagcctgggcagccagggtgaaacccaacacttggttcttccctccctttcccaggggacatcatgattgactacacctatgtggagtgcacctcagccgtgatgcaggcgcttaagtatttccacaagcgtttcccggagcacagggcagcggagatccggtaaggagggtctcagccattcagtgtgggcgctgccaagtcgggggccaagacccagacgcatcattctgtgacacggccctggtggcccntctcagaagcgaaactcatggaaacatgcaagaggcttcggatgttgtggaatccagtcatatgccctaaagcatacaaaatatctgttaggggctcagaatagcacagttatnatacaaaaatggattttctctctcttttaataatgttaagaagacatcacatacctgactccaccggtgtcccagaaacggtttttaagtaacctttcctgttgaagggtagcaagtattcagaaaagtgtacaggttggtcttcttgaagcaaacaggaagcgaacagtgccagcattagacatggtgacaccaccagagccctcggcccgccccatgacggggccgcccacatgcctgccaggtcgtgggtgtctgttgctcgctttggatcttgtctaggtggactcctgaggtgtggaattcgtgttgccttctcctgctctcctgctctcctgctcgcggttagtcaggtggctcgggtaacagcagcgttctctccctcgggccttcggttgaacacagatgccgcgctatccagctgcctgttctcagcacctgggaggatttcagtctgggttattatgaagcatctactgtgaacactcttgtacttatcttttgggggcacctgggtacccatttctcatggtcacgtacctaggagtggcattgctgtgttagagggtacgttatagggtatgtgatttttgtaggttcttctttatcctatcacgattacatttttttacttttgttcaacctggtgtagactcaccttggtcacaatgcactgtcctttttatatattgctagattcaatttgaagaatattttgttaggattttagcaactctggttacaagagacgctggtctataatttttttttctttataatgtttttgtcaggttttcctgttaagatgatgctggacttagaaaagcagttggaaaatgcttttaaaatactctttggaagaatttatgtaatattcataatatttctgccttaaatgtttgggaaaaattaccggaaatgccagttgggcctggagatttctttgaggaaagtttttaaattagaagttcaatttctttctttctttctttctttcttttttttttgagatgggttctagctctctcactcaggctggagtgcggtgtaatttctttaatagtttataggactgagcagattttccatttttgtatcagtctggggagtcttcccatttccactcagctttacactgattcatgcaaagttgttcagtgtcctcttagatggctctgagcccaacgctgacatcctcctcttccttctgagaatcttatactgatcttttgaaaaaaaaaaaatcttagtctttgattctgtttttaaagagactttatttttggtttcatcaatttctattgtttgttattttctttctttcttaatttttttgagatggagtcttgctctgttgctgaggttggggagcagtggcgtgatctcagttcactgcaacctccgtttccggggttcaagcgattctcctgcctcagcctcccgagtagctgggactacaggtgctgaccaccatgactggccaattttttggtatttttattagagacagggttttaccatgttgtccaagctggtcttgaactcctgacctcaggtgatccaccttccttggcctcccagagtgctgggattacaggtgtgagccaccacactggcctttgctattttctttctcctttatttttctaacttgaatacttagatatttgattttcaggcttttattgaaatatgmatttgaggctataaatgagttttgagatatcattcagttaaatgtgtgttctggtgcttgctgtggtagcacagatactaaaagtgttttctgtttctactgttcttctctggcccatgagttatgtgggagtatgctgcttcatttacaatctgagaatgttctggtgtggtttttttggaagccgtggatggagcaggggttttcttgtgcttcacaggtgcagctaggagggcactgtgtccagggtcttctgtcggcctggcgtggccctyggccatgtgctgctctgcggcatgaggtgggcgtgagttgtcctcagccacatttagagaattggccttttaaaaaatagatcatcttttaaaaatcactgtaataaaagtaaagcaggttctttgcaaacaagacttgcaaaatacagagaagcgcaaagaagaagctaagtcgcccctcctcgcccctgaaggagaatctgctgttgctgtttggtctccacatttccatggcggcttgctgcccctttcacgcctggcccactttgtgcctggtgaggtttctaaaagccccaccmttgagcgcgctcctccagcacgagcagtaatggcacaggtgttgtgtcattttactcagtagcctctgggttatttttcagttttccttgttgttttttagcttttccccattttaaccttaactggtattttcttgttaaatatttattcatgaccattattattccctagagccacatggcttggggtccacctgcctgggtcmgcccccatccctgccccttctggctgtctgacctggcctggtgacttctcttctctgctcatctctctccctgcctgagtgggcaasagtacagcctcacagagtggtgggattgtgtgagatgccacagggaagcacatgtcagttgttgtcactgtgtagaacaatgagtcccggatgtggcccgcaggggagcartggtgacttaatcgcgggcttcctctgcatttctttggtgacttccaagctagaacattctttttttgtttatttgtttgaagcagggtctcactctgttacctaggctggagtgcagtagcaaaatcatggctcaccacagtctcaaacttccgggctcaagcaatcctcccacctcagcctcctgagtagctgggactacaggtgcataccatcacctgtggctaattttttaaatgttttgtattttttaaatgttgctcaggctggtcttgaactgctgggctcaagcaatcctcccacctcggcctccccaaatgctgggattacagagtgagccaccacacccagccatttttaaaattttcaccaggaagttttttctttcatttttaagcacagtaagtatttgtgtattatgttacagatattttcccctcaatttctttgttctttttatctctttagggagtatgaacataagtttttaacttttaaatggttaaatatattagtgtgatttttatattaagattttattttatttattttttttttttttgagacggagtctcgctctgtcgcccaggctggagtgcagtggcgggatctcggctcactgcaagctccgcctcccgggttcacgccattctcctgcctcagcctcccaagtagctgggactacaggcgcccgccactacgcccggctaattttttgtatttttagtagagacggggtttcaccgttttagccaggatggtctcgatctcctgacctcgtgatccgcccgcctcggcctcccaaagtgctgggattacaggcgtgagccaccgcgcccggcctatattaagattttaaacttgccgggcgcagtggctgacgcctgtaatcccagcactttgggaggccgaggcgggtggatcacaaggtcaggagatcgagaccatcctggctaacacggtgaaaccttgtctactaaaaatacaaaaattagccgggcgtggtggcgggcgcttgtagtcccagctactcgggaggctgaggcaggagaatggcgtgaacccgggaggtggagcttgcagtgagccgagatggtgccactgcactccagcctaggcgagagtgcaagacaccgtctcaaaaaaaaaaaaaagattttaaacttacctggagagtttttgagatacagtttggagttgcaagttactttaacactatttatatggaatattctattttactagacagacttaaattctcccttaaattcacaaatttatagaaaagttacaaaaatactgaaaagtgctcctgtttactctgactagaattctttagtgggtggcaccctaccctgagggcttcatgacctgtcctcccacatgatccaggctctaccctcagggcttcatgacctgtcctcccacatgatccaggctctaccctcagggcttcatgacctgtcctcccacgtgatccaggctctaccctcagggcttcatgacctgtcctcccacgtgatccaggctctaccctcagggcttcatgacctgtcctcccacgtgatccaggctctaccctcagggcttcatgacctgtcctcccacgtgatccaggctctaccctcagggcttcatgacctgtcctcccacatgatccaggctctaccctcagggcttcatgacctgtcctcccacgtgatccaggctctaccctsagggcttcatgacctgtcctcccacgtgatccaggctctaccctcagggcttcatgacctgtcctcccacgtgatccaggctctaccctcagggcttcatgacccttcctcccacatgatccaggctctaccctgaggacttcatgacctgtcctcccacgtgatccaggctctaccctcagggcttcatgacctgtcctcccacatgatccaggctctaccctcagggcttcattacctgtcttcccacatgatccaggcccattctttcttgaaccattggaaaggaatttgcagataggatgtgtacccctaactgcctgagtatttcttagcaggtgtattcttttgtgcaagtgtaagtcagaatgttaatgttgatgaaatactaatctgcaggcctaattgttccaataatgtcctttatggcaaaatcttccctcaagctttaatccaatatcatgggttgcatttgtttatttttaattatttttcttttctttttctgttttccttacccttctcactgtgcacatgggttgcatttagttatcacattgacacccttttaacctggaataattccttaatctttccttgtgtttgatgactttgtcatttttgaattgttccacaagttattttgtagaatatcctcagtgtttttttttttctggtgtctcgtgattagattcaggttatgaaactacatttttgtcaggaagattgcagaagaaatggggccttctcctgcaccttaccaggaagcacacaccaactttgatcccttgattaaggtgatgaccgctgtacttagtttctccgctatgaagttgcttttttttwctttgtggggagacagttttagactatgtaaacgtcctatttctcatcatacttatacctgttagtgttagcatttgatgatgattcttgcctgaatcaattatttgcataatgcttacaaaattatcattccttccatatgtattagttggtgttcttccaaaagcttttcctttgcctctgtttatttacttatttatcactgtggacgcatagattcttaygcaattgattttgatactgatctcatagctagacaattttgctaaacttttaaaaaaatttatgtactttatcttttatagcagctttaaatttacagaaaatttgagtggaagatgcagtgttcccataaagccgctaactcctcgcaccttccctcaagtttccccagtactaacatcttgcattcaagtggtgcgtttgcaacattcataaattattatcgtccagagtccattgtttacattcagcttcctcttcatgttgttcattctgtggtttcacagatgtgtgatgcaygtgcccaccactgcagtgtcacacaggatctcactgccccggagtcctctgcgctgtccccgcctccagaaccccttagtagcaaacactgatatttttactgtctccatagttttgccttttcagactgacctatttcacttagtaagaagcatttaagattcctgagtctctttctatggctcaatagcacatttctttttagtgctgaataatattccattgtctggatgtaccacagtttattcattcacctactaaggtgaatgtcttgcttgcttccaagttttggcaactatgaataaagttgctatcaatgttagcgtgcacataagttttcagctcatttgggtaaatgccaagaagcatgattgcgggatcctatggtaagagtgtgtttagttctgtaagaagctgccaaactgtatcttaagtggctgcaccatttgcgtttccaccagcaatgatgagcgttttgttgctycacatcctcaccagcatttgctgttgtgttttgggttttagcctttctaagaggtgtgtagtggtatctccttgtttcaatttgcaattccctaatgacattatgttaaaatcttgtcatatagttatttgccatctgtgtatctttttcagtgatgtgtcctttaaagtctttggctcatttttaaattaaattttcttattgttgagttttagttcttcatatattttggctgccagtcctttatcagatatgtctttygcaaatattttctgcctgtgtcttgtcttttcattctattaacagtatcttttgcagagccagttttcatttcaaggaagtccagcttatcaatgttctctttcatgtatcatgtttttggtgttgtatctaaaaagttactgccaagcccaagggtacctagattttttcctgtgttatattctaggatttttaaagttttgcattttacatctaggtccatgattcattttgagttaacttttgtgaagggtttatggtttgtgtctagatttttttttttttttttttttttgcatgtggatgtccagttgttttggtaccatctgtcaagaagactctttttgggtcattttgttgcctttgtttctttgtaaaaaatcagttgactgcatttgcatgggtctatttctgagctctctgttccattgcattgatctgtttgttcttctcagcaatcccacactgtcttggttcctgtagctctgtagtaggccttgcagtcagttaccgcccctgttctcacttcagtgttctcttcaatagtgttttgactattctaggttttttccctctccatatacattttagagtcagtttgtcaatagtttacaaaataacttgctgagactttgattgggattacattgaatctgtagctcaagttggaaagatcttttatttctttcatcagaattttgtagttttcatcatatatagatcttgtacatattttgttgtttatacctaaggatttcatttttttggtgctaatgtaaatggcgttgtgttttaaatgtcaaaatctaattgttcattgctggtaggaaaacaactgacccttttttttttttttaagggacgcagtcttactctgttgcccaggcagagtgcagtggtgccatcatagctcactgcagcctcaaactcctgggcttaaggaatcctcctgtctcagcctcctgagcagctaggaccacaggcatgtgccactacgttcagctaatttttcaatttttttgtagagatgggatcttgctctgttgcccaggctggtctcaaactcccgtctgctttgagatgattatatatttgtgtcctttgttaatttagaggattattatggatttttctaatgttaagacacctttgtatttctgagatcgaccttagtattggtctatatttaagacagtattcagtttctcagttgttttttgttttttgktttttttttttgagacagagtctctgtctcccaggctggagtccagtggcacaatctcagctcaccgcaagctctgcctcccggattcacgccattctcctgcctcagcctcccgagtagctgggactacaggcgcctgtcatcatgcccagctaattttttgtatttttagtagagacggggtttcaccatgttagccagggtggtctcaatctcctgacctcgtgatctgcccacctcgatctcccaaagtgctgggattacaaggcgtgagccactgcgcccggcagcagtttctcagttttaatttggagttttgcmtctgtgttcatgagtgagcctgaaattttcacttttccatatcttatttctctgggttcctagaatgagctagagagtgttcctcctttctgttctctggaagagtttgtgtgagattagaatgagtgtgtctgataatttagttgcattcatttataaaattcctaggcctagagttttttttctgggaaaagtttacattttgactcatttttttagtagttttaggactgtttaggttctctatttcttgattgagccagttttgataagttaatctttctaatttgtagatattttctctaagtttgcaaatgtaatacataaaactttcttgtcatttctcaccatatctgtagttctatctttttattgctaatattactaatttgtactttgactatttgtatttgttacctgttgccgagtaacaatattagtacaaacctagtggcttagaacaacacacattgattacttcaccgtttctgtgtgtcagaagtccaggcgcggcctcgcaggtcgtcctctgcctcagggtctctccgggcttcagtcagggtgttagccaggacyggggtctcgcctgagcttccagtgaggaaggatctgcctctgagcacacagggtcctcggcacgatcccattcctcagctggaagctgccgactrccgtctgctgcggggcctctctagatggcatcttcacaaaagcgagaagggagagttggtagagggagtctgctagcaccatgggagtcgcggtcacacagacctcggtcccaggacccgcacccatcaaccctgccgtgatctgctggttaaagacaagtcccacgtcccacagggtgacactggagtagacacttcgctctggccttttcagagaactggttattttttggaaatatcagttagatgtaggatgggtcttgtcttctaaatctattgttttctctctaattgattttttcctgtttttatttagttcactttgttgggtttgctcaagcctgggtcactggatctcagggatgctgctcctgtttgcagctgtgtctgcaggggcttcccaaggccttgctttcccctcacgtccctttctcagactctgccaatccgcttcccgctctggtgtcctgtggttgcttctttttaaaaccctcatcggtctgtgtaaactgtttatttttatgtggtttttaagggagaccattctcattcttttgagaccctggaaaggatggaattgggataggtaaactgcwgttttaccagaatgttcactggaccaatctcgtgttccagggagaccctcacgcagggcttagagttctgtcggcggcagcagagggccgatggctcctgggaagggtgagtgagcctccactcgtgagtgcagagatgcaygggatccasaggtttctgctctcacacactgcgttcataaatgttggcttgtatgttgttgctacaccagaagtttctggaagtgagctgccagcccgtgacttctgggggacctcgttcctttgtggcatgcgtggcctttgccccggtggaaattgctcagtacgttgctgggcgcagccgggctgctgggagcgcgctgtagcctgagcgtggctattccctccaccctttctgcttgctcttagggtccagcagacagagctgctgtcttccacggccttaatgcctgaggcactggagttggtgggctggctggggcacgtgtgattgttgcagaatgcgtgttgtttcacacaccggctgtgaacagggtggaagggctgaggctctccctgtttccctccagctcctggggagtttgcttcacctacggcacctggtttggcctggaggccttcgcctgtatggggcagacctaccgagatgggtgagtgagtgcctgtcctctggtgggtgggggttctcaacccaatgctctgtcatgagtgttttttgctttgacatttggttttagggtttgtttgtttgtttgtttgtttttgagacggagtctcgctctgtcaaccgggctgacatgcagtggcatgatcctagctcactgcagtctcaaactsgtgggctcaagcgatcctcccgagtagctgggatcacaggtgcacgccaccaccccgggctaatcttttaaaacttttatgtagagatggagtcttgctgtgttgctcacactggtttgggctcaagcagtcttcctacctcggccttccaaagtgctggggttacaggcatgagccaatgtgcctggcctgtttttaatatttttaaacagtgagataagatccccggttgaaatgaagatgtttccctggtcccacagctctctggagcttcctgacatgtatgctggagggacgcttctggtctccggcccctccaggcatacagatgcctcccaaccctgagtaggaagattagggtccacggcctcgctggagcgggttagaaggcaggagatctccggtcccagccgtgtctccagccgccrgactctctcccagccctgtctccagctgccccactgtctcccagagtctgccgtgtggatgtttagaggtggggagcaccgtgcttggctgagtgcagcttgtgagacgctgctcccaagcactgcagacctcactcagcctgacgcgtccgtgaggccatcctcggtactcgcatgtccctttgtcttcccagcgactctgggaggcaggagtatctgttcccagttcacatctgcaaaagtcaagctcgggtttcagtagtggcccatggcccttaggtagggtggccccatcgtgcaggctcctccccgtamcccaaggcagcctgctggggtgagragccagrggtctgggaccttccttggtgtgatggtgtctcctgtctctggtctttgcaggactgcctgtgcagaggtctccygggcctgtgacttcctgctgtcccrgcagatggcagacggaggctggggggaggactttgagtcctgcgaggagcggcgttatktgcagagtgcccagtcccagatccayaacacatgctgggccatgatggggctgatggccgttcggtggggacgacgggaccgtccctgagccttgggtttgggtagaggagggacactcagctgtgagccggtggcctgggctgagtgaatgtagagaggaggggaggcctgtgggccaggtcagctgccactctgggaacagacacctacaagagccacatgcctggttcctggggcaagaacgtgggctgctctgaccaagtggggccctgcagagaggctcgcctcttagaagtgaaccacccaccattagccatgtcagtggaagagcaagcacatcagggacccatggaaacagcgaggtgggctgcgatgaggatgctgcttcctggtgtggtagtgatgacggtcacagcagctgctctctgtggccctactgtgttcacagctggtgctgagccacatatgtgccaggtgcacacacacgcagacgcatgcaggcaggcatcagtgtacacactgatgtgcacacacagatgtacatggagacagatgcacacacaggcctatgcacacacgtacgcatgcccacacaggcacctgtgtccacacacatacagatgcacccacagcatcccatctgtgccacacactgacataggtacatggagacagatgcacacacaggtctgtgcacacacgtatgcatgcacaggcacctgtgtacacacacgtacagatgcacccacaggatcccatctgtgccacacacagacgtaggtacatggagacagatgcacacacaggtctgtgcacacacatacatacgcatgcacaggcacctgtgtacacacatgcagatacacccacagcatcccatctgtgccacacacagacataggtacatggagacagatgcacacacaggtctatgcacacacatacgcatgcacaggcacctgtgtacacacacgtacagatgcacccacaggatcccatctgtgccacacacagacgtaggtacatggagacagatgcacacacaggtctgtgcacacacatacatacgcatgcacaggcacctgtgtacacacacgcagatacacccacagcataccatctgtgacacacacagacgtaggtacatggagacagatgcacacacatgtctgtgcacacacatacatacgcatgcacaggcacgtgtgtacacacatgcagatacacccacagcatgccatctgtgacacacacagacgtaggtacatggagacacatgcacacacaggtctgtgcacacacatacgcatgcacaggcacctatgtacacacatgcagatacacccacagcatcccatctgtgccacacacagacataggtacatgaagacagatgcacacacaggtctatgcacacacgtatgcatgcacaggcacctgtgtacacacatgcagatgcacccrcagtatcccatctgtgccacacacagacatacgtacatggagacagatgcacatacaggtctatgcacacatgtacacatgcacaggcacctgtgtacacacatgcagatgcacccgcagtatcccatctgtgccayacacagacatacgtacatggagacagatgcacatacaggtctatgcacacatgtacacatgcacaggcacctgtgcacacatatgcagatgcacccgcagtatcccatctgtgccacacacagacatacgtacatggagacagatgtacacacaggtctatgcacacatgtacacatgcacaggcacctgtgtacacacatgcagatgcacccgcagtatcccatctgtgccacacacagacatacgtacatggagacagatgcacacacaggtctatgcacacatgtacacatgcacaggcacctgtgcacacatatgcagatgcacccgcagtatcgcatctgtgccacacagacatacgtacatggagacagatgtacatacaggtctatgcrcacaygtacacatgcacaggcacctgtgcacacatacatacagatgcacccgcaacatcccgtctgtgctgccctattaggtttgtggccatttggggaatcttcctaaaaccctaaaagctagggcaggtctgcttgagcaggagcagcagggtctgggggacccctgagggcaggacagtcagggacccacagttgagctgggcccgctgagccctggatccttcttggtgtcttatcctggccagcaagcaagtgtgagctcctgtgggtctccagaggcccatgaggaccagtgggccagktgggaacaaggcttggcgtcctcttcaggggggaacaccagggcaggcctgaggaggcctgtgtccccagcctgtcattgctgtggctcygcttctcagggagcctaggaagaaggtgtggcaagagcccgaggcgctggctgcacctggcggggcctgtgggcgtcagtttagacccatccattctcactgcagcattccagggtttgcccttatgctcggctgtgtgagggtgaggatgatgctgtgggggcatgcatgctgggtgtgtttcagccttctcttccaccaggcatcctgacatcgaggcccaggagagaggagtccggtgtctacttgagaaacagctccccaatggcgactggccgcaggtatgccgccagggacctgagcgcacaaggcccagcactgacctccagcgtgcatggctgtttccacgtccccctgctctgtgtcctttttggggtactttggacacttgggaggcgtcacctctgccagtgaatgccacagttggtggcaggtctgtggcaggtggtcgggtcctaaagtccagatcttgctgttgtttcaagtgatgctctgggtgggggaggagctggatgggagaagccagtgggcgggaagcctttttgctgcaggacagaccctcccactccagatgacctagtggcccctcactgagccagaagtccctgtggtgtgggtgtcatgaggtcatgtgaggccaaccgccctcccctgggatgaggctgagttggtggaagctgatgtggttgtgaggggctggtgaccctggcttagggtytgctgcagggcggggagtctgagctgggctgatggtgccatgactgaygcgggatggactacttgctttcctatgctcttgcttaattagccctttccaggctgactcacccacaagccagccaagccaacagccagggctccagttcagggactagccctcagctgactggtgaagcctttgtgtttatttctctgtgttcttttaggaaaacattgctggggtcttcaacaagtcctgtgccatctcctacacgagctacaggaacatcttccccatctgggccctcggccgcttctcccagctgtaccctgagagagcccttgctggccacccctgagaacatgcctacctgctgggtgccgtctgtgcgttccagtgaggccaaggggtcctggccgggttggggagccctcccataaccctgtcttgggctccaacccctcaacytctatctcatagatgtgaatctgggggccaggctggaggcagggatggggacagggtgggtggcttagactcttgatttttactgtaggttcatttctgaaagtagcttgtcgggcttgggtgaggaagggggcacaggagccgtgacccctgaggaggcacagcgccttctgccacctctgggcacggcctcaaggtagtgaggctaggaggttttttctgaccaatagctgagttcttgggagaggagcagctgtgcctgtgtgattccttagtgtcgagtgggctctgggctggggtcggccctgggcaggcttctcctgcaccttttgtctgctgggctgagggacacgagggcaaccctgtgacaatggcaggtagtgtgcatccgtgaatagcccagtgcgggggttgctcatggagcatcctgaggccgtgcagcagggagccccatgcccctgggtcgtgagcttgcctgcgtatggggtggtgtcatggagcctcatgcccctgggtcgtgagctcgcctgagtatggggtggtgtcatggagccgcatacccctgggttgtgagctcgcctgcatatgcagggtctgtcatggaacatcccaagtctgtgcagcagggagccccatgcccctgggacatgaacccacctgcgtggaatgctgtttgtgaggtgtctacagggtttatagtagtcttgtggacacagaaatgcacaggggacacttacggacacagaaatgcacaggggaggccgagcataaccaggggtgaggggcaggcagcagttgtagttactgccgcggggcactgctatgtgcagggacagccagcrcccagcccatcaccactccctgggctggctggcaggtatggcaccctgggagcccggcatatacccagggcacccctacggctgccgccagtctcatgcccaggtgggtgctctgggctggagcgagggccaggttttgggccgaggcttccccaggcaatcctgtgagctcccttctagcctctgacccagtctggtctggcttgcatggatgtagggcttggggtgggaagttcaggtcctggctttgcctttgcctgatgtggatgagcagctcacatgctcagggccacctgagactgtcactgctctcccctggctactgggaggagtcrctgagagcttcgttacccctgctgccttgcccagggcacaccctatacctcctyatctgctcttcccctccctgccgccttctgggcaggtagcagtccctggcctctccccctggctgatcactctccctcaggcagtggagatctgcgtctggacaccctcagatcctgtcattgcctgcccagagtccttcaggggcacccctctgccttggtgtgcrgtccagggctctcacccaggtgccgcaccctctggggtcttctgtccagctcccttgccccatgtgctgtcactgactctccttgggactcgcctgcctgctcagagccctgcagggcttggtcagctgcctgttcagtgtcaacacttccctgcacatcttaaaactgggctttattttcgctgaaggaactgtgttgggacccttgacatctgtcaggtttgcacatgctgtttttttttctcagcccacgtgttctcccccacgtggggtagcagcaggacagacagtgaatcacagagtctgccctgagcagaggctgctgtccctgggactcctagccatggtcagactgtacaaaacggttttccagaaatgaaatgtaaatccatttttatactgaaaatgttactgaaagtcacttttatgagcatctgccttaataaacagacattgattcccttatcagaagcctgtcacactgtgtttcgtttcatcctggggagaactgcagatttggggtttctggctgtcatacgtcacctgcctgtggggcgagtgggaggcccagcctggtttagggaacaagagtgacgtgaggagtagcagggtgcgtctccagttacctgagggaaaacagatattttaagagataatagcatagcctattttaatatgttttaaaggccataagcatatccaggaagataaataaacgtgatacaatgtccacataggaggaactttctttcactgcattgttttccttcacagtggccttcaagtcacaggacgcagcgattccctgccctcttcggtgttattacacaggcaggacttcagtgtcagtatccctgccttcagtcttctttagaaatcacatctgtgttcaatccattgtttagagggagtgtatttttcctgttccaygaagaggactttttgttcacaattggatcacaatgcagaggagtctgttcctcccccgtcggcttctcggtgctgggagggtgacctgtcccagatgactcatcmccctgacatgctcttgacaaaggacaccaccaagaggagatggcagctgtaccggtgcagcctctgtctgagggggatatttgcctcagtgtgattaaaaatcagtcatgaaagatttttgaattcagattatttttatcaggaacagattttgaacatcctgaaatcttttccctggcatcatattaggttttctttgttcactatgatgtaaagtttcagactcttgatatttttaatatcaacatagacggtaggacaaggaacggtaccagaaatgagtaaagagacaataatgataagatcgatttatcaagacataacaaccccaaatgtatatgcactaaataacagcttcaaaatacatgaagcaaaatggcagaattgaagagaatgagataaaaacagaattttaacgggtgctttccgtactttgtaactgacagacatgagatctgtaaggacagagatttgaacatcagccaacacaagcgagcggtctttagaggatgcttcacctaacactgctgaagcacacggctttgcaagagctcgtggcccatgtgctaaggtagaccacagctggctcaccaggtgagtctcagtatgttagcaaggacggaagtcacacacagcatcctcccccaccacagtggagttaaactgaattgaaaatcagtggcaaaggagcaaaggcagttcaatggagaaaggacagccttcaacaaatgctgaaacaaactccatttgtaaaaaaaaaatgaaccttgacatacccttcacatctagacatactcaagatcaatcagagacctaaatgtaaaacaaaactataaaacccctagaacatcacataggaggaaatctaggtgaccttgggtttggcagtaactctttagatatgacaccaaaggcatgatcctcgaaagaaaacattaataggttgggcttcattaaaataatacatttctggctcatgcctgtagtcccagcactttgaggggccaaggtgggagggtcacttgggctcaggagttggagaccagcctggataacagtgaaaccccatctgtacaaaacagtcagaagattaggcaggtgtggtggtgcgtgcccgttgtcccagctactcggaacactgaggtgggaggattgcttgagcctgggaggccgaggctacagtgaactgtggttgcgcggctgtgctcttaacttgcgtgacaaagtgagaccctgtctcaataaaataattaatgaaactgaaactttctgctctgcaaagaatgtcaagaaaatgaaaagacaagtcagagactgggagaatatatttgaaaaagacaaaggatcagtatccaaaagagctcttcaaacccaacaataaaacaacctggttaaaaaatgggctgaaggggccgggtgcggtggctcacgcctgtaatcccagcactttgggaggccgaggtgggcggatcacaaggtcaggagataaagaccatcctggctaacacggtgaaaccccgtctctactaaaaataaaaaaaattagccgggcacggtggcaggcgcctgtagtcccagctactcgggaggctgaggcaggagaatggcgtgaacccgggaggcagagcttgcagtgagccgagattgtgccactgcactccagcctgggagacagagtgagacttcgtctcaaaaaagacaaaaaagaaatcaaacaaacaaaagtggctgtgccaatttgcattcccaccaacaatgagttcctgttactccacgtcctcagcagcatttggtggtggcagtgttctggattttggccactctaaaaggtatattggtagttttaatctgcattcccctgatgacatatgatgtggaacatcttttcatatgcttatttaacaactgtgtatcttctttggtgcggtgtctgttaaggtcttcagccttttcttttttttttgatacggagtctcgctctttcgcccaggccggagtgcagtggcgcgatcttggctcactgcaagctctgcctcccgggttcacgccattctcctgcctcagcctcctgagtagctgggactataggcgtagcgaaactgctctggcctgacactgtgatggtggatacaggtcattatacatttgtccaaagccagagaatgtgcagcatcaagagtgagccccattgtaaactgtgggctttgggtggtgacgatgtgtccatgtagattcatcagctgtaacaaatggaccactctgggactgagtgtgggtgtgcgcgcctgtaatcccagctgcttgggaggctgaggcaggaggatctcttgagcccaggcatttgaggctgcagtgagccgtgatcatgccacttgcccttcagcctgggcaatagagcaagaccttgtctcaaaaaagtaccactttgctgcaggacgtttcaaaaatattctcccagtctctgacttgtcttttcattttcttgacattctttgcagagcagaaagtttcagtttcattaattaaagtattttattgagacagggtctcactttgtcacgcaagttagagcacagccgcgcaaccacagttcactgtagcctcgacctcccaggctcaagcaatcctcccacctcagtgttccgagtagctgggacaacagacacgcaccaccacatctgcctaatcttctgactgttttctacagatggggtgtccttctcttttgataactttggtagggtttgtccatttcctgtggttgtggagcacgggcatcaagctttaactacaccccacaaattctaatgtcatgtttttattctcattcaacttgaaatattctctggtttccttcgtgcttttgtctttttcaagacttttttaagaggagttttaggttcttagcaaaattgagaggaagatagagagatttccccactcgctgccccaacaaatgcacagcctcccctattatcaacaaactacctgacagccacaattgtcagcaaaacgcacatgagggaaaaatataaaatataagtagcgttgtatctatttaagaaattgatttagaaatttaaaacttttccagaagaaatctagttctagatagcttcacagatgaattctatccgacgtttaagaaggaacacccagaaaatggcgcagaatctctgcggctcattttaaaaggccagtgttccaaagccagaccgagacatcacaagaaaaggagattcagatcgacttcccctgtgagcataaaaatacttaaaatattaataaattgaatccagcgctatattaaaaggataatgtgtcaagaccagaaaactgtcagaatgttgataggtccgtggctggagagtacctgacgtcaagagaaggtttccttggagcgggaggaagacggcatttaaaatatgatgggaggagccagggcaggaaaagccattcagggccccgtcgggctcagagcggggggcgcatccgtgactcatccctcgcttctctctctgccctgcatcctggacgccctgcatgccctcgtcagtgggctgtggctgggcccccgttgtcttgatctgaggtgtgagccctgtggtgcaacaccaggctggttgggttgtgtcaggaacgcttggggtgtagaaacctcctttctccacaaagcctgactcaagactttctctcctagaagcaaccttcccctaatctggccgcccgggctgaatgaaggtggtgttctcccaggggcatctgcacctgagtgcccttggtggtcctgagtgcccgtcacagggctggaggtgtggccggcccactgggatggtggtggtggtgggtgcccatcacagggctggaggtgtggccggcccactgggttggtggtggtgggtgcccgtcacagggctggaggtgtggccggcccactgggttggtggtggtgggtgcccgtcacagggctggaggtgtggccggcccactgggttggtggtggtgrgtrcccrtcacagggctggaggtgtggccggcccactgggttgktggtggtgggtgcccgtcacagggctggaggtgtggccggcccactgggttgtgctttctgccgtacgtcccttcccatgaggatgagatgacccatctgttgcatcccggctgctgataaaacaagaccctcggagccaagaaacaacactgaggtgatttactttcccaagtaattgaagcagggagtcagggtgggtttcaagtcggtcgcactgactgaggacagacgcctgctctagcagggccccatgagccgcagccctgtgtgacggcccgaggggccgtggccatgggttgggggcgtcctcagttacgtgcaggcaggagcagtgcagtcaggaacaattggtgtcttagacacgggcgctcgtggtctgaggggtggacatgcactgctggacccttctcatcagggagtgaggtcagtaggtggcctccagcccagccctcagggccacccagtgctccaaagcatgtgggggccatcgtggggctgcctcaggctggtctccccaccctaggctggtctcccccgcaagactggtctcctcccccaggctggtctcccccacaaggctggtctcctcccccaggctggtctcctcaccaggctggtctcctcccccaggctgatctccccgcccaggctggtctcccccgcaggctggtctcccccgcaagctggtctcctcccccaggctggtctcctcaccaggctggtctcctcccccaggctgatctccccgcccaggctggtctcccccgcaggctggtctcccccgcaagctggtctcctcccccaggctggtctcctcaccaggctggtctcctcccccaggctgatctccccgcccaggctggtctcccccgcaggctggtctcccccacaaggctggtctcctcccccaggctggtctcctcaccaggctggtctcctcccccaggctgatctccccgcccaggctggtctcccccgcaggctggtctcccccgcaagctggtctcccctgcaggctggtctcctccccaggctggtctcccccgcagactggtctcccccacaagctggtctccccaccaggctggtctcccccacatgctggtctcctcccactgcccttgccagtccctccctcctcaagtgtgggtgccaaggacggaccctgatgaacacctgcacatcagttgctgccctgggtgccagggtccacaggaagctgcactgggaaccctgtgtcctgggcaggtcctatgggaagtgcagcccacatgttactcgggtgaaggcagcgtccccacccagcttgaggacaccacacagggtggacacccgaccctggctgggccgctcaatggggagtggcttggacgcccctcttggagtacagtcgctacatcccgtagctgcctaatgtccttggcattctcgggccctggtcataatgtgggagtggctgcctgtgcacgccacgggcctccagcttcactgcctcaacggggccatgagccatcgcgggggcaggcagggtgctgggcacctcatcactagggcagtgacatcacaaggcgtggaaggcggtggtggctacggaactccgtgcctgggctgtttctgtggtgcctgcgggctctgggctcccacctccatggggctgcaggagccgtgagggacaaggagggacgcacccgccatggctgaaggcggcgagctgatgagccggctcctgagcgagaacgcggacctgaagaagcaggtgcgcctcctgaaggagaatcagatgctgcggcggctgctcagccagagctgccaggagggcggcggccacgacctgctcccacccagggcgcatgcctaccctgaggccggctcccccgggagcggaggtgaggcgccgcccagctcagatggcctggtagatgagggggtcgcgggacgcctgctccccgggagtcgagggtggcggccagctccctgatgcgggaggtcacgggcacctttcacaccctcaggtctgagtaaagcaagaccaggtggtgggttctgctgttgccctcaggtgaggcccctcccctccccttcggtcgctggcgaagtgggagtggtcaaccgctggcaggtggactggtcagctgcagtcatggaagtgtccccataggggtagagcaggtggcrcgcaggcttgtgggcctccagggccccaggcagctcttccaggctggtcctggctggcagtttgctctgctgcatgtgtctcttctcctgggtcaggggcgaggggggtgtcagaccagccacacgagtcccatgagtgctgtgtcccatccactcatgtccccggccagagccaggccagccccatggtgggaaggtcccaccctggggaggcctcagagccaccggccaggggagcaggtagggacaagtgggcgcctgtccctgcggggctgggagtgtggagccatgatccactcaccacatagcattgactccgaccttctgtggctttttactgaaaaaagtatatatatagggtttggtcactttctgcaaa

SEQ ID NO: 95948 - DNA, 42064 bp, Homo sapiens
  misc_feature (1)...(42064): n = A,T,C or G
aaagtctgctttttacaatatcagtatgatttgtgttttacactatcagtatggtttgtgttggtgtggtattgtttcactcttttactttcaactaaatgtttctttatagtaaagtatgtttcttataactaccatttagtcaaatctctaaaagagatacttaaaaatattggcattggccgggcacggtggctcacacctgtaatcccagcactttgggaggctgaggtgggtggatcacttgaggtcaggagttcgagatcaggcagaccaacatggtgaaacctcatctctactaaatatacagaaaaaaaaattagctgggaagggtggcacacggctttaattccagctactcgggaggctgaggcatgagaatcgtttaaacccaggaagcagaggttgcagtgatctgagattgtgctactgtactttagcctgggtgacagggctagactctgtctcaaaaaaaaaaaaaaaaggcatgttttctatctttacatttaatgttgttacaaatatagttgggtttaattctgccaccttgctgtttatttttattttattttttattatactttaagttctgggatacatgcctagaacgtgaaggtttgttacataggtacacacgtgccatggtggtttgctgcactgctgtttatttttcatttgtcttgtctgttttttatttctgtagtactctcttactgttttcttttccatttttaaaatttattatttttcttttatcttctattttgcttgttgtcatacatcattgtattttttgagatctcattatgcactcttgacctgcctgaagttattaggatacttttgctttgtcctaacaaagatccagcacgttacaattgtttatttatcccccttgctctgtgtgcggctgttggcatatattccacctctacacattataaacctcacaagtcacaattattgttgatttaaggacaaatgttaaaaatacatttatccatttatttacactttctagtactcttctgtccttcctgcagttatgagattatcttattttagcctgaagttcttcttttagcattttagtgcatgtttgcttcagtcagattctgtttatctgaaaatgaatttattttgacttcctttgtaatggctattcttcttaggcttagaattatacatcagcagatttttctcttttttttttatcattatactgtaagttctgggatacatgtgcagaatgtgcaggtttgttacatatacacgtgccatggtggtttgctgcacccatcaacccatcatctacattaggtatttctcctagtactatccctcccctagccccccacccgctgacaggtcctggtgtgagatgttcccctccctgtgtccacatgttctaattgttcagctcccacttatgagtgagaacatgtggtgtttggttttctgttcttgtgttagttgctgagaatgatggtttccagtttcatccatgtccctgcaaaggacatgaactcatcctttttatggctgcatagtattccatggtgtatatgtgccacattttctttatccagtccatcactgatgggcatttgtgttggttccaagtctttgctattgtgaacagtgctgcaataaacatacgtgtgtgcatgtgtcttcatagtagaatgatttatattcctttgggcatatacccagtgatgggattgctgggtcaaatggtatttctggttctagatcattgaggaatcgccacactgtcttccacaatggttgaactaatttacactcccactaacagcgtaaaagcgttcctatttctccacatcctctccagcatctgttgtttcctgactttctaatgatcacctttctaactggtgtgagatgatatctcattgtggttttgatttgcatttctgtaatgaccagtgatgaagagttttttttcacgtttattggccgcattaatgtcttcttttgagaagggttcatttctcttcattattttttctctaatcttatcttcacactttatttcattaagttgatcttcagtctctgatatcctttcttttacctgattgatttggctattgatatttgtgtatgcttcatgaagttctcgtgctgtgtttttcagctccatcaggccatttatgttcttccatttggggctgggtttatagttttgtaacccctatgccaaatgttgacaccttatagtaattggcagggataagtaggaaattgcttgataaataaatgcaaacaaaaatgtatgctggcaattcttaagacatttctaaattactttgccactatttttaaagctaacttatttattaaagattttaagtaaacttaacatttgactagtctttccctttttctaataaagtattttatttgagcacttttatttttctttaattaataaataaataatttatttgagcacttttatttttctttaagccaattaattatagctcttctatattttttaatagagaaacattgtgtacgcaacacataaatacatagatgtattaggtataccgatagaagtacatcttatagattcctaagacctctttttttttttctatcttagacttgcaaactcttgatcatctgtgtcattgycctggcagttgccggctaaatagccctaaatctgcatattaaaggaaactattagatgaaaaattagatagcaaaatttacattttaaggtacagagaggaaaaagtctggtggtgctaaagagagattaaaaatggatgtgaaatcaaacataaaattatgaaaatctatcataggattgtataaggagaccagttttatttagacagagactccctatattttaactggatctctgagctctgggcagaccctacactgaatcctgggtctccaaaaagcgaaaattattatgaggttagactacatcatgcttttacagtgcacttaaaaaacttttttcaacaaagacatttctacatgtctaaactatactattccttaagaactccagagtagcctctgttgcagtaactattttagtaaaaaaattaggtaacacaatacaaaagcaagcagtttaagagctgagatgaaaaaaaaaaaaagctgagatgaacttgtctgtttacacatttggggttccataaggaaacagaggtttctcctccaaggggaatctggcaccttctccgttttctgtaaggaaccctgggtattacaaactatattaggtttcccatgaagcagagggtgcaagagaaagaagacacgacaaaagtaaatgaagaaaacagaagccagtcaactaagaagaaaaaaacttttgctcaaaaagacaaggtcctaggagagaaaaaaacaaaaaaaacaaaactggaagccttttaaatacaaacacacacacacaggcacacaacacacatatgttggatgttagcttttaattaagcttttaaccattgagctccttaaaaataaactttttcaatctcattactggctgggcatggtggctcatgcctgtaatcccaacactttgggaggccgaggtaggcggatcacttgaggccagtttgagaccagcctggccaacatggtgaaaccccatctctaccaaaaaaatacaaaaatgagctgggtgtggtggtgcaggcctataatgccagctactcaggaggctaaggcatgggaatcacttgaacctgggaggtggaggttgcagtgagctgagattgtgccactgcaccccagcctggaacacagagccagactctgtctaaataaataaataaatctcattatcatatttcagctaggactaattgctgctatttcagaagtaccaagtatcaaaccagaaagggcttaatttaggaactaaacccaggctgtggtggtggaaaaaaagaaggcagaacccttaggtatggaactgcagtgtggggtgacagacattactctttttggttggtctggctagcaaaaatgtggccttgttatgtaagaaaagccctttaagtagtcaaaataaattttttttttctttttccttttgctagctgtttttctccccccaccacatcaccttttgtgtgtgtgtgtgtggtggggaggggttgaaacttagccacttcagaggcctcacttctcataatttggaactttcctttggtttcgatcaagtcagatagagttcgtcaaactcaatgcgaaaaagacaaaagaacaaaaaacagaaacaacaacaaaaaaaccagttaagcgaaacgaaggattgggcaatttataaggttactgagcacactaatggtaaggagaaattaagaccagctggttgttaatcttaatagccaagacaaaccccaattcagttacttcctagggatgggtctgaggctgaagattgctctctaccaccctagaagcagaggaagaaaacccctcatctttcctgtgggaagcgagctcaaactccataaacgagttacctgccttccattgtcatggaagcaggaaaaaactactacttccttatgttggaagagagtaaagcacaccccgccccccaacccccgcccaacacacaaaaggagttgtacagcaaaataaactagatcttgactaaatctgggtagatcagggattctctggagggggtgcttccaggcctcagcaaattgtcctattggtttgagccataaagatagctcaagctggtactaaggactgacagatttgtcaaaggtcagtggcacctctactcagaatccctttgtggttaccaaaatgtgaaccttgaatatctgagtcagatctcagtcaacttaggaagtttattttgctgaatttaaggatgcacgcccatgacacggccgtcggaggccctgatgacatgtgcccaaggtggtcagagcacagtttggttttatacgttttagggagacatgagacatcaatcaatatatgtaagatgaacattggtttggtccggaagggcgggacaactcaaagcaaaggcaggagggagcttccaggtcataggtaaatatgagacaaatcattgcattcccttgagtttctggttagcctctccagaggtggcaatcagatacgcatttatctcagtgagctgagagatgactttgaacagaatgggaggcaggtttgccctaagcagttcccaacttgacttttccttttaagcttaatgattttgcggcccccaaatttattttccttccacatttttttttttaaatcagacttaaggtctgccttgatgttaatgctggaggagtgtaaaaaggcatgtccaactcttacttcccttcgaggccagaatagtctctcaggttgaacttcagggtcccctggtaaaggagggagtccagtcagacggctgcgggggagggggggcttcgaattttatgttttacaggcattagcgccacccatttctccttaaccccaaacttcctctccccacaacagaaacgtcatcattctgcttccacttatccagaagaaaggcagagggcgcacactgcgcagcgcggatgggaaagttaactgaattatttgcgggaagacagaggaggtggggggtcccccaagccccagccattttgtggctcgtaggggttgtcgcttcccaagccgtgaatggcccaaacccgccccccgccccaggtcggactcctgccccgcgcccctctgggtcggaccccaagccgagccccccaaccccgcggctgggctgggcgattggggacgagctccacacatggagaacctggcctcgcctcgcwagrccgcgggacgcgcagatgtgaagtgcgcctgcgcggggcgcagccccwgctgcagacgatctgtgagcgasgcgccggcgcaagtcgagggcggtggcttggcttccctggaatgggggacgtcttaggactgcgcctgcgcggggcgccgggccctgggcggggccttcccggctgacggcctgcgtgcactgcgcttgcgcgggttgagggcggtggctcagkctcctggaaaggaccgtccacccctccgcgctggcggtgtggacgcggaactcagcggagaaacgcgattgaggtaggtgtcctgatgggcagctcagatggctggactgcacgtaaggaaggacaggccaggtgaggcgtcctcgcactgcgtgtgcgtcgctggcggacagaggcctccgcccccttttgggacctccgagcgccttcgcgatctcagccactttccctggcgtccaaacgggagctcggtccccgtcacacccttccctgcgtgccgcaccccttcccggccactcccgccgtccagcgccttctacggccacgcccaccccaccaccatctctgtcacgcccttcgcggccacgcccacctgcctggcggcccctgccccgaagctcgcggcgctgtcccagcctgaccctctcgtgcccctgcgtccacgcgtggccctctcgcttcctgcccccttctcaccccccttcactggccacctgttccaaccctccatgatcctgttcctcccgagggcatcttaggagggcagggtcctgcgcgcactgcggcctccactccgaccccgtcccagtttggacccaggtcttccaatgaaaatataattatgcaaatcagtaagcatttgtaactacgaatawcacaaaaataagcttcaagtctggatttagaagtgaagcatgcattttaaacaaagaattgctatgcaattttaaaaacacattgatcccagagcagtgtgtggattacactatcacyggaaaaatacgaattgagaagaaggaaaagactggaagatgcagaccttggttcctgttagtggaaacactgtaaggtcccaggtagggacttttaattggaattaaagctatcacacttctaagaaattaatgaatactgatttattgccttaagtcgacacctgatctaacagaaactaacaggcttcagcaaatgaacragattaacaccttgcagactagtgaagaaaacacactatttgaagtttatgatttttaaatgcttttgtctctgtaaagtattgtaaattttcatttctacactaatcttcacacatacacattttacttctatttggtagaggacatcatgcacattagaagttaagtgaactcaattattaagcaatgtaacaagtactttgtgtctccttctctttttaaaagtagaaatggaaaagaaaatgaaataaatcagcagttatgaggcagagcctaagagaactatggcaacatcaggtgactgtcccagaagtgaatcgcaggtaatttccgttccacttcctaaaaatctgtgtttaatgaatgtgagcattacagagagctaagcgtcagctcacagatgtgatggagcttggcttgtgccttggaaggtggccaccggcagtagaatgcttaaatgtgaagattgtgaggcagaggaaacgcagtgcctgtaaggtgacatcctgcattgggcaccataacaattctaaggaaatacttagccccaaaacatcagcatcatttagggttccatttttggtacgtgaactggcaaagcaagcatattttctgagctgttcaataaaatttcaggcataataccagcaatatattgaaggcaagttggacacattagaaaagatttatgtattcatactgtttctgcctggggtactcatgtagtttcgttcaagttagcagtaaaaaatacccctcaaattgtaaagactgttgattatgtaaaagtcaccaactgaataatagatactgtttttaaaaatcaagcatttccgtatctgttatgtcaattttaatgttttctttttttctctttcattccaatgagctttcatttggctttttatatataggaattttatttatagtcagaatctttcgttaatttctttaattattcataaaatgttttaattccgtggacatcttatttttcttttgagaaatttaacaaatattaggacatttccagaatgatattgtaaacrtcaagtacattaaacagtgtacattaagctatatatatgtgtgtgtatatacatatatgtgtgtgtgtgtgtgtatatatatatgtatatgtaaaaaatactgtcgggtgtgtctgtagttcagctactcaggaggctgaagcaggagaatcacttggggccgggagtttgaggatgtggtgtattatgattgtgcctgtgaatagccactgcattccagcacggccaataaactgagacttcatctcttaaaaaagaaaaagcgacactctagataaagtttgttccccagtctcagtcctattcctcctcttctctctctagaggcaaacactactgtgaatcatgagtctgttttgtgccactgcaccatttttatacctctatggcttatatagatatacttgaatgacatatgatattgtttgtgtgggctttttagagtttccatagtggtgtcatactgtcagtgtcacctgtagcttgcctcttcatataactttacctttggggaagttgtccttgttatgtgtgtaatgctggttcaatcctgccactgtagggtactcctgtagtgtgttccttctctgaaagtgtaaagtatcctatttgtagatatgtgtatgggcctgttgcagtctcactgctacacagtaggcatataccccattttacttattccctttttgttggacacttaaattgtttctagttttttctatttcaaacaatgctgtagtgaccatccgtctccatgcctctgtgctccagtaatggcattgcagggtgcaagggattgcaagtttcagttttactggataatgatcagttgttccccacaatgactttacgagttcacaggtctgtcagtagcccacaatagtgcttactaacacttgacagtatcagacttttaagttttggtcagtctcatgggttagaaatggtattttgttatttcaattttgctgactggtcatggtagtatttcagtaatacttgtgttcatcctgttaataccaccctccattatagaagagatgtcttataatggtaatttgtgttttatctctttttttcacacttgatcaatcttttcttagggttttatcaattttatttttataaagaaccaattttatctgtgttgatttctctgtttttctatttcattgatttctgcttttgtctttatttcattctgttgtatttgggttaatttttataacatctgagagggaagcttagataattgattttaaacctttctttaatagtctttaaagctatgactttcctctaatcactgctgtagctgtacctcacatatttaaatgcattttcattcttcaaaatattttctaatatattcaatggaaattagaagttttctgggctatttgaaagtatgttgaccaatttctaaacatattggaaattttactttttcttatttaattttgctttgattacattggttagagaacataacatcctctataatttcagtcttttgaaatttattcaggcttgctttatgttctaatcatatggaatatgttggtgagtgttccatgagtacttgcaaagactatgtattctgcagttgttgagtgtagcattctataaatgtcatgaagatcaaatgtgttattagtattgttgaaatctctatatcttttctgattttttttgccatcttctatcagttactaaaaattctccactatgattgtagatatatctatttttccttttggttctatcactttttgctttgtatattttgagtccctgttattgggtgtatatatttagtataggttttgttttctagattaattgaccttattttttataaaacatctgtctttttacctgttaataaatacttcttttcttgcgtgtaccttttttttaatgctaatatagctgtaccagctttttttttttatcattagtgcttacataaagtgtgtgtgtgtgtgtgtttgtgtgtgtgtgtgtgtgtattttttttccctcaacttaagtccttatatttaaagcgtttttctcgtaaagagctagttgggtctagctcttaggtctgtttttttgtttctctgttaaacacaatttctgcctcttaattggagtatttagtctattaacacttcatgttatgacgaatgtgatgaagtgtaacattttgctgtttgttttatgtttgtcacatttctttttcctgcatgtctccattcctgccctcttgtggataaataaaggattttctataattccatattacctcctttaatagcttgttagctgtatctttttatattgttttagtgttttcccaagaaattgcagtatgcatcctaattcaatttcagtcttttttttaactacttcataaggtaaagatcttagaagttagtttcatttaccagcgtccatatttttgtactgttgatgtaacattttaattttacatatgttgtaaacgccacaataaattatcattattgctttacgctatcgagtctttttttatgaagtaaaataaatagtcttttttatgtttccccacatattatttgccttttttgaggtctttccctttttcttgcattctgtgttttcatgtaggatcatttcccttcaacctgacaactttatgtttatatttactagtgtgagtctgctgtgtcaaactatgaaatgtgttttgcctacatttttttttttttttttttttgagacggagtctcgctctgtcgcccaggctggagtgcagtgatgcgatctcggctcactgcaagctccgcctcctggrttcacaccattctcctgcctcagcctcccgagtagctgggactacaggtgaccaccaccacgcccggctaattttttgtatttttagtagagacggggtttcaccatcttggccaggctggtctcaaacttctgatctcaggtgatctgcccaccttggccttgatggttttttttttttaattttggaaaaatctccaccattatctcttcatttatttttttctgcctcatcttctgtcttcttttttggggtctccatgtaaacataagttagaatttttgctgctgtttgacatgtctcatgctctattcttattttttttttcattttgtgcttcagtttggaaaatttctgttgacctgactcttgaggygctgatcataaacaagataactgggaaaacaatatgtttgtaaaacaatttcttgagatgtgaaatagtatctatattgtaccaagagtagtcccagctacttgagaggctgaggtaggaggattgctttagcttgggaggtggaggttgccatgagccaggatcatgccactgcactctagcctgggtgacagagggtgacctcatctcaaaaaaaaaaaaaaaaagcgtattcttcaaccctggcattctatcctgcagaaataaaatgtcatcacatmagcttrtctgtgcacagacttcttttattgcagcatcggttatggtggtagaaaactggataccaagacaaagtctatcaaagggggatggctgaagaatcaagyggaattcctgctatggaatatcgtatagccattgaaggtagtaaatcagggttctaacagttggagagtttttccagaaggtattgtgtaagaaaagcaaagtgcaggtcaggcgtggtggcccacgcctgtgatgccagcactttgggaagctcaggtgggcagatcacttgaagtggggagttcgagaccagcctggccaacatgatgaaaccccatccatttctaccaaaaatgcaaaaattagccgggcgtagtgacacacgcctrtagtcccagcctctcgggaggctgaggcatgcgaattgcttgaactggggaggtggaggttgcagtgagccgagattgtgccactgcactccagcctaggcgacagagcgagactccatcctaaaaaaaaagccaaacaaagaaacagcctgtgtgtgtgtgtgtgtgtgtgtgtgtgtatacgtgtacacagggctttgtgtgtgacatgggcatggtggaggtgtggaaggccgcacaccggggggttagtaagggttgcctgggctgggtggatcrgggatggggtggagagcaagcagagggcagtgctgccttagagtgagtcatgctcctggcatagggaaaagcacgaagggtacaaatagacagtaaggtaaaaaaagatgccagcaagtattttaaaaacgcctaaccacacaaagagagggaaatggaagtaacaacagtgatttttacccatgaaattgacagagactaaagtgattggtatctattgagtgagagtgtgggaagattggtggttccctctcagcaagcggtccagggaacacctttctggagagcactgggtggtaaaaccaaaagccacatagtcycagtccatcargttcacattcagagacttaccctaagaagattaaggtacatacagaatgatttatgttgaaagaagttcatcttaacatratttagaatagtaaaaactgaaaagtctaaatgtacaagactaggaaactggataggtaagtcctgataattcatagactggatattaaatagtgttagaagtatatttaataagaaaaatgttcagagtttataaagtgaaaaccataggccacaggcttattgtgtgaacccagtgaatgctttgtacttatgttacgtgtccacttttttaaaagtctgaaagtataaacaccaatgtgctgtctgttattatctgtgatcagtgagcaaaattacaggaggttttaattttcttctgtgtacttggtgttttcacacattttctaaagtaaacacgaattacttttatgtttaggaaaatgtgtttaaaatgyatgtattgagacaaggttgattcattgaactggagtgtgtgatctgaggttctgccccctgcagtgatgtcttccaggcaagcttattcttatataaagtgaacggccaggcatggtggctcatrcctgtagtcctagcactttgggaggatgaggcaggtggattgcctgagctgaggatttcgaggccaacctgggcaacatggtgaaaccccatctctactaaaaatacaaaaaattagctgggtgtagtggtgcacacctgttgtcccagctacttgggaggctgaggcatcagaatcacttgaacctgggaggcggcagaggttgccctgagccgagatcatgccattgccctccagcctgggcaacagagcaagactctgtctcaaaaaaaatggaggggttgggggaggctccaaggacctgtgtgggtccaagctgggctctgctgcctcgtggaggtttgtgccatgccatcagctctttccacaggcccctggctgtgcctgcctggggcgctgggcccctggctctgtcctcacactggtttctcttcatggggttgatgatcaccttcaggaagcaaagctgatgaaggacaagggctcctcaccaaatagacactagtggtgcctgtttctgacttcttgctttgatgttctcttttagggtccagataattttttttttyagaaaagaaatgtagagtgaaggtgacagcctttgattatagtagtaaagatgatccaaatagtttgtataataaatacttggacacatgaatctgtatttgaaatttgaaaccatcctaataatatagccaaaaaaaaaaaaaaaaagctccagcgtcctctcctcacgctttccttggctttgagcagggagaagagcctgctgagtgcagtgaggcgggtctcctgcaggagggagtacagccagaggagtttgtggccatcgcggactacgctgccaccgatgagacccaggtagccacacgtggtggttaatgctttatggctttcagcatgttcagtgtcaaaaggagataaattttgcagacgtcacaccaaagttaaatgaagaggtattcagatgcgtagggccacacaagacctgtgtgtgaagctcacagcccagccagttctgcctcaagcatgatgtaaagatacsaggcatggagtggggaccctcagccaggggcagaagcacctgttctggtttctacttggaatgtagaacccacccagttaatgaaaagtaaggctaccaaatatatcaagctatatctgcttggacrtagctttgtttactttgtgacaggaatttcttagagtcagcctccagtaactcagttggcatagttgagttacaatgaagaggctgttgagaaattctctcctaagccatttgaaaatgtttactccttcttttaaaaaatatctgttaagctgtgccctcctttcaggtagatgttccagaggcatcgctaagtcatggtgtcacttgcaaacattctcagttgctgtcattacccactgactcctgtttgaaatctctgtgattttgtcaccattgatgggatttatcactgagccacatttgaaataccaatgactggttttcttattgaattttaacttttttttttccagctcagttttttgagaggagaaaaaattcttatcctgagacaaaccactgcagattggtggtggggtgagcgtgcgggctgctgtgggtacattccggcaaaccatgtggggaagcacgtggatgagtacgaccccgaggacacgtggcaggatgaagagtacttcggcagctatggaactctggtattgctttctaaattccctgttcagctggccaggcggtgggttctctctagctttagttctactgcaacgttcagagcaggcccatagtcttacaggccagagctcctctgttgtagccactcagctctgacatggttgtgtggaagccactgtggatgacacacaaagtgtgcactgttgtgttccaataaaactttatttatggatcttgaaatttgaatttatactgtacagttttcatgtgtcacaaagtattttcttttgatttaaaaaaatcatttaaaaatgtaaaacccactgttagtttggaggccatccaaaaacaggtggtgggctagatttggcccatggcttagtttgccgacccctggcttagagatatgatttgagcaatgagattatgtgcgtgctccctcagtatttaaaaaaaaagcagtaaattttactttaaaaatgaaattaggctgagtgtggtggctgacacctgtaatccctacactttgggaggccaaggcaagaggacacttggcttgagaccaagtgttcaagaccagcctgacaacatagtgagaaaaaataaaaaatataattcgtctctacaaaaaaaaaattaaaaaaaaatataattagctgggcatggtggtgcacgcctgtagtcccagctactcgagaggctgaagtgggaggattgctcaagccttggaggccaaggctgcagtgagccatgatggcgctgttgcacttcagcctgggctacagagcgagagcctgtctcaaaaaaaaaaaaaatagaaaaaattctataaatctatgaataatactacttaggtcaggtgtggtggctcatgcctgtaatcacaggactttgggaagctgaggtcagagcatcacttgaagccaggagttcaagtctgtggtgagctatgattgcgctactgcactccagcctgggtgattgaaccagactctgtccctaaaaaaataataaaagcccagcttctaaatagcttaccgaaattttttccccaccatggagaaatgcctataacccgatggtccaggcaacaatctctggttacattttaaaactagatgaaaacagttacttgcaggatgaatgttataaaaatgatgttagttgaaagaaggaatagggcaaagaatctataacgtttgactcaattatataaagttaagaggccatattagaaggttttttgtttgtttttgtttttttttttttgagacgtagtcttgctctgtcacccagactggagtgtggtggcaggatcccagttcactgcagcctctgcctcccgggttcaagcaattctcctgccacagcctcctgtgtacctgggactacaggtgcgtgccaccatgcctggctaatttttgtatttttaatgagggggttttgccatgttggccagactggtcttgaactcctggcctcaagtgatcctcctgtctcagcctcccaaagggctgggattacaggcatgaaccattgcgcccggccggaaggtactgtttgtgagtgtgcatgggtgctgagactgactgagggcaggagtggctcccctgttggttgaatggaggttacctgctggtaggggaggctctgggaccagcgtggctgagtcaggagttctgacatgctggcagtgttctggggttggatataggtatagaggtgtttgctatataacaatacttgactaactctgcagatactttttattgcactttttcgcaggtatgccatatttcacaattaaaagtgttaaaaactattcatgtctgtacatggttagtgatttctatccgttaaggaaagatacataatgaaaagccaattccagcctcccacctctgccgcctctcagctcaaagaaccactgcccaccagattcctctgtgcttatgaagtccaagtgacacctaatgtattttacgtttttaatgtatagaaaaggcattgttccaccactcaggtcttcaccttgctcttttcacgtagctgtagtattttgaagatctctcatattggcacctgtcactctttataacagctgcagagcgttgtgttactttaaaagggtcctgttgatatttggacagtggttatttaatagctttttatcatgataaataatgctgtaatggagtcctgtataatcctgttaaatgctgtttagaatttctatagggtaaattcctacggggtgtgtgtgtgtagtgtgtacatgtggtttccttaagtggatcttgccagttcgccctccagaaagatttgctaattatacacttggtctgtttgtgctgctgtaacaaaataccttagactgagtgaattatgaagaacaaagctttgtttctcgcagttctggaggctgggaaggcattggcattggtgtccaagatggcgcctcatggctgtcctcacgtggtgaaggcgggagggctgggagcacctctttcaccacaaaccctttcatagtaacctccaaaggtggcctcttaatgccatcacactgacgattaagtttcagtacatggatttttggagacatttcagaccgtggcatgatggtgtgtgaaagctcatttccctaccacaaatcaaagtgaaaaaggactttgatcttaaaagttaaatatggcatcttttagttttgatttccattttttaagtaagattgattatcttttatgtgtttatgggccttttgtattttttctttttttgtaaactttcatattatttgccccttttgatttttgttgattcgtgtgttaagtaatttagcctgaatttgtgaagttttgtgactttgtgaaattttttcccacgtacaacttttttctttgtatagcctaatatggttttcttttctttgtgacttctttttcttttctttgtgaaaaaccttcctcactataagattataaatacccacacttttgttttcagaactgttatgattctgtgttattttatttttgttttttatgttttttagagatggtgtcacactctgtcgtatgagtggctggagtgcggtggtgcagtcatagtgcactgtatcctcaaactcctgggtttaagggaccttcaccttagcttcccaaagtaccgggattacaggggtgaggcaccctgcctggccttctgattctattttaaacaatgagattttaaataataaaaaatctagaaattatttgttgtaaaaaatataatgtaaaattccgccctaatgtatgcccacaaatctccagcgaccccagcctcagttactggacagttcccttcgcgttgatgtgaaacggtgcgtttgtcctgctctggatttcaggggtctgctgtagaattcctgttgtttcactggtctgtttactgcagttcccagtgcttcgtcatttccatcactgcacctttgtaggatctgcaagagctaggtctccagcagttcttttttttttaaagcattttcctcattagccttgggcacttactgttttgaaactaattttattatcattttgttgtgctttctcctttagtaggtactgcatggaatgtttatgttaattttgggagagctgacatctttataacattgactctcagtctctgattacttaagctttgtttaatatctcttagtattttaagataaggacaatatctctttgtcatacatggttgtgcacctttcttgttaaatttgttcctaggtattttttgtgtattattactgttataagggggtgggtgaagtgttctctaaataccaatgagattaacttggttgacagtgatgtccaggccttccatagtcttccataggggtgttggggtcaggggtcatcagctgtggctctgaccctccatctcagtccagacctcagcatggctctaggtcacaggcagtgattctgaatgtgcatttcttccagaaactccacttggagatgttggcagaccagccacgaacaactaaataccacagtgtcatcctgcagaataaagaatccctgacggataaagtcatcctggacgtgggctgtgggactgggatcatcagtctcttctgtgcacactatgcgcggcctagagcggtgagtggggtctcgagcgcatcccgggtgtttgtgccgaggctggtgacgtccgaggtggcctctgagtgtgctgacttgtgaccctgagctgttgggggctcaccggtgactccatggtcttgttgagcaccctgcacgtggggctcagggtcggtaaaatagcagtgcgtggagaccgcgtgctagaggccgtrgcgcccgcgtacaatgagtcgcagacagcacagacgggagtagggcagaatagacaatatcccgtgaattgcgtggggcggggtatgttctgtgagacgtttatttcagttgagtagagaaacacgtgcacccacatgtctgtgctgggccttgggtgtggttggtctcatggggttgggagggatgcacacgctgggccccctccccacccctcttaggccgtctatactgtgctgagctgagccgagctgcagccttggagactccttacacagtgggtggggtcgcagcacagtgtccacccaagtccaggctctgcaggacccaggacccagcgcttgggtgcttcccaccagacccttccctgagaacctgggtttgaaattgtctgacaggcctcagatgtggcacagaccagcattgtcacttgggtgctaagaagttgctgtgctggtcatggattaagattgctgtgcgtgtggcagccggctcgggcatgcgagtcttccatccacttgcagccctgcgtctgtgtcttgtccgggaggtgggggcagttgggagggttagaggcggctcctttctgggtgcccctggaggggcaggtgtggccagtcctcgctgcctctgctgtctggaatgctgcttccctcttgtgtcattgaccatttctcgtgatgctggttgtgactcaggagagtagatgacgggccgtgtgccggccggatgtacgctgacggtgcctctgctgctgcaggtgtacgcggtggaggccagtgagatggcacagcacacggggcagctggtcctgcagaacggctttgctgacatcatcaccgtgtaccagcagaaggtggaggatgtggtgctgcccgagaaggtggacgtgctggtgtctgagtggatggggacctgcctgctggtgagggcgggcgtgcgggcagctgggggcyggagctggggggcttytgagcacgggctcggctgggccaacctcaggatctcaagggtcgtgcgtgattcattttgatgttttccctaatgtgaggtctaattaatttcttgtgtggacattggctcagtgtcttgaattttcacctgatttaaaaaatgcctttatgagaaatttaagtcaaagttcatgtaacattttcatgagtgatttacatgaactgtgttctcctcggggatctgtaaaaaycctgtgcctaacaggtaaggctgtttctttaatgccagtagggccttcgtccctggccagggtctcctcgccttagactggccccagtgatgctgtgaagccacttgggcatctgtagggccagcatatgcctgtcctgtcagggttgctcaccctgagtttcacatgtgggtggaagtggactgttttctggttgcctgtgaatatgccctgcacaaacgctgtctgcttggagggaagttgacgggagtgtggctggatgctgtctgcccggcgctgtcttcctgggctcagcatcctgggacacaggacattgtagtggagcatcccaacctgaaactttgtctcagtgtagagacccagaaagatggggtctgggtgaaggagtgtggagtatggctgctgctttccaggaaacggtttcccctggtaacagatggcattgggcttttagtcctgttgaaattttgttgtcagaagataaatgtaaatagactcaatgtccatgctgtgacttggcttattaataacatctgtggagccataagatgacacacaggagaaacgggctccactcctaccccctgaaggggcatttgcctttgccctgaacagcagcgcccattcaataagtatctgttgacagctggtgccccggccacggggacaaaaagaggacagagcaggagtgaggctgtggtgaggccaaggttgtgtgggcggtgatacggggaagcctggctgctggagtgtccggctgtgccctggattgggtgagagggacacaggagggacgtggggcagagggaggggagaggagtagccactgtgttcaccgtgttgccgtgttccagggctgcccagtggccggattggccagactgtgttgcatcagggaggcagaggccagatgtagggaactgtgtgtstgaggactttgtgccacgtcctggacaccgaagggagtgccactggtgtgtgagtgatggagtaagaggtgggctgtgttttggaggcccctgggtatgtgtggccgggactggaggccagggactggctgtggtccagccccagcatgcagagaggcctgggacattctgtgtgaggggaggcccctctgtgtgggaggtgcacagacttccaggactgaccatggctttattgtcaggatgcaggagccagggcttggcatggggcaggtgtggggatgcagagcagggccagcaggcaggatgtgctgatgggggcctggcgtgagcaggacggtgcctcccagccctgagccgcagggagtgggccaccaggactggctgggggccggggtagggagggccctggggagggtggacatctgtgtgggtcttgaacataggatgcccatccgatgtgcagggccagctattggttgggcagtggggacatggcctggggtctcggtgggcgatggcctggaggggccaccctgagcaggacatttggaggagtgctggggtgagtcagacaggaccatgtggtggttttctccagtgcaggcagtggagggggaaggcggagctttgcaggtgagggcttgaggcagttccgacttcagactcccccscagggagactgagggaccaccaccatcattactcaggccaaggaggcccagaacagggcagacggggctgcaagagttcctatggcgatagttgttggggcacagggttggtcggatttgagggagggagggtatgaatctgggagtcgttggtgcggttgtacccaccttcactttccgtccccaggctgcgcctctcctgagctgccgcattctcccctgcacctgtgcgtctggccctcttcacgtcctcctggcctgctgtctgcctctcccctgcacctgtgcgtctgtccctcttcatgtcctccttgcctgctgtctgcctgttctcagagcccctcagccctcaggccttcatctctcctggcccatcttcctactctgacgctgacatgtagtaaaagtctgaagacagagaagagtgcatgtgcgtttagcataggaggggcagctttcagtcagtgcagcaagggcatgtagttgttcagagatggtgctggaacgactgatttggagaaaagaggcccttcttcacaccatctgctaaaataaacctcagatgggctcaagagttaaatatttaagaaaaggaggaaacaaaaaaattgctacaagtttatttgttgttaggatgggaaaggtttttctaagaaccaagttcataatgaagctgtcaaataaaatacttgacaaaaaattccccttcatacattagcacagctaaaaactattaaatggtaaatgcaactaaagaattgcagctaaagaattgtgtgacgtaaagagttgcaataagaaaagcataagataaaggtaacctcatggaaggtgagcagggactagaaaggcagagaaatgccagaggccaggagcttgaacgttgttcaatgccaccaacaatttgaaagtaactgtaatagttttgacctgggaagttggctgagcaatcctctaatatctgatgctcccgatgctgaggttgtggggaagtgtgcaccgccatgccctttttttggcagtgtarattggtaaagccttttgaaggaaaatagggcagaataagtcaaagagcattaaaatttttttgtttttccagaagcagcaaagttctgaaggagacgcaagtaaagataccacaggtgtcctagattgtcaacagaccatttaatcatttttgttaacaaagcaggtgacaattgagccctaatttgcgttatcattagttgttacaggatcttgcttgttctcctgaggccacgccacgatttccgagaagcaggttgcacactcagcagtctcccactagccagtggcactgcaggtgcaggggctgcctcctggacctttcaggacgctttgcaaggtcactgaggatctccattrcacatttggtagaattaaaagactgccagactcagtcttactgttgttagtgtattcgtgctgtcaatatgtgatgaggacatattatattccgttattctctttagctcaaggaagaataaagaatttggaccaaaattacaaccacattatgacgaattttctaagcaaaagaaacaaagtaactgctgaggttaacaaagatgtaataattctcttcacacagccttgtactgttttattgactgtattatcacaaatcctgagcttaacgaaagtctttataagtcagctcatgaaaacaggcacgtggccagtaagaatttaatttcataccaataacacttcagacttcggatgtatttaaggctgtttgcacatatttatagaatgtgtggtgtagatgatgggacagctccccctcagcaagactctggcctaaatgtatttgctttatttacacaacaagaggataagcgtaaacacgggcactttcagtttgtggcactgaaggacgatctacacagggcaccctgcagaggccacaaccaaggccgcctggcttcccagtgggacaggcctaagggaggacttctggcccctttgcttgatgttcatgttttatgccttgatatttctttttggttgcattccctggagctcatgtagatcattttacttttcagaggtgctagttctggtgcccacacgcacacacacaaaaccatcaactcttctggattccttggttttaaagcttgcctcatacaaagtacagagacatctttttcaggaaacattgccaccacatgcttgaaggaccgcttatggctacacttagacatctccaaccaaggtctcttcacctccttctacaacaatgcactttgtctgcactgggacaaaaaatgacagccttttttcttttcttgtttttttttttttttggcgtggagcatttccgaactttcacgtcataaaaaatgcagcatagttaatcagcagcttgcacttctgagggcacattcacctcgggggaggaggaaggaggaggagctggtgggtgctgagactgcagtgtcctccttcccagcagctggacccagagaccaggcaccaaatttttttgatgaaattatcctaaggaaataatcaaatttgtacagaaatttatgttaaaaaatgttcatggcagcaccgtttaaaatggggagaaaattggaaacaacagaattgtagcaatacatatgatcattaaaaattatgttttagaaagatttttaacagtctttggaaaaagttggtgacatgttgctagtttttaaaaaaagtacagagtatgtacagtatgattccaattttgtgtttaaaaattagacatagtggtaacctagcttcagttccagataagatggagaaggcatactcctttcatgtctcccactgaatgcagctataaatcctggagagtagacagggagaaactatttgaggactctggaacaaagacatagtagcaatcgactggtgaagaagacaagaatttgaagtacggtcaagtatctgtgggctccacatctgtagatacaacctacatgtattgaaaatatcagaaaataaaaataacaatacaacaataaacatcaatacaaataacacaccaatacagtatagcagctacttacataacactgacattgtattaggtagaagtaatctagagatgatttaaagtctgtcggaggatgtgtgtagcctgtatgtaaaaaccacgttattttatatgggggactttagcatccaaggatttgaatatccacgggggtcctggaacaagttccccatagacaccaagaaacaactgtattcctgaaacagtcttgagttatcattttctttcttctccctctatgtatgtacatagagtgtacatacatagagtgagaagcaaagaaggtccatgaaatggaccaattcttttgaaaactgcaaattaccacagttcatctaacatgaaatagataacctgaatggtccaataactagtaaagatattgaattaatagtttaaaaaccttctgaaaggtaaatctctaccctaaatgatttcactggtgaattctatcaacacatttaatgaagaaaaaactccagttctaaacaactttcagaaaagaagagggaacacttcctcactcattatatgaggtaagcattgccctaataccaaaaccaatgttaacacaaaatatgaaacctacagaccaataaccctcatgaacataaatgtaaaaatcctcaagaaaacattagcaaatttaaaccagcaggatataaaaggaataataatacaccataacaaaaaaagaaactatccttggaatgcaaggctggttcaatatttgaaaatcaatcagtgtaatctaccatattaacagtctgaagaagaaaaatcatgattatatcaatacagaaaaaaattgacaaaattcaacatcagttcatgataaaattctcagcaaactagaaagggaaggaaatttaacatgacataggacatctacaaaaaaacctacagaaaatcctaaggagtctatgagaaaatttcctaaaactagtgagtgagtttaacaagatcacagagtgcaaggtcatcatacagaagtcatttttatatcttagcaatgtacwattagaaattaaagaatatcacagtagcttcaaaaatatgaaaggcttagaaatctaacaaaatgtgatctggatgctgaaaatgatgagatgataatgaaagaaaccccagaaaacctaaataaatggagagataagaaggctcaacctagtaaagacgtatgttctttttaaattgatctgtagacttaataaaattccaattagaatccaagcaggatttgttcttatagataagctcattatgaaatgtatatggaatgtaaaggaactagtgctatggtttgtccccaccaaatctcatgttgaaatttgatcctcagtgtggtggtgttgggaggtggggcctagtgggaggtgtttgggtcatgggtgtggatccctcatgaatagatgaatgcccttcctcgtgggtagataagtgagttctagctctttcaggtcccaacaagagctggttgtgaaaaagagcctggcacgcccacttgcctctgctcccaccctgtggtctctgcacgtgccagctcccctttgctttccaccgtgaggggaaatagcctgaagccctcactggatgcccaatcctgaactttcccaaccagcagaaccatgagccaaataaacctcatttctttataaattacccagcctcagatattcctttttggcaacacaaaaatggactaagagaactagagtagctgatagaattttttaaaagaagggtaaagttggaggaactatactacttgattytgaagctacagtaatcaggacaatgtggtgaagggacagacacgtaagtcaatggaatggagacgagagatttctacaaatatggtcaatgggttttttttaacaaaggtacaaaaatcaatttaatggagaaaagacagtcttttcagcaaatgttactggaatagttgtcatccatatctaaaaaacaacacctcaacctcacatctcatacacagctgaacttaaaattgatcatagatctaagtgtgtgaaatgtaaaactataaacctccttgaaaaaatcatagaaaatcttcatcacctggacttgggcaaagactttttactctaaaagcgtgatccatagcagaaaatgttgataaattgaatttcatcaaaactaaaaatgactgctctgcaaaaggatgatgctaagagaataaaaaagacaagctaagattaggagaaaatattgcaaagaacatatccagtgtgtgttctgaatatacagagaaatctcaaaactcaacaggaagaaaacaagccaattgaaaatgggcaaaatacttgaacagacactttaccaaagtggatatacagatatcaaatacacacatgaaaagatgttcagcatagccatcagggaaatgcacattaaagccacagtgagatatcacttacacccattgaaaaatgactacaataaaaaaaaaatctgatagtaataccaactgtcatcgaggatgaggaacagctgaaagtcatgcattgctggagggaacatgccactgtggaaacaggtgggtgctttcttatagacttgtatgtgcactcaccttatgcccaggagtccctctcctgtgtgttcaacccagagatatgcaagctgtgttcacacaaaaacctgtatgtgaatgattatactagctctctttataattgcaaaaaaaaaaaaaacaaaacctggaaacaacccaagtgtccttcatctggataatccttaaggataaactggtgcgtccacacagtggaataccactgagcagtgaagaggagccagttattgaaacaggtaatttggaggaaccccagaaacggtacagtgagtgaaagaaacttgtcttgaaaggttatgtactgtttggttccatttgtatgatattctcaaaaagacacaagaccatggggatggagaccagatcggtggctggagaggctggggtcggggagggcatgaccaccagagaaaagggtgaagagtgttttgggtggcagagctgtgtgtatgctggctgtggttgtgaggacaaaatccacacaagcgctcaagttcgtaggctgtacgccagaaaagctgtttcactacataactgaaaaaataagattgaaaaataagatgtatatattttttgtgtgcgtgtgtagaaaaatacttgaaggtaaactgcagagtgataacagtggttycttctaggtactgggttaatatgtgatttttatgtttgtttgagcttttctaagttttctacattttccgtacaaaacatgtattacttctgtaataaaagcagcttgagattatttaaggaagcaaaacacttctgttgtttctcatcaactacaggatgaagtgcaggctccctgggtggtttgcaggggccacaggccttggccccacctcgctggtgctccctctactcctttctgtgtttgaagcaagttctggttcagacagaaagcctggcctttgagggcgttgggtccccacttcctcagtcatagatgtgatgtgcttcccttgacttgggaccttctgagggatgcaaggtggaccaaaggacccgtgaatggccagggcatgcctgcgtggctttcggtttcttaagcagtgatttcagtccacttaaagggtgtgaaaattctgagaatgctacggaccaaatatattttatgtaacagttgggacccggcaacacttcagggctctttcaaaatctggtagctacgagctcttccgtgactgagatgggacaagagtgaagatttgtccttgcttttagctctgctccagttcatagttctaatgggaaattatgtgacttaaacccaggctgtgagatgcatcagtgacgtgtgggcataaaataaaccctcgagatgttctcttgcatggtacactggcctaggcaggaatattcttgaggctaaaactgtagaactgtcagactagtgttacgaatgtggtggtgagaggcctgtgcagccncggggcctgtgatgtgtctcctgtgtgtctttcactcctatgcagtttgagttcatgatcgagtccatcctgtatgcccgggatgcctggctgaaggaggacggggtcatttggcccaccatggctgcgttgcaccttgtgccctgcagtgctgataaggattatcgtagcaaggtgctcttctgggacaacgcgtacgagttcaacctcagcgctctgaagtaagtgtccacagctgggactggcaccgtcttgtggggcctcctggtccacagtctgcaggtgggccaaggccctgggagatcccatacgacggttggataaatgagggtacctgtgcacccagataggacaatctgttgtagcattggagtaattaaagcagtatggtgctataacaagacagatgggcagagcagggtagaatgcaaggaacaaaaattttcgtatgtgaaaaaggtggcattacgattaggagggagtgagggccaagtcagcaaattattctggagcagttgattagcccttgttctctcacgccatacgtgaaaacttaattctgcatggaatcagcgtcagcgacagacatccatgggggcctgtgtgcaccatcttaggtggagaaatgagcagcaacaatggatggaatggaccctgggctagatagaatctggcagtctatgtggcagaaatcagcaaaaacacgattgtaaaagcaaacaagtaattagagaaatcacgtgctgtcaggtcttggaatcaattagaaagagatgactagccagatggaattgcagcccaatcatgtgaacaggcaaaccgcaaaaaataaataaaattaccaataaatayatgaaaaattataatgttgttagtagttaaaatgcgaattaaaatacatgctgttttccctaccagacaagcaaagagtaaattaaaatagtagcccaggcttgcctggcagtggcagggaggtgtggctgccagggccttagaggttggcatcaggctgcccaccccagtcactgccagagcctcccacctgagtgttcctcccrgcactggaagccagtggccgtccagaggaacgtgattgaattgctgtatatccatctggtggagcactgctgtgtgtctgttaaaaaagaaaccataggtttttagggatatgtaatgatatttagaaagggtttaagagacagtaaagcttggcagaataamccgtgtatacagaatggatgtttgcttgcataaataaatttatataaatatgtctgggggataaaaataagtatatcmcaatgctaagacaggmatatggggaatttaagcttttctttatacttgtccatagtttccaatttttaaatttgtaattttttatcagaaaaataaatgtgtaaatatagtggaatctttattaaaacattcacttttatttgctatttcagaagttactgctttgcttattttttacaacatttctgtggtaaataatcggtgacttacaagcctagtgcagccagtgatgggggttggcaaacggtgacatgcaggggccatgcggcgtctagtgtctgtttctgtgttgaatttgtgtagcaacagagcaagtatttctcctgaaactcagactcactcaggccacctcagcccttctagttcctttcgtttattatagagtaacctacagcaggaataccgcgttcatttactgttaatagaagatccacaaaagattttgaaatcaaatacattctaaaactaggcaagacacgctgcaactccccttgtcctctgggttatgaggggtgagcgttggtttccgtgtgctcagatcccatgaatgagacctcacagggaagygcccagtgactggcaggctccttaatgcctccaggtcaggctcaggaagtctctggatgcctgggtagagtctgggtcttctcagagcgggaggcacccagggcctgtggaggcctgagggctgctctggggttccagggccccagatagtggcttagcatcctggtgacacagaagggagagcactcaccgcggtcccacgtgtgtgttttgaagcctaagatgtttgcaatgactctcaacagtcgctttgaccttttcccctagatctttagcagttaaggagtttttttcaaagcccaagtataaccacattttgaaaccagaagactgtctctctgaaccgtgcactatattgcagttggacatgagaaccgtgcaaatttctgatctagaggtgagaaaaagatgaattgctccttacattcgataatcagtgaccacgaaacactcagaccagagcctggcttatcaaaaaccttcagtgagtgctgggggtgtgagtgaataactaattattttattatgcaaataagtgaatttataaaacgtttgctactgattttttccagtcttttttcttttttacgttctattttgattctttcatattgtacaccattttatgtctccagcgtcttcattttagatttatgtttaatattctcagcatcttcaaaatcaaataaattatatttcgtttcattatggtatttgcattacagtttttttcaagtattttaagccactcttcatgacagaatcgttagaattccctccgtgaatccctgtctgtggccgcgcggtggcgctcgtgggctctgggcggtttccccgcgcccccgccctgcctggcgccccagctggcgccgcgtctggagatggggcgggcgcggtggcgccggcgcgctttggtttttagttcgttctgctgtggaaaggcccagcctggagctctccaactccttaactggaagagctgagcgccgaaaagattccgcagaatctggggtagaaaattgggcgcaagaagctcagatgcttgaaacgtttctgactgaagcctctgaactcacgatgcgggttttgggggtggtttccccaggctggggggcttttctacggttcctgacgcattcagcgtctgcgcggggcgcgtggagggggccgccccaacccgggccctgcggtgccacgcggtgcccacgcgtgccttgtcatctgcttgacccagaccctgaggggcgagctgcgcttcgacatcaggaaggcggggaccctgcacggcttcacggcctggtttagcgtccacttccagagcctgcaggaggggcagccgccgcagtgctcagcaccgggcccttccacccgtgagtgtgcggggcgcgggcacggggtgcggggtggggggcaggggagtaggcggggtgcggggatggggcgcgcaggagggggtgggacgcggcgtggcggtcgtgggggggtggggcacgtgggggcgcgggcagtggggtgggggcggcgcgcatgggggcacgggtggtgtagacaccgcagcctgtgtgcccccttccgggtctcgccaccactctgggcccagcctgggcgtccctccgacaacagccccaacgggaggagctccctgtcttccaccccgcgaggagcaccacagctcttcatggtctgacccaaagcgcctccacggggcgtcggggttcacctgacgtttttggaggtgcctgttttttgggacacatttccccgccagcaccctgggcatgtgtggcagtggagctgccttcagggccctgcaggccttccctttgggtggggttggctaccccgstctggcacctgccccgctgacttcccagcgtggtggccccgcgaggggaccccggctccagggaggtcgcagaggtgcggggttgatggcctggcctggcatgtggtccccatcacaagagtcctgtggtggcccctccagtgccatcaccgggtggaggtgggcagcttggaggccagttatacccatccccgagtctgggggcgtggagggggcagtgacctggggcacaggctggggtgaggggtgtgaccagagtcagggaaaaactggagacctgaggagccccccacttcactgctggccccaccgtggacagtgggagtttgagggaagacagagcctgaggaacttagagatgtttccaacgcaacccagtgcagaatcatagcgttttactatttccccccaaatgtgacagttgtcctcaccttgtaaccttcacagaagcgactccttggacctgattctgtctgtgtacaccacagtttaacagcaggagctagatcaccagcctctgcagcttaggcaagggtgcaggaaggggttgcacagccgtcctcctggcgggccggggagtcgacaccacacgggacctttagtgcagctgtgtgtcccctgagctcccgcatcctctgggccacccagggtgagccgtccacacctcctggaatctgagtggtctcaggagcaagcttgtgtttggcattggcaggatctgtctcactagcgtaactttgatcccagtgtatcccatagagtccctttagatcacagggctgggggtgtatatgttccctgagttagcctgaaaagccaagctttgtgtccccaggccctcagggtggactgccggctgtgtgggtgctgttgggggcgagagccagtgcgagcctgagtcagcgccccgagggccatgtggagactgccctagctcagcctccaggtcacacgcacccctgtcttgcagcaccacacactggaagcagacgctgttcatgatggacgacccagtccctgtccatacaggagacgtggtcacgggttcagttgtgttgcagagaaacccagtgtggagaaggcacatgtctgtggctctgagctgggctgtcacttccagacaagaccccacatctcaaaaagtaagatacgtagttgtaagattctgtcctgtgggtgccggtcctcagggagacaggcctgggtggtggtagtgatggcagatgctggcccacactggggtccacgccttttgtgcaggagtgatttaatccttacacagaaagcgcctgttgtcattggcttcatttcccatctgacagcacgggaagtggagggctctggaagggaagtcagggaagtcattccctcaggtgacacggtaagtgagggagagcagagacccacatcagcctgaggccccttgtgccatgtccagagggtcccccagatggacagaagcctgagctgtgccttggcgctccctttacacaggcctctgtggcttcccaggcagcagttagtctaggcgtgtcgtctgtgatgcgtgttctgactggcagccttcggatccgtgtgtgaattcatgtgtagctcgcccagctcacttgggcttcctgtctcagaggctgctgaaaatggaatgttcttctttgggctcaggattaatgtggcaaagaaaataaaaataaatggttttccttcattttttatatttgttttgtgctttgctttgtgataagtttttgttaaaagtttgtcatttaaaaaaattctgcacctgaatactgttctcttgtccaatattaaaccattaggaaatgtagtatgttaatcaaatgatttatcatctgattgacctgttgtcatttatctttttcaggttggagaaaaagtcttccccatctggagatgacagttgatgctttatttggaaagcagtgtgcatatcttgaggggtgatgaacacaagcaaaccaagttgcacctggcttctgcacactcctgcgaaagtcggtgaacattcactccacattgacccctccctagcctggcaggtgacgtcagggtccttcacagacaaacacgcttgggctcggcaggagctgccgtggccacccccgctgcccagtgtctgccctctagaagtaggctgtgtttccaggtgttcacccgtggtgcccacagtgccgacccgtggctgggtcggagctccatgttcctaagctaggtctaggtctacactcctaggacgcacgcatatcagcccgtgtaccctgtgacagtgactgtccccacctcctrtgttagtggtgcccttactgccgtcgctcatccactcgtgtgggacgtaggattgcacagggctgtgccagtggcgtgtagggaacactgccctggctcagcgtgcgagctaaggtgkygatgtatgcgatgggactctgcatgggatagtacagttgtgtagacgtcttccaaataaattatgtgttggtscatcgcacatgctcaataaatatttttaaatgagtgaatgtcattgtgtatcctgttttatgcatatatgttattttttgtaattacaggatcatactatatgcattgctttataagtttttctcaatattgtgaaaaaacttccacatcagtagatacatgtccatamtttttttttgtattgttttgatttttattaaattttattgaaatataggctgggtgcagtggcttacctctgtaatcccaacactttgagaggctgaggtgggatgattccttgagctcaggagttcaagaccaccctgggcaacacagcgagatactatctctacaaaaaaaatagaaaaattagctgggcatggtggcgtgtgcctgtagtcccagctactcgggaggctgaggcggggggatcacttgagcccaggaggttgaggctgcagtgatctaggattgcactgctgcactccagcgtgggtgacagagcaagaccctgtctcaaaaaccccaaaaaacaaaactgaaatatcaaatatatattgaaaacagtkctagtcatgggtacatagatgatggcattttataaagtggacgcacatgtaaccagcatccaggccaggacacactacagattccccgattccccttccactcagtgcccaccctctcaagggtgatgtcctgacttgtaactgtcgattactcttgcctgaatggagttgtacacgtgttcttttgtgtctgccttctttaattaaacattgtttgtgagactcatctatgaattttagacagtgtggttgtggttgactttttcattgtggcatagtattcaactgcatgaatagaccacagtttatgatcttgtttcacatggtgtccttttgggttgttgccatggtttagctatgatgattactgagactgtggacatttctgtgtatgtgttttggtgcatgtatgtacacatttctgttgggtgtacactgtataccaggttttcaagtcaaggaatctaatatccctgccagctgtgcatgagagttggcatcctcgtcaacacccagtattgtgttttgcattttacctgctctggtgggcgtgtggatttggtatacatttcattgatgactaatccagttttgtagatttgccgctcattttggatatcctgtttttgaggtgcttgtttaagtctttggcccattttactattagggtttttttttttctatttctaattgagattccaggtgttcctgatataatttggctgagtcctgtaacacatatatttttgtgaataaatcttttccctttctgtggcttttttttttttttttttttttttttttttttaatcaagcatcaagctgtgaagaagctgtgtcagtattttcttttttttttttttcttcgagacggcgtcttactctgttgcccaggctggactgcagtggcgtgatctcagctcattgcaacctctgcctcccgggttcaagcgattctcctacctcagccttccaagtagctgggattacaggcatgcaccaccacacctggctaatttttgtatttttgtagagacggggtttcaccatgttggccaggctggtctcaaactcctgacctcaggtgatctgcccaccttggcctcccaaagtactgggattacaggcgtgagccacagtgcccagcctgtgtcaggattttctgtcatggacatggaggctggtggtctgggtgcagtttcatacatggttattagaaaaggcatctcatccaaatgtggtggctcgtgcttgtaatcccagtgcttcaggaggccaagggaggaggattacttgagcctaagagtttgagaccagcctgggcaacacaacaagaccttgcctctacaaaaaacttaaaaactagctgggtatgatggtgcacacctgtagtcccagctacttgggaggcggaggcgggcagatcgcctgaggtcaggagttcgagaccagcctggccaacatgatgaaaccccgtctctactaaaaatacaaaaattagccgagtgtggtggtgcatgcctgtaatcccagctactcaggaggctgaggcaggagaatcacttgaacccgggaggcggaggttgccatgagccgagatcacgtcactgcactccagcctgggtgacagagcacaaaagacaggcatgactttgtacttaactgctcagctttgtaatcactgggggyycagatrytcacttggattctaactttgttggcatctgggcctaaaagccgtgatgcaggtgagcaatgatgcagagggctctgtgcgcctggcgggctctgtttgcctgctgggctctgtgcgcctgctgggctctgtgcgcccgggaaggtgcggccaccctcacgcggaaggcggccagcggatcccggtgcgcgcagctcccagcgctggggttccagcgccccgcctcttcctgtagcaaccagcgggacctgccgtccsccggggcaccccgaggggtctgcgcccgcttctttccgaaacgggaaggcgctgggggctcggcagccagagggacgggttcagggagcgtccggtgagcctaagacgcgcctttgccggggttgccgggtgtctgcctctcacttaggtattaggaaccgtggcacaaatctgtaggttttcctctgggggtgggcggaggctccaaaccggacggttttctcctggaggactgtgttcagacagatactggtttccttatccgcaggtgtgcgcggcgctcgcaagtggtcagcataacgccgggcgaattcggaaagcccgtgcgtccgtggacgacccacttggaaggagttgggagaagtccttgttccyacgcgcggacgcttccctccgtgtgtccttcgagccacaaaaagcccagaccctaacccgctcctttctcccgccgcgtccatgcagaactccgccgttcctgggaggggaagcccgcgaggcgtcgggagaggcacgtcctccgtgagcaaagagctcctccgagcgcgcggcggggacgctgggccgacaggggaccgcgggggcagggcggagaggacccgccctcgagtcggcccagccctaacactcaggaccgcctccagccggaggtctgcgcccttctgaggaccctgcctgggggagcttattgcggttcttttgcaaatacccgctgcgcttggacggaggaagcgcccacgcgtcgaccccggaaacgaaggcctccctgatgggaacgcatgcgtccaggagcctttatttactcttaattctgcccgatgcttgtacgtgtgtgaaatgcttcagatgcttttgggagcgaggtgttacataaatcatggaaatgcctcctggtctcaccacacccagggtgacagctgagatgcggcttctccagggtggagcctcctcgttttccagagctgcttgttgaagtcttcccagggcccctgacttgcactggaaactgctcaccttggcatcgggatgtggagcaagaaatgcttttgttttcattcatcctagtgttcataaaatggaaaacaaataaggacatacaaaaacattaataaaataaattaatggaactagatttttcagaaagcacaacaaacacaaaatccaagtattgccatgtcagcaacacattcctactttaagttttatgaagttaattggagtagtggagaacaaaagtggatgtggggcagatctgcgtcctgcatgtgtcttgcagccagactgttccagctgttgcagacctcaaaatagagaggacccaggttttctgattttgccttcttttttttttttaaatttattattgttatactttaagttttagggtacatgtgcatgatgtgcaggttagtttcatatgtatacatgtgccatgctggtgtgctgcacccactaactcgtcatctagcattaggtatatctcccagtgctatccctcccccctccccccaccccacaacagtccccagagtgtgatgttccccttcctgtgcccatgtgttctcatcgttcaattcccacctatgagtgagaatatgcggtgtttggttttttgttcttgcgatagtttactgagaatgatgatttccaatttcatccatgtccctacaaaggacatgaactcatccttttttatggctgcatagtattccatggtgtatatgtgccacattttcttaatccagtctatcattattggacatttgggttggttccaagtctttgctattgtgaatagtgccgcaataaacatacgtgtgcatgtgtctttatagcagcatgatttacagtcctttgtgtatatacccagtaatgggatggctgggtcaaatggtatttctagttctagatccctgaggaatcgccacactgacttccacaatggttgaactagtttacagtcccaccaacagtgagaggacccaggttttctaagaccaagtcgctacactcttaactgcagtgggtggagtttggggatggacttctcctcagctccctgctgccgctctccagcgtccccgggtgcagaccctctgccgccacagctggagactcccaaaggaggcaagcaagcctcagcgatcccaggaggcyccatcggcccttcccaggctttcctctctttaagctcctcctccttcttccctttcttcagaatcgaatctaggcaaggatttcacagtctgagctttgaccaaggacagtaactgggtccagggatggaaaactttgcttctaggtcccgttttgctacagccttgcaagaggactgtgatcaggcctcagtttccgtctctctaaactgaggagtgctctgcggggatctctgcctcctttacaatatttcctccagtgatgtcttcattattagagctgctgacttcaaatgacatttcataatgttgtccctctctgttgtgtcatccagagtcgtttttcttcttatatcttgaaaatagataactaagataatatgaatatcaaactgagcccctttcttcggattttgtaacaaggaaaattcctagtaatgatgaagtaactaaatgaatctggatgtgagctttattttatgattggattagggtatatccatgagccttggacttatctaaaactttaattaatctaaaattatgcagtgttcattacttagcaaaggtatcatggcttggtgtctagcattcttggtagaaagccatcgctgtgttagggagtgttggctgtttattgaggccatcggtgaggcaatgcaagacagacaaatgtggcttcagtactactaatatgacagcagacagccaccagctggaaaggtgtattgagattgtaaagatgtgctccttcccgaggccagggaccagggccacttacagtcccacaatcatctttttgaactgtaaatctgaattcctttccccatgacaaagttgggcagggaaccatcaaactgggattctggaaatcaggatgggggagcagagaatcctgcaccctcacaaaccccttttgctgtgtttgctcctggtgcaagttctcacttcttcatggcttgggggctgagcagagttcctgggggtgtttgtgctacctcagctctctgttcccactgcttggagccggagaggaggcagggatagaagtcatggattaaaggtctggagacagggcaggaagaacggcaagattcagaggaaaatgtttgtttacagccagaatcaattgataggcatccacacagcgttggggagaatgatgcagcacagtgccctggcctggcacgcaggagcctatgaccgttccgtcccctgagccagctcaggctcctcacccccaccctcagaatgtgggctttcatggctgctccatcctgggccacagcccttcaccaggctcctctctggcagggccacagagaataaaagggagcagaaaccacatcctgcacacagatagaacctgcatcagccaaagtgtccatctgaccaagggtctcccttccgcactgcccagggggctacaacatgttgtttggaccacggttactatacctgactctctttaattttttggctcaaattgttttctctccttgattagattaggtaccttggtaatagttacgtttgtctggaacctagaggttgcaagatcatgaaactgcagttataccttcccagaggggttgatggcatcctcagatcctcgacttgtggaatgacctgtgtggatctgactctaggccatctcccattggaagaggaggaaggcttttatggttgaaagaaggaccattgcattataataggtgcagtcattttggaattctcggtatggggagaggcatgtgcttgtgtatgtgcacacatgcatacttgctcaggaaccaagggggtggcctacagtgacatatgtcatgatttttgtttattctgctgctgtattcattttcaattgctgttataacaaattactacacactttgtgccttaaaagaacacaaatttatatttttacaattctgcagaccagaggtccagcagggtctaaaatcaaggtgccagcagtgctgtgtttgttcctggaggttctaggggagaatcacttcccgcacatttgggctgtgggcagaattcaattccttgtggttgtaggacggaggttgccattttcctgctggatgagggccattcccagcttctagaagcca

SEQ ID NO: 95949 - DNA, 36360 bp, Homo sapiens
  misc_feature (1)...(36360): n = A,T,C or G
ttttcagtctgtgtgagtctttataggcgacgtgtgtttcttgtaggcagcagatggttgggtcttgttttttttttatccattcagccactccgtcttttgattggagagtttagtctatttacattcaaagtttcttggttgtttttgaccaaactcacatactatcattcatcgatttgactgtgctgtaatttttttttttggagacagggtctcactttgatgcccaggctggagtgcagtggtgcaatcttggctcactgcaacctccgcctcctgggttcaagtgattctcatgcctcagccacccgagtagctgggattataggtgcgtgccaccacgcccagctaatctttgtatttttagtagagatggggttttgccacattgaccaggctggtctcaaactcctgacctcaagtgatccgcccacctcagcctcccaaagtactgggattacaggcatgagctactgcacctgcctatttacattcaaagttattattgataaagatttactcctgccattttgttatttgttttctcattgttttgtggtcttccctcctctttatctagaagagtttgtgttgaattggtgttatttattccttaagtggtagaattcaccgctgaaactacccgagccttgaatggtctctgtgggaacattttccccctacaaattccattttattgataatgtcaactgaaattaaggctgttgagacaaataattcgataaaggtttattggaagccaaatgtgaggatcaacccagaggaacacaccaacaaagttgagagtgttctggaatctaagtcagaaggtttctataggagaggctaggaggagggaaaggactcctcatactcatgtctaagtcagaaggcttctataggagaggctaggaggagggaaaggactcctcatactcatgttgtccttttctagtcagaaggtttctataggagaggctaagaggagggaaaggactcatactcatatctaagtcagaaggcttctacaggagaggctaggaggagagaaaggactcctcatactcatgttgtccttttctttggagggtacaacacagaggttacaagcattggctacagatgacaacatacaggtcaacacatctctgtgcaagacagtcagtaaacctttatgattcaggaataaatcagcatcttttcagtccattaatcagcacatcagcaatctgaggaaatcatgataagattctttactcagggaccattaatcataagaccttcccaagcaggccagtttggaagtctgtttacttttaaactgtcaaatgtgacctgtaaggttatcagatataaggctattcagagtatctatttcttcttgagtgaactttggtagtttgtgtcttttaaggaattggtcaatttcatctaggttgtcaaatttattggcataaagtcattcctaatacttccttattatcctttttatgtctgtagaatctgtggtagtggcatctctaatttctgctagtggtaatttttgtcttctttcttttttcccctaagtctggctagaggtttatcaatgtatggcctttttcctttgaagaacaggtttttggctggatcttacagagcccaggttggactagaaatcatttctagaacctatactagaatcatttctcttctataggatgtttcttctacctcatttttgccttggtggggggatgggagaaagagcttgattctttttttttttttttttcttgagatggagtctcgctctgtcgcccaggctggagtgcagtggtgcgatctcggctcactgcaacatccacctcccgggttcaagccattctcctgcctcagcctcctcagtagctgggattacaggcacccgccaccatgcctggctaatttttgtatttttagtagagatggggtttcaccatgtttgccaagctggtctcgaactcctgaccttgtgatccacccacctcggcttcccaaagtgctgggattacaggcatgagccaccgcacctggccaagagcttgattcttgatgagagaaatacattgatacagaaggaggagattacacctgctcttccacacccctcattggccctaacacacttctgtgcagtgtgttgacatacctcttctgcagtcttgaaaagtgattgggaaagaaatacactgaaaactacaaacatcactgaaaggaatgaaagaagacataaatgaccaggcacagtggctcacacctgtaatcccaacattttggaaggctgagatgggcagatctcttgagcccaggagttcaagaccagcctcagcaacagggcgaaaccccatctctaccaaccccccaccacccaagttagctggtcgtggtggtgcatgcctgtagttccagctattcaggaggctgaggtgggaggatcactcaagcccagaaggtagaggttgcagtgagctgagatcgtgccactgcactccagcttgggtgacagagcgagaccctttcttcaaaaaaacaaacaaacaaacaataaataaataaacagaaaaacaccttgtgttcacagattagaagactttatattgttcaaaaatcaataattttgatatggattacattggatctgcagattcatgcaatcccaatcagaatcctagtggcttctttacagaaattgacaagcagaaactgaaattcatatagaagtgtaaggaaccagaataagtaaaacgatcttgaaaaaggagaacattgagggactcatacttcccagtttcaaaattgactataaaacttacagttaacaagactgtggtactgccataacgatggacatacagatcaatgcaatggaatgggaaggtcagaaataaaactgtacatagatggttttcaacaagagtgccaagacaattcaggagggactgaatactgtctaacgcgtggtgctggaacaaagaggtatccacatgccaaggaatgaggctgggccttactccacaccacatacacaaattaactcaaaatggatcaaagacctaagaggtctcaaagagctgaggccagaaaacttgtagaaaagacataggggtaaatcttcgtgaccttggatttggcaatggattcttagagatcacatcaaaagcatgagcaaaagagagaaacagacaaattggacttcatcaaaagtaaaacaaaacaaaaaaacaaacttttgtgcttcaaaggacagtatcaaaaaaatgaaaagccaacccggagaatgggagaaaacatttgtaaattgtgcgtttgaaatgggactagtatgcagaatatttaagaactctgacaattcaacagtaagaagacaaacaatccaatgaaaaatcactacaggacctgaatagatatttctccaaagaagatacagtatataaatggccaataagcacgtgaaaagatgctcgaatcactagtcgttagtgaaatgcaaatgagatactgtttcccgtcctccaggaaaaagatggacaaggtcatgtgctgttacggactcggatgccatcagaggctgtcctggggaggggggttcggaagcaggttttgtgggagcattgcagtctcctaagtaatgttgaggaagtaattaaagtagaatgtcctgggccaggtgcggtggctcacgcctgtaatcccagcactatgggaggctgaggtgggcggatcacctgaggtcagcagttcgagaccagcctggccaacagggtgaaaccccagctctactaaaaatacaaaaacttggctgggtgtggtggcacgcggctgtagtcccactactctggaggctgaggcaggagaatcgcttgagccggggaggcggaggttgcggtgagtggagatggcgccactgcactccagcctggatgacagagtgagactctgtctaagaaaaaaaaaaaagtcctgccaacccagcggtccttttctcagaggtaggaaagaatgaagcagttttattgaataaacattaaagcagcctttgatgcccagaggttgccaagacagaagaactctcccccttcctcccagccaagccgaccggccctgttccacgggcgtcctcactggaggggacccgtcccaactcagacctccagggccgggttcctctgtcctcgcaggggccgacgctggggcagactcccgcgtgacaggggaccagtccccacccccgagattaaaaggtttacctcatcgcaaagggacagaagggagccgaggacagggggaagggaaggctggcttgccctttggcactttaagaagctccttttctttcagattctatttgccagacagtggrgggtggcggcaggtgggaggaggggggtggaggagccgccccccacgtggccgagggcaccctcgagggcagtggatcctcgcgctcccctgaccttgtccccggccttccctcccccagagatccagagcttcgcgggcgccgagaaggacgcgcgcgtggtgggcgagatcgccttccagctggaccgccgcatcctggcctacgtgttcccgggcgtgacgcggctctacggcttcacggtggccaacatccccgagaagatcgagcaggtgcgccccgtggggagggcgcggccaggagggtgcggggcgctcggtccgtccctgtgcggcccccagatcttggctcctggccgggcactgtccgcaggaggggaccccggggacccaggcgggcggggcagggatcggccctgggcctggaagtccccgtccgagggccccgagccccccacccccatccatgcgctgcgcccgcagacctccaccaagtctctggacggctccgtggacgagaggaagctgcgcgagctgacgcagcgctacctggccctgagcgcgcgcctggagaagctgggctacagccgcgacgtgcacccggcgttcagcgagttcctcatcaacacctacggaatcctgaagcagcggcccgacctgcgcgccaaccccctgcacarcagcccggccgcgctgcgcaagctggtcatcgacgtggtgccccccaagttcctgggcgactcgctgctgctgctcaactgcctgtgcgagctctccaaggaggacggcaagcccctcttcgcctggtgagccgccccgcgcccgccgccttgcctgcagtaaacgcgtttgttccaacccggggccgcggtgcctcctgcgcrtccccccggaggggaaagggccgcgtcccccgcgcgcgaggccagagaaggccccgctcccaccggtgctgggccccgaccgcagcccgccgctgcccgcacctgcggagtgcttctcacccctcattaaaatcatccgtttgcatgtctgcctttacctctggctctttgagggcgtggagggcgcctcggccgctgctccgcctgcaggaagcgccgctcggtgctcaaggagggaagccaggaaggagccgcagccggcaggggccccctcttccccctccccccttcccctcccccgggcctccacgcccacccgctttcccgcccgggacggcgagtcctgtcccagtttgggtttccccgaatgccgagctggggcaaggacttggttctggcggatggttgcgcacccctgccggcaaaatggaaacgcagccccttgttcaaaagcgaagaattcgaaagggcaacagccgcgttacagtgaacccggaccttagggctgagcagtggcaacgcaggcgggagagcgccggggagccccgagaccgtgggggtgctgggggtgggcgagcacaggggagccccggagaccatgggggtgccgggggtgggcgagcgccggggagccccagagaccgtgggagtgttgggggtgggcgaggacargggagccccgagaccgtgggggtgccgggggtgggcgagcgccggggagccccggagaccatgggggtgctgggggtggacgagcacaggggagccccggagaccatgtcaggtgcaccttgcaccatcccggagcggggagctggggagctgacccatcaattcccctccccctgggtcatctccctgccggaggccggaacagcgagaagacgggccctcagtgaattggcgggaccttggggctgaggagatacccagttccaaagtgccctggaacgaggggcatttaccgtgtctcaggggagtcttggctcatgctgcacaagccagcacgctcagcctggtcctcacactgtctcagcaatagtggcgaggatggcagggctgtcacacattaacagttcagagctcgatggagactgctggggaccccactctggctggtagctacaacattcagctcccaggtgcagatgggctggatcctggggtgcgggcccaacctcatgcccggcagacgaggggcccactggcctgagaagctctggctgggtgctgatttctggccttacctttgagggtggcctgtggccacaccggcagtgggctggctctgtggctgggtgctgatttctggccttacctttgagggtcgcctgtggccacgccggcactgggctggctctgtggctgggccaggagctttgggccccaggcctagggctgcagccacacagtctcggccaggtggtccatgcccccttcccctcggtgccagcgagtggatactttcagcaagcctgggataggaagggctgtgatgaaacgcaccaggatttatttcagttgggtgtggtgggatacagacacaggacycctgactttaaaggagagtgtgtcacaaagtactgcagacccagctacttaaaccacaggagggcacgtaccgtgccacacagggccgcccggggcggggcrccgtggcaacaggacgcagaaggcgagaggggagagcatggccagaggctctgtgggggtttccctgggaagagaggccagggagggtaggcacgaaggagcaagtttaggattggacaggttaatttccctgggctccgggctatggggtggtgtctagttgaccaccgtcctgccccagggtgattgagggcagaggaacatgggtttggtgagtgagtcagataaggggtggttgggtttacaggctccaggtgggttggcttgtgccttaaaggggagctctgtttgcaggcaccttttgctgtctctaggaattagccagtcctgggagggcagtctccacctagccagtaaggcccccgagaggtcaaagcattgtaaaccagaaaacaaaaaccatatgagttatacaggaacagtctggtgggcaggtggcattcagcccctgtgctctgggtctctagaagaatggggttctcagcctctggccatgggtcccccaaacagccttagtgtcttccaggctcttgggcttggcttggagtggcccctgggggctttggctggggcggtgcccatggctcaccctctgtccatatagtggggcccaagttgtccactgtgctgggctagcctgggggggccctgtggtcagaagctagacccccaccctggcagtgccaccccctaggcccctaagctgcaggtgcacgtggaactttctggagggctcccgtgcagagagggtgaagcccattcctgcactttttcttactgtactattaaaatgaggagaaatgggaacagggtgaggagggtggccctgaagtggctggcgtggccatgtctcctggggcagcacccgggccctgggcaccagctcttccatctgtagacgggagggcagtgagcttctaggggatgatttccacctcctgggacggaggtgggcaccggcccaagtgaactcggattctcctgcacacagcttccgtattcagtcatttacttatgggcccactatgtttgtctcatactctgggttagaaaagtgtatggcctgcctggccctggaatcagtagccctgggcctgtcactggggagagatggtggaaaccckggtgtgggcatagctgagattctttctcctgtaagtggggtcccttagggtccccgattcaggagctatttacagcacctgccagcatttctaatgtctcagtgctgcccctgagaaccagcgccggcgtcacaaccagccccattccccctcgtgttctcagctgtagccaagccctggtccagcagtakctgggtaggaaatgcatgcagctcctgccggggcctcccgccccaaccctctctcctgacaggcgatttgctgggctggaggacagggccaggtcttggccttggcaccgtcctgggtcacgagtgtatggttctggtcactctgctgtggtgcgaggatgaaggtgccagcccagtgtgggcaaccctcacagccagaatgttccagtgccccgcacctygggaccctggatgtgtgyggctgccgtcacaaagtaccgcagacccagcagcttaaaccacagaaatttattctatcacagtcctgaaggcccagagtacaagatcaaagtgtctgcagattctgtttgtctgaggtctctctgcttggcttgcaggcrgccgcctccctgctttgtcctcctggccttktctctgagtgcatccctggtgtctctccctcttctcaccgccctgtccatctccacatccaatccagtcggcggtgctgggggtaatccagtctgccatgctggaggtcaggccttcagcagatggtttctcgagggaatgcagtgcggccctcaacagaccccatcctcccctcctggcctccagacatggatccctgactccatcctccccttgaggctccacagagctctgaccccatcctcccctcctggtctccctccagacacagatccctgaccccatcccccactcccagcctccagacgtggagccctggctggggaactctgtgtgctcccagcctctgaaggtttctgggcttacctggctcctgtctcatcccagtccccctgagtagccacggaggtggggtccctaaggcccacatggttggggttccattaagaacttcaagtgggtggctcacgcctgtaatcccagcactttgggagaccgaggtgggtggatcatgaggtcaagagatcgagaccatcctggccaacatggtgaaaccccatctctactaaaaatacaaaaaattagctgggtgtggtagcgggtgcctgtagtcccagctactctggaggctgaggcaggagaatggcgtgaacccgggaggcagagcttgcagtgagccaagatcgcaccactgcactccagcctgggcgacagagcgagacyctgtctcaaaaaaaaaaaaaaaaaaaaaaaaaaagaacttcaagtggggctgggctcagtggctcacacttgtaattccagcactttgggaggccgaggcaggaggatcgcttgagcccaggagtttgagaccagcctgggcaacgtggtgagacctcatgtgtatttgtctgataaagacatacgcaagactgggtaatttttaaagaaaaagcagtttaatggactcaacagttccacaatcatggtggaaggtgaaagaggagcaaagtcacgtcttacaagagggtgtgtgcaggggaactgccctttataaaaccatcggatctcgtgagaccattcastatcacaaaaacagcaccggaaaaagccgcccccgtgattcagtgacctcccaccgggtccctcccatgacgtgggaactatgggctctacaattcaagatgagatttaggtggggacacagccaaaccatatcaccatgtctaccaaaaatggaaaagttagccagtgtagtggtgtgtgcctgtggcccagatgctcaggaggctaaggtgaaaggacctcttgagcctggggaccaaggctgcaggaagccatgattgtgccgctgcactccagcctggctgacagagtgagactttgtctcaaaaaaaaaaaaaagagaaaatgataaaagcactgcaagtgggcagcggctgaacgtggagacaggagttctcccttctgagcacggccctggtgccgctgacttcgtggggagcctgtagtcaggggagcagcagctggggagagctggggtctcagctgccttcccccatatcgcacatgcccgtctcgtgtgtatctgcactctcacacgcgtgttcccctgccctgcgctcacatgtatctgcactcactctcacatgcttgcttcccctgccccatgctcacgtgtacctgcactctcacacgtgtgctcccctaccccacactcacatgtatcctcgctcactctcacacgtgttcccctgtcctgtgctcacatgtatccacgctctcacacatgtgctcccctgccttgtgctcacgtgtatctgcactctcacgtgttcccctgccctgccctcacgtgtatcctcactcactctcacacgcgtgctcccctgcactctcctgtctgagctgagctgacctcagttgggtgctgcgagccagggcctcatgctggcctctcgccctccacagccccaggggtccaggctcctccaggaacaaacgcaggccccacgggctgcctggaaggcctcccagaaggcagcacagggtcacgagggtcacccgcagkggcacagggaggcctcgtcacgacaggattccagccaggctsgcctgatgctmctgggggtcctcggcacatgccccttcaccctggcatgtgcttcttttccgggaacccayactctggctgagtggagccatcccctctgggtcaacagcacccggggtggctctgcagcaccccactccgcggctgcacagggaccttggccccactgctccttgtgccttgctggttaatgagaagccggtggggaggtgctgccggtgagcgtataaaggccctggcggcggctgcggagcactggccctgtccttccatctgcycagagaggagcatctggatcaaggtgctggccatgtcccagctggtggaatgcgtccccaacttttcggaggggaagaaccaggaggtgaggcccgargagctggtcaagcatctagggctgatggggcagcttgagtggctaaggcccaggccatggaggaggtggtgggcttggtgtcccrggtcgtcttcccaggatgggcagagccgctgcccrtgggccccaaggacrtcccgtggctcagggccctggggagtgcctgacccaggggtgggtggaacacgactggtgcttgtgggggctgaggcttggctgtggcttcaggggcctttcgggtgctttcggtggggggttgggcagatctctgggcctcaaagggccttggtgctcccccctgaaaatggggctcctgccactgactgaaagggctgtgtgaggycacacgaggtggcccagcatggtccccactgccgcctctccatctccactggagttagcttgctgagcycccaccctgcagccaccatcctcactggacccaaaacgaagtaggcacagagggggcagcaggcccccaggtccggcctctcgccttccacagccctgaggtccaggctcctccgggaacaaacgcaggccctaagggccacctggaaggcctcccagagsgcagcaccaggccacaggggtcacccgcaggggtgcagggaggcctcgtcatgccgggattccagccagcaccaaggccctgggacagggcaagatttggggctgagcccctgctcccagcagtcctgccacccggaaggttctaggcccttcaggcccctcccccatgctggtgatctgtccctcccctgctcgggggtgggggtcccggcccctctgtgacctgcgcctgtggtcaccttcttggatccccggccacgtctctggcatctgtctgtcggagcagagcccgtgagtctctcctggaggcaccacctgcagccccttgtggggaccgtgcttgggcctggagtgactgtggctgctgtgagggttcccgggcggccgctgtgtgcgggcactttcggtgggagctcagcttgtcggagagcccccaaaggcttggcccgcctcctcagcccccatttgtgtctcrgggtgcagccacctccaagctccttttccttctttcaaacggggagactgaggtgtgggggccgggcctgtgtcccaggtgatcgacgccatctctggagccatcacacagaccccgggctgcgtgctgctggatgtggacgcaggcccttccaccaaccgcacygtgtacaccttcgtggggccgccggagtgcgtggtggagggggccctcaacgctgcccgggtagcttcccgacttatcgacatgagcaggcaccaaggtgaggtctctgggctctcctgtggctgccgtgtctcagaatgtcagggccgagccctgtcctggtgtcctgggagagggggtaggcccggggcccaggcttggaacgtggggtccagtggggctggctctggctctcctaggaggaccctggagtgtgggggtcatggcccccagcctgcctgcagggctgtgctctgggggacccccaggtcgccacgctcccacagcaccgggccaccttcacggctgggtggggggagggggccacgccggggaaggtttgtgggccccgtccacctgcccactcgtcaagggggctgagagccagtcttggagcaggcactggtgggggaagggctgcctgaaagctgacctgtcaacagcccacaagccaaacacctcggtgggcaggcagggccaaaggtgtgtggacacacgggcgctggccaggggctgggctgtgggccgctcatgagaggccagggatccacagtgatcctgaggggtggayggatgagaagcttatctctaagtggccagccctgggcggtggcggcaaaggcgggggaggctggcgtcccctggggtgggcgccgacccacggcttggtgtagccacagcgagggactcagctagtgagaagaatgctctggaaacgcagagtggattctcggcttcaggggagggggttggggtggccggaacccagcctcgagcgccccctcttggcctggccggggctgcctgagagctgagctttgcacccctttcaaagttatttttgtgagtgttaggagagggacaggtttatcccagagatgccagaccacccgctcaggtgctgctgctcctgggctgaaggacctcccccacactggctgggaggacggtgcgggaacttccgttgtcccgggagggctggtgctgccgctggggcagggctgggagcgcccagggccggcctcctccccgtgggtcagtgtgagcagcttgctgggtgtgtggactgggggctgcccaggccggagaggacagagggtccgagaaccccgtggagctcccacccgctcccacacctggcctcctgcccggcctcgcygtctctctgcaggagagcacccccgcatgggggccctagacgtctgccccttcatccccgtgaggggcgtcagcrtggatgagtgtgtgctctgcgcccaggcctttggccagaggctggcagaggagctggacgtgccaggtgagcgtgcccccccgcccccctcacyctgctcccgtctcattggtgtgggttattggctccttctgtatcccccagttccctgcccttgactgctcttgcaagggcagagtgttccaaaaagccaacatgcagaagcgcagctccctcaataccgaaataaacgcagcctcgcctgcggccgtgcaggcccggggcctcctcagactacaccgcagagcagctgcacaggcaaaccaagagccttaaagtccacgccttctagagcagaataatttcactttgggaaattaactaaatcaagaaaatgatatgaaacaaacagagacaaacgggacaaagtgcatacccacccctaggctgcaccaacccagcgctcctggaaagaaatcccgaggcagggacgtaggtcacagtcacgccagcgtgcagggcacacgtaacccccgtcacggtcacgccggcatgcagggcacacgtaacccccgtcacggtcatgccagtccccccgaaggaaatcccgacgcagggcccacgtcacagtcacactggtgtgcgggttcacgagtttttcctyttctctgccgttatatttatgtggttgcttgcggttctgtttatcatacaaagaaaacagaagcatgaacgtcctgccgttagcatgtcccacatgttccatcctaaccctgcaattcgccttttcagggccctctgaggagggggtgggcaggggtgctggcccacactgagggtccactgggaccacccgcatccatccaaggcggagaacgggcactccccaggagagggtgcagtagaggcccattcctgggttaggctggagggagcccctccacctgcgtcctccaggaactgagtcctggaccccctgccggtccaggcctgaccgccgggctctcctgcagtttacctgtacggcraggcagccaggatggacagtcgccggaccctgccrgccatccgggccggggagtacgaggccctccctaagaaggtgcccccaccccgggcggtcgggcctgggaaggaggtggacctgcccctttgtcctggctggggtggctgggccgggcccctccttcccgggaccccggggggctgttccctcccgtgggggatgtctcaccccagagcgaacttgctcacagctccagcaggccgactgggcgcccgactttggtcccagctcctttgtccccagttggggggccacggccacgggggcgaggaagttcctcattgcttttaacatcaacctgctcggcacaaaggagcaagcccaccgcatcgcgctcaacctgcgggagcagggccgcgggaaggaccaggtgaccccgttcactgaccccatggagccccacccagcccctcgggaaagggttagaggctgagagcctcaggcggggaggtcggtggggatggggcaccggccggacagggttcggcctcccacctgcagaccggcccagcctccgcgtccacaccgtgcggggaccgcgcaggtcggcaggtcaggggcggagtgaagctggggagctctggcctcctggggattttccagggaacgaggcaggacttccctttgttaacatgtggcagcatttccatactgctgggaaacagcgacttccggagtcccaggtgccctcaggggccccccatatccctccagatgccttgggagccccgacacccctacaaaccttcaggtgcccccaggcctttccctccacgtctgcacagcagtggtcacccggtctgagcgtcactccgggtatagatacccggagaaagcgggggggaccacctgcccatctgttccccactcagagaccccggtcccacaaacagccaaggtcctgggacccggcttcccgacctgcagactcagcacaaaagcacagggacctctaagtcctgctttaggccccggccaagggcagaggtcagagtccccccacgtggactcagtcaccccgacaagtgcggggctgaggggacttgtcgggagcggagcagatgggatgggagaacggcatgggggtgcctggggccccacccctcagcattcccccaacatctaggacacagcgtggctggaaggcagggcctaggctgggcgggggcctgccggggtgggcctccggtgtctgacccttggggcctccgtttccctgtggcaagcgaagtttctctggccctccccggccagctcagtgagggacggaggagaaccacagcacccacccaggcacaggctcctccccgtccagctggggaatgcaagtgccaggagagactggcagggccaggcaggatgagcttcctagtccaggctggggaacgctcttcctttgcagccaggacgtctgaagaaagttcagggcattggctggtacctggatgagaagaacctggctcaggtgtccaccaatcttctggactttgaggtcacggcactgcacacggtctacgaggagacctgccgagaagcacaggtgagcccgggagcagccgctgctgctgtgaggggygagccgatctgtcccgtgggcagggcgggggccccacatcctccagccagggccattctccagccagcccccagggggtracgctgcctgtgccttggcaggagctgagcctcccagtggtgggctcacagctggtgggcctggtgcccctgaaggctctgctggatgcggccgccttctactgcgagaaggagaacctcttcatcctggaggaggagcagcggatcaggctggtgggccgggctgccgaggaagggtcggacaggggcgtgcagggagggtggggaggcggtggcggagctcacagccctggggcgcagcttccctccccctcctcccccttcattttattgacttgtgttcagaagatgagatttcactttttattttggacaccttattgaggtttttttgtgacctatgatatgctcagctgtgcaaattccacggagaggacaccccaccctttctgcttggtcttgcctcctgggccggccatgctcccgtggaggggcctgtgcctcctctcaccacctccatcggggcgtcctgcacccctggaactggcagctcatggatgtgtgtgcctttagctatgggacttagatccccatccacggagcggctccttcagaaagtgattccttttgtcttgtggacacctgggcctcaaggcttctggagtctgggttccaccggggcctcaggtcctgctggggtgtggcagcgtctgcagagccgctgtccgccttggtctgtcctttcactcgaggtcactgcagagccgctgtccgccttggtctgtcctttcactcaaggtcactttgttttaggtgtgtttttcgcaataagcacaatccacttaactggattttttggggacgttttgtctgtttgtgtttttactgatttagctctcgtgacttgtggattccgtccttgtttagtctcgggcatattttcttctattagatcgctgacccagttatttagttctctagctgtaggaccccgtgatgctgcagcagctttgatgtcttctctgcctccgtctttactttctcttccactcctttcctctggattcacagtggttttccaaaacccagcctcaatcattggtgcgtttgtggccttgtctgttgtattcttggctgttaacaaaattttttgtgactttacattttgtataatttcttacagagaagatacaggtggccctccactcctgcctcccacccatattttccaagtgcttgcattttgccccatttatttgtgtataatcatattatatttttttccggactatttaaaagttgggttgaagacattgtactcttttacccctaatttattaaggctgtgtttcttaagaacagggacattctcttacataaccacagtgtaattatcaaaatcaggaaattcaacactgatacaatcctagtatctaataatcctcaggccataatcaaattgcttcagtgtcccagtgattcccatcatagcgatttctcctccaatccgtgatccagttcacgtaacacagagcactgagccaaccttttctcctttcttccaactgttcctgtcttccttgtccttcattgaccttgacatagtttcaaaggacagacttttaaaagcgcctcagtggggactagtctgatgttgcttgtggccagatgtagttgtgcatttttattttaatttaatttgttacttcttttgagacagggtcttgctctgtcacccaggctggagtgcagtggcacaatcacagctcactgcagccccaaactccagggctcaggtgatcttcccacctcagcctctcaaagtgctgggattacaggcaaggaccactatgtagtcctggctaattttgtacagatggggttttgctctattgcccaggctggtctcaaactcctggactcaagcaatccactcacgtcagcctcctaaaagtgttgggacgacaggtgtgcaccaacacgcccagccagttacgcatttttggcaggaaaagcatagatggtattgtgtcctcctcagagacgccgactccccatgatgctcattttctcagggtgccgacgtggacccgtcacttgccaaggcgacccccttcctcctggacccttcactgcaatgttactatttttccttttgcaattaatacgttgtggggagtacttgaaggtgtttaaagtattgagtaggtaaatacctgtttattactgaaattccagagttttaggagccagtgacagcattccaacgtcatcctttctgtctaagcagcagctgtcgcttctccacatttccttgtcttcttatgtgtgaggccccgtctgctttccagtgtggcgttttgtcttcttcttttttttttttttttttgagatggagyctcactttgtcacccaggccggagtgcagtggtgtgatctcggctcactgcaacctccacctcccggattgaagcagttctctgcctcagcctctcgagtagctgggattacaggcgtgtgccaccgcacttggctaatttttgtattttttttttttagtagagacggggtttcaccatcttggccaggctggtcttgaactcctgacctcgtgatccgtccgcctcagcctcccaaagcactgggattacaggcgtgagccaccgtgactggctggggttttgtcttctttacctgaagggccccatgcctgcggcctgcacaggtctggctgtgcccgtggctgcgtgctgcctccttgtggtgaggctgctttgctttgtgttgtgtgatttttgattgccagtgcatgctctgtggaattttatctatggtaattcttggacacctgggttcaaagttttctcctccaaggagggtttgtgctggcgcttgtggacactgcctcacaggaccccctgaagctgagtttttggcttggagttctggaaccacacaagagtgaattcggtgtcgggtgaggcctgcagccctgtcagggtggcttgtgattaggaattcccaggagatttttttttttttcctgcttcacccaaagggaaggcagggactgggaagtacctcaactgtttcctctggcgggtggctgtttctaattcatccttgggggtgtcaccttccaggggtctccagtcggaccccactctgaaggccccagacctcccccactcatcaggggctgccagagaggggcagttgcccccagggcagacccagctccaggctggcaggcctttccggactcgtctttctggtcgtgtctggtttcgaatgatgtcctgtctgctagcttagccaggcctttaaaatgcccggcatcttcctggggttttctgcggaaggaggctttgccttgtggcttgctggttctatgccacggggaggcactctccaccccgcccggctgctgtccgtctctgtggggtggggtgggggtcgcatagccaacgtgttctgaatgggtttcccagaatgaattctaatcttaaatgggactgtcacaactttattttgaatttaggtaaaactcacttttgtggcatacaagtttatgtgtgggtgacttggggctgttcctcagcttttgaggacttgttagatgtgaagacttggtgaattaaaatctttcccgcccgtcagcgatggggcagtggtgctggggggcggcgaagcatgagcagcagtttgctgaggggtccccagggggcaactcctttctctgggcctcaggttccccaagggcaactcagggtgatggctgtttccagaagcctgtacggggtgcctgctggggcggggcccacagggctcctggcggggcagmggtggggggtgccagccacgcccctgccctgctccccgcaaaagcacctgtgtgctyggggcagggggcggctgccgcaagggtgggacccgcgggttccgaggctttcctggtggtggagacgcgccgaggccgtttccactccaagccccttttccaggtggtgagccggctgggcctggactccctgtgccccttcagccctaaggagcggatcatcgagtgagcctctgccctcccgccctcttctcacccctcccgggctctgcctctcgggccttgcggggcgctggggtccctgcgtggagacccggctgagtcctcccagcgcctccctttgggcgcctactcggcctgcgccaagcmggggtctgggggctgaggggggcacagagaccccggccgggtccccgcaggttctcagccgagtggtcacctccccgtgggtgcagacgggcgtggggcctggggccgccccgggaggactgcgctccccccaccaaccccggccagacccgctgagccgcgcccaccctgcaggtacctggtccctgagcgcgggcctgagcgaggcctgggcagcaagtccctgcgcgccttcgtgggggaggtgggtgcccgctctgcggcccccgggggcggctcggtggcggcggccgctgcggccatggtgagcgcggggggaggggcaggggaggcgcagttgttggggggagggcggggagggggaagggcgctgttggggggagggcacggggtggggagggcgcggtggggccgccctgggtggagacgtgggggccacacgggtgggacccccgcagggatcacccgggcccctggctcttcctggggtcggtcccgggccgtctggggtccctgcgacccccacatccacccctctcgcagggtgcggcgctgggctccatggtgggcctcatgacctacgggcggcgccaattccagtccctggacacgacgatgcggcgcctgatcccgcccttccgcgaggcttcggccaagctaaccacgctggtggatgccgacgccgaggccttcaccgcctacctggtgagtggcggccacagcagggctccccgggccccaccaacagcgaacccccagctggggccccagtgagaagcgggtcagcctccggctggggaggggctggggaccaggaggggcctgagggcgtcaccactggccgctgtctggaccttgaccaccagcaccgccctcaccccggcaagtgcttgggcccagcagggtttgagggttcggccagggtgaccccacattcacaggccatggcagccggtacaagggaacaggcccctcccagcaggggagccaggagcccaggcttgggggaccccacagacctggagcaaggcagggcccttctttagaagcctgcaattccaggaaaggaggcctgcaagaatctcaggaacacagtgatgagtgctctcaggcaggccagagasgacccgtttcagccacagcataagacagaaacaccatcttcagataacacccactcaggcaggcagtgaccccacctccctccaaacgggacaggaacatgagcatcagctggcaggatgtgcccacagatgggtgctgggtgctcagagcctagggcaggggccagagagcctgggaaagggcagtgacaaggtcaggatgctcccaagcagttccagcccaggagaggacaggagggaagggcagaaaagagagagagagggaggggagagagaagagagggagagtggggagagaggcagatggcggagagagagagggagggagggatggggagggagggagggggaggagagggagagggggagagagggagggggagagacagagagagagggagagggagggagagagggagggagacagagggaggaggggggagagagggagggggaaaaggggagagagggagagggggagagagggagggagaggggaggagggaaaggggagggagagggggagaggggggagagaggggagagagggagagggggaaagaggggagggagggaggggggagagaggtaggtggagagagagggagggagagagagggagagaggggagagaggtgtaggggccagccctacagggtctgtgggtttttctccccgtgtgtagagatgagagattatagaaataaagacacaagacaaagagaagaaaagacagctgggcccgggggaccactaccactaagacacggagaccggtagtggccctgaatgcctggctgcgctgttatttattggatacaaagcaaaagaggcagggtaaagagtgtgagtcatctttaatgattgataaggtcacgtgagtcacatgtccaccgcacaggggccccttccctgttaggtagctgaggcagagagagagaggacagctcacatcattttttttaatcctctttttagaaagattaaagactaatacttttactaagtttgctactgttatctagagggcggagccaggtgtacagagtggaacataaaagtgaaacaggagcatgagctctaaagcacagcatcacagggagacgattaggcctcgggataactgcgggtgggccctttacaagaggtggtggaccagagtcttcttcaaactcccctggagaaagggagactgccttttccgatctgctaagtagcggatgcttttctttggcactgacactaccatagaccatgctccgcttggtaacgggcgccttcccagacgctggccttaccgctagaccaaggagccctctagtggccctgcccaggcctgacaaagagctcacactcgttttttggtcactttttagcgtgccccttcaactcctatctgtgtatggcctggtttttcctaggttatgattgcagagcaaagattattataatgttaaagagtaattgctacaaactaatgattaataattatatataatcatatctatgatctatatctagtacaactcttgttattttatatattttattgtactaaaacagctcgtgccctcggtctcttgcctgggcacctggctggcttgccgcccacaagagggagatggggagggggggtagggagagagggaggggagtggggagagagggaggtggggagagagacagggagggacagagtgggagggagggagagagaaacatgtgccccagcctctggagcagggcggtgggggcgcctgtgtttctgggagggccacaagacccccagccctaagttgggaagtctaccttacaaggctgggtgagaaaggcaggccccaaatgcacgtggaatccacacacaggcacagagggagccaagatgagggcctcggataaacagtcccggatttgcagagggagtcgcctgagggtcccgttctggtcctgtggagaggtgaagctggctgggcttctgggtctggtggggacttggagaacttttctgtctagctaaaggtttgtaaacacaccagtcagcactgtgtctagctactggggtgggaacttggagaacttctctgtctagctaaagtattgtaaaaacgcaccagtcagtgstctgtgtctagctaaaggtttgtaaaygcaccaatcagcactctttaaaaacggaccaatcagcactctgtaaaatggaccaatcagcactctgtaaagtggaccaatcagcaggatgtgggcrgggccaaataagggcataaaagctggccaccgaarccagcaagcgccaaccgtggcgggttctgttccaagctgtgggggctttgttcttttgctcttcgaactaaatcttgctgctgcttactctttgggccttcgctacctttacgacctgtaacactcactgccaaggtgtgtagcttcactcctcaagtcagcgagaccaccaacccaccgggaggagctaacagctgtgctacgcgccacctgtragagctgtaacactcgctgcgaaggtcggcggcctcacggggaggaagaaacagctcccgacgcgccacctgtaagagcttaacgctcactgtgaaggtcggcggcctcacggggaggaagaaacagctcccgacgcgccacctgtaagagcttatggctcactgtgaaggtckgcggcctcacsgggaggaagaaacagctcccgacgcgccacctgtaagagctcactgagaaggtctccggcttcactcctgaagtcaggcaagaccacgaacccgccagaaggaagaaactccggacgtatctgaacatcagaaggaaccaattccggacacactgtttgcagggaggtgtagacgctgatcaccgtttccagtcattttaaaaattcaggttttatttatttactttttacagtagataggcccttcgggggttcaccccgccttcgccacagcccgcccagtgctcgcctctcttgctgcctcagagctccgcctttccttcccctcgcacacagccccgcccgctcccagcctggccccttgggttttccactgggggaagcacccccctccccgggggggcccagggcacccaacacctgcttgcagaaccctgctttctgggatgcgcttctcattaccgggcaggttaagcatgttccgtacatttagcagtggtttttacttcttttccaggaagttatctggtgaatattttttgactccttttatcttagtttctcttggggctttcgctgccttctagtattttttttttttaataggggaggcaggccttgttctgggctcagctttccccgtttgttgttcgtctttggactttgcgtgtggggcttctgacaatgactcttaatctttatgtcgtggaatgtgtcaatcctgactttatattttttgggtcttgtatcacagttcaaatggcctccccagaacaagatgatcttttctatactttaatgggttgatgaactttagacccggacaggcatttgaagacagtcatgaatttaagtataaatattagaaataggccaggcatgatagctcacacctgtaatcctagcattttggaaaaccaaggtgggcaaatcccttgagctcaggtgtttgaaaccagcctagaccacacaccaagaccctgtatttacccacccaaaaagaaaaaaaaaaaataaagccaggcgtggtagcaggtacctgtggtcccagctactcaggaggcttaagtgggggtagcttgaggccaggagtttgaggctgcagtgagtcgtgattgcaccactgcactctagcctgggcaacagaacgacaccctgtctctaatgtaaacatatgtatataaaacatargaacaattttatgtttagaaatttaaaataaggtgmataattaaaaaacaagtaggaaaagtacatagatgaaaatgtaatcaagggacaggaargaaacaagacgtgtggtttagagaaccatgagcggggacagtgagactgtgctaggcatcagtggtcgaaatcagtggattggtttacgctccctgtgagccacgtgaaggtggacggggagtgctggattggtttacgctccctgtgagcaatgtgaaggcagacggggagtgctggattggtttacgctccctgtgagcaatgtgaaggctgacggggagtgctggattggtttacgctccctgtgagccacgtgaaggtggacggggagtgctgggttggtttacgctccctgtgagcaatgtgaaggcagacggggagtgctggattggtttacactccctgtgagccacgtgaaggtggacgaggagtgctgggttggtttacactccctgtgagccacgtgaaggtggacgggggagtgctggattggtttacactccctgtgagccacgtgaaggtggacggggagtgctgggttggtttacactccctctgagcaatgcgaaggtggacggggagggctgggttgatttacattccctgcgaacaatgtgaaggtggacgaggagtgctgggttggtttacactccctgtgagccacgcgaaggtggacggggagtgctggattggtttacactccctgtgagccacgtgaaggtggacggggagtgctggattggtttacactccctgtgagccacgtgaaggtggacgggggagtgctgggttggtttacactccctctgagcaatgcgaaggtggacggggagggctgggttgatttacattccctgtgaacaatgtgaaggtggatggggagtgctgcattggtttacgcaccctgtgaggcacgtgaaggtggacggggagtgctgggttggtgtacactccctgtgagcaatgtgaaggtggacggggagtgctggattggtttatgctccctctgagcaatgcaaaggtcgacttttgaaaaacataaggagatatctgtaccttgcaccaaatacataagtaatttccagatggaatagaaaactgtatttccccaycaccaacacaaccaagcctcacgataaatcacagaaaacaaaacggaccgggcgggcaggcctcggccggacgcagatgaggccacctaaagcacacccttggccaagatctgcccagggagaccatggacaccgcaaggcctgggtgtgagagagtgttcgtagcgcgagtcgcagcttgaggatggctgtcctkcctccgcctgcaactgctacagacccttgtgcagaggacagcctgggagaggggctgcagccaggaggcctggtctggatgatgccccagccagtcagggagacactgggcatttctgttcctcgatcactgctgtcggaatggtcaaaggatccagatctggctggcgcccagggagcatttgctctcatccatggtcgagggtaggggctgttgatgatgactttctggtggagagttggctgaatcttccaagatgaagtgagcatattccccactgagaaccccttggccagggctctggccacagtccgtgtgagtagggctcccagtgggtccttggaaggttggtgtgtggtcccagctatgctcttccacacggggtgggtccgaggagccgagtgccttacggtgacgccgtgagctacacacatgagcacctaggaaaggccagtgcctgtgaccggggcagggacatgaggggctttgaggtttgctcttggtccttctgcacagtctgagcctcttatgcccaggcttgggggcggtgcagctgcttgtgttggagacacaggcccagagccactcctgcctacaggttctgagggctcaggggacctcctgggccctcaggctctttagctgagaataagggccctgagggaactacctgcttctcacatccccgggtctctgaccatctgctgtgtgccccgaccccccctaccctgctcctccaccaagcctgatgcnaagggctataaaccactggcccaacagaagcttggttcccagagaactggtccctgcctgggacatgctccttgctacagccccttgtgggagctcagagggcatggctgctccccctacggtccctcgcccagtggttctgtctctttatggcaggaagcaatgaggctccccaagaacacacctgaggaaaaggacaggtgagcctggagggccggccgcaccgtgggcctctgtgtctggggagttggtggccaggatcccgagtacctgggtgctgtgacggggcgtggttggcctgggcgtgctgggtgtttgggaatgacttcccatcgcccgcttctgcagcctgctcagccctgttggggtgcagtgtgtccactgcctgcctgtgtgtgccgcygygcycaggctctcctcttgctcctttcaggcgcacggyggccctacaggagggtctgaggcgggcagtctctgtgccgctgacgctggyggagacggtggcctcgctgtggccggcsctgcaggaactggcccrgtgtgggaacctggcctgccggtcagacctccaggtaggggggcccgggggaccccaggcctcctgccgcaaagcaggaagcagctgttggggctgagttgctggagagcacggtggttggctgggctgagccaggtagggagacctcacttcacgggcagttcccggggctttggcctcctccaacagggccggggtgtccgctgccttctaagatctcgctcacggcggcaccacagacggagacccaaatgtgtctgcagagcccaccctgaccactgtataagtgtatactcccccaagaccccttgtatcacccccactgtcttgttctagaaaacacctatgtcagcccaggcacaatggttctcgcctgtggtcccagcactttgggaggctgaggcgggaggatcacttgaatagaggaggtcgagaccagcctgggcaacatagtgggaccctggctgtacaatagatacatatgagccaggcacggtggtgcctgtggtcccagctacttgggaggctgaggcaggagaattgcttgagcacaggaggtcaaggctgcagtgagcygtgatcacaccactgcgctccagccttggtgacagagcaagaccctgggtcaaaaacaacaaaacacgagaaagcacacaaggcagctcttggaagtagatgcctcacactgacrggccacagctgggcagagggtcccagagaaggagcgtctctctcatgggctcagcactttctgcagctgccctaagacctcatggtcttcgggttctttataggaaagacgcctcttttcagcatctggtcccagagaagtgtcccctcagtccctgggaagtgtccctgggcagtgggcgggccgttagcctgaagctgcctccgggggccctccaggggatgactgtctctagaactgtggtcctggttcctagagtggcggagagcctccagtgtgactgctcccaggcytcctgtggggctgagccctgcttggataagagaaagttttgttttctaagctcartggtggggcttagccctctgtggggcgaaagcgggggctgcgctgggctccttgtgaggaggaggacgaagtccggcctgtcccagagcccgtcaggcagagaccctccttccggcagtttgctcagccttgatccatgtaggggctccctggggtccttgcaggtggcggccaaagccytggagatgggygtgtttggcgcatatttcaacgtgctcatcaacctgagggacatcacagacgaggcatttaaggaccaggtgagcaggaggcaggtgtggtgcccggaccccaygtgggggcctggattcacagcctcagggtgattgccgactggcygtgggcagtgggggtcggaggttgctgcccagcaagctgggctgaagactggaactaccagacccctctttccctgtgtccatcagatccaccatcgtgtttccagcctcctgcaggaagccaagacccaggctgcactggtgctggactgcttggagacccggcaggagtgacggtgcgggaggcctctcygggctctgtggcccctccctcgcccatccccagagggcagagctgtgacctcggtggggacacagcttgttcrtgtggggcccggaggrtaggtgggcaggcagcggggcatcgcctgggaatggaggcgctggcagggacagaaggcccctagtcccatgtgacctccagtaaagttttggcaccaaacctgtgttgtgtgttggcggttttgggggcagggctgagagctgagctgcgggtcttggggcaggagcaggacatatggtcagtggcccatgggagccagggttggagggaatggggttgcagcgtgaggagacagacctcagcgccagggtccccagacacccagtgcagcccacagtgggcagggtcacaggtattcagaggacctggggttcagtgcaggtccctgggctgtgaggccccttgtctgagggaaaggggccctggttctgtgcatgggacagaaaccccagggacagcaggaccttcgacgctggaaggatagcctcgcttcccaggtgcagctcccggcaggtctggacagttccacagagcacggtactggccctgtcctcagttcccgtccacccttcaaccagtggctcctgggagacttttcctccctgcctcagctccctgcccagccagcctcctgtctccagagaagttctccattaaaaaataatttagcaaatcactatactctcaaattacttctagatggactattacatgtgacagatgatgtatgaatgtatttgttagtcagcactgcaggatattaaaaagaagattactgtgtccttgagtgaagcagaaaactcaaatgccttattggagagatttcccattctgaaaatagaacatacttgttcatgaaaaaagatgtcatcatccaagacaaatgacaagaatcctacagggagaaaaaacacccaaggtgtgtgtgggtacagggccatcatcactcagcatgaaaggttcctacatatccggccggcagggggtgacagggagggggtgccggggaggggagactgggagggaatgctgggagggaatgctgggaggggaggctgggagggaacgctggggaggggaggctggggaggggaggctgggagggaacgctggggaggggaggctgggaggggaggctgggagggaacgctggggaggggaggctgggagggaatgctggggaggggaggctgggaggggagtctgggaggggagactggggaggggactcaggagggaaggctgggaggggacattggtgaggggacattggtgttggggatggtgaggggacatttgtgaggggacattggtgttgggacggtgagggggcattggtgttgggaccatgaggggacattgtgaggggacattggtgttaggaccgtgagggaacatttgtgtggggacattggtgttgggacaatgaaggggacatttgtgaggggacactggtgttgggaccatgaggggacattggtgttaggaccatgaggggacatttgtgaggggacattgatgttaggaccgtgagggaggagacatttgtgaggggacattggtgttgggaccatgaggggacatttgaggggacattggtgttgggaccatgaggggacatttgtgagggatgctggtgaggggatgctggtgtggtgtaattggtgaagggccaatggtgagcggcagttgctgggtggagctgtgggtagagcctgtaggtagctggaagtcccttccagtgggactgacgttcctgccctgcagggtccgaggctgcacacgtgggagctggcacgagagaggggagcgccctctccctgcagaggccctgggcagctcctgtgtagctcctgtgggtggagcctgtgcacctgcaggggcctctgcctccctccacctgcgggacccgcggtgttcacctggagcacagagatctgagggctgacactcagggcgcaggggcttagcaaaacaggcgggcctcttctgcatctcctgctggcatttgcgtagtttttttgtgggatgggaaaaggaggaaaggaagagaaaataactgacgtactcccctggagctgcaggctgtgtggtcagatgacagagcggtggagtatgaagaaaagagtgagtcttttcaaaggacaacaaagtttcagggtatccagagtgaactgcatttccccagtttcacatgttgactcctgaccctgaccctcaccctaaacctgaccctcaccctcaccctcaccctcaccctgaccctaaacctgaccctcaccctgaccctcaccctgaccctaaacctgaccctcaccctgaccctcaccctgaccctgaccctgaccctaaacctgaccctcaccctaaacctgaccctcaccctcaccctgaccctaaacctgaccctcaccctgaccctaaacctgaccctcaccctgaccctaaacctgaccctcaccctgaccctaaacctgaccctcaccctgaccctaaacctgaccctcaccctgaccctgaccctgaccctaaacctgaccctgaccctaaacctgaccctgaccctgaccctgaccctaaatctgaccctgactcctgacccctacccccaaccccaaccccaaccccaaccccaacccctaaccctaagccccagacctctggatgtgaccttgtttggaaatggggtccttgcagatgcagtgagctcaggtgagatcatcctggagcagggtgagcttggtccagtgtgacttgggtgaggttatcttggaataggctgagtcctggtccagtgtgactccagtgaggtcatcctagagcaggctgagccttggtccactgtgactctggtgagctcatcctagaataggctgagccctggtccagtgtgactcgggtgagctcatcccggaataggctgagccctggtccagtgtgactcgggtgagctcatcccggaataggctgagccctggtccagtgtgactcgggtgagctcatcctagaataggctgagccctggtccagtgtgactcgggtgagctcatcccggaataggctgagccctggtccagtgtgactcgggtgagcttatcccaggataggctgatctctggtccagtgtctcgggtaagctcaccttagagcaggctgagcctggtccagtgtgacttaggtgaggtattctagagcaggctgagccccagtccagtgtggtgacttgtatccttatccaggagatcaggaaccctgggatgctggggagaggccggggcaggcccttctctagtcctcctctagccctccagaggaagcatggcccggctgatgcctccaggcctgtggccgatactggtagttgttcaagctgtgtctgtggtgccctgtgatggccaccaagcccactcctgtcaggtcagcacctgcctgtggagcctctggttcactgtggggctcctgagctgagcctgaaggaccctggggtctgaacagcaaaaactcactgagatctccacacagaacacaacaggctcagcacctgctgtctccccgtctagtgttaatcatgcgtccacccacagaagaccctcagccatggtgacacttcttagagcactttgggcctggctggggctggagggagagtttgctgatcaaggctgtggggtctgcacaggcggggtcagccagcacctgcagttgatgtcctaggaggtcagggctgggcccgggggagccattgaccctggtgggcgagcgacagctgcagtgtttccctcctggccacaagacacctttgaggtctctcctgcgcacagaagctcgcaagcaggcacgcaatgggttcaaagcctttattgggtcagggcttgctccagagctcaggggccaggtaggtcaggagccttgggatggctgcagggggagggaggccgggcagcctgcggagggcctggggagacctggggctgggcgggggccggggctacggggaccccgtgggaggagctggagaggtgcaggcccagggcgtcgtccgagtgagcagcggtgctggccgtgtgggacccgggcccgcttagcaccatggacggggtgggctcacgaccctcgactgcggggcccgggcggcggcgctagcagatccagcggakgaagcggtcgaagaagcygggttgygccaggctgtcatagtccttctcgtggaacacggyggcrcggtcacccaggctgagcgtggtgagcacgtccatgtccacgtcgctgcccaaggccagcacggtgggtaccacgttctgcttgcgcatggagtgcgccgactcgtgcagactgtcgttgcccgtgacgccgtccgtgaggaacacgaaggacagctctgcgtgcctccgggcccygccacgcgggctgcgcacgatggcattgatggcgtgcaccacgcctgcgcccacgtgcgagaaggagttcaggtattgygtggtctccagcgcctcgtggatggcmgtgaggttgtggctcagcgggaaggccacctgctgctcgccggggccaccaaactgcagcagcgccacgcgtgcgttgagagggtcgtcgtccctcygggccagygtcagccgccgcgccacctgctccacgaagcgccgggccttgtggaagttctgctcacccagccgctcggagccgtccagcaggaagacgatgtccacgggccgctgcgtgcactgtgccacggacagctctgtggggagacgcaggtgcgggctgggcggaggagaggtgggcaggaccgggcaggtgccagccccgcacctgtgcccttccattcgcaccctgcctgcaacctcacagaccactgggctctgcgggggcgtttctgcagggcagccctgggtgtgggtccttagcccaagacactttcaggcggcactgctgggagccgccrtctcctctgctggtgctcccaggcctgagaccctgacacaggccccaggccctgtccacctgctgagcaccatccctgcacaggctgccctcctgggagggaaggggcccaaagcatcctttcatggctcaagaatttgctgcccacaaaagggccactgtctgtgtagtgtgggaggtacttaaggaggaccctggctctgacacccccagcctgacccctcaatcgctgggtcccagagctgctcagaacacctagagctggctgggccacgtccctcccggaaagaccaggagcccctgactcttctgattggccatggtggggagcagtgggcacaggggcagccagaccttctgtggcagcccaggtgggttctgccctatgactctgttaccaagtggggcccccacctgcctgggtggtcaccagccctgggcatcggggacagcttgggggcctggccatagccacaacccaggccaggctgcctaccacaygtgtgggtgtcacgtggggccagagaccacaggacaggacacggacagtccttgcgtggacctggccctgtggcctcaccaagacctcagctcctgggatgggggaggggagggacagagccagtttccccaagggtgtctgcttctcagcccaacccctggacgtcgtcacagctggtacatggacccccaggaatgcacacagaggaccctgacccgaaactcggtttctsggggccctggaggtgcaayggtccagccccgcaggcagtgagcaaagctctgaacacagcagggtgacctcacgctgcaccrcagccttcacagaacgcttgagacatggacgccgtctgagcacgcacgagctggcagatggggttccctcagtgagcttatgagtgacgcagctyattcagtgaaaggaagggcagcctccctgttaaggccacacctaggaaccggcttaaatgtccagaaactcctcaggtaccgctgggcttcccaaaccccctcaaaactaataacattttcactgctgtcaccaaacatatggagacagacatgcaaggggcagctggttttgggggtctctgtccattcatcagtgtctgtggggcctggaggagacggggaagctgtgggggccggccaggcacagggaggctgaggctgttgggatgtctgtggactctgctctcctcctcctgtggaggatccttcatccccacagtgggaagaccagcctggcctgccctgtgcagtgggtgtggggacgagaacctggccctgagaaatggtcacagccgtgcccggcaggagcccagcctggatgagggctcctgcagtcagaacgtcggggtcagctcgccgtgggggccgctccctttggatggtgatccctgccgctccccaacattgtggaccctgggattctctgctcagtcctctgaggaccgcagaggttgtgcctggtggatgctcccccgactgtgcttttggagacccagaggttgggctggaagggtgcagacaccccgggatcagggctgctggcaggcagctgtggccattcgccctactgtgcatgacaccagcccagatacgtcatggtgccaggactgccagcttcccccaggactatctgctgcccaaccggaagccttcacctgccaccaggtgggccgtgagcgcccacgagtcaccatgcacgggattagtgcccacacccagcgag

SEQ ID NO: 95950 - DNA, 134046 bp, Homo sapiens
  misc_feature (1)...(134046): n = A,T,C or G
acacacttttggccaggcgcagtggctcacgcttgtaatcccagcactttgggaggcccaggcaggaggatcacctgaggtcaagagttcaagaccagcctgaccaacatggtgaaaccccgtccctactaaaaatacataaattaactgggcatggtggcagatgcctgtaatcccagctactcggggaggctgagccaggagaatcacttgaacccaggaagtgaaggttgcagtgagccgagatggccccattgcactcaagcctgagcaacagagcgagactccatctcaaaaacaaaaaaacacttttacccataaatcttacttccaaaaatcaattctgaagaatagcaacacaaccaacaaaggatatggatatgggtgttcgttcacactgtttacaacaacaacatattgggaaaatccaaacgcccatcacacgaggagctggccaggagtcggaagcacacaggcatcaggggcctgctggtccatggtgagaaggggtgggtctccattttctttttgtttttgtttttgtttttttttttgaggtggaatttcactcttgtcgcccaggctggagtgcaatggcacgatctcggctcactgcaacctccacctcccaggttcaagtgattctcctacctcagcctcccgagtagctgggactacagggacgcgccaccacgcccagctaatttttgtatttttagtagagatgtagtttcgccatgttggccaggatggtctcaatctcttgaccttgtgatctgccctcctcggcctcccaaagtgctgggattacaggcatgagccactgtgcccggcctccattttctctactagaagagggactttgccttttctaccacattgtttgaaatatttacaactagtaataattttgcaattaccaagaccataaaaagaaacaggtggagggtatataaatcaaatactactacaacagacacggaagtgagatctttgtgccagtgtcttctccttttgcacaaaagtcaagggcagaccatctgcccgtctatttattgatcccatcttgtcggtctcccccagagaatgccagcctcttcaggtcaaagggcaccccctttctctgattcttggtgcatcccgccccgtggttatcctgaagagctcgtcgtggcaggttcattatacacgtacaagacaggctgattcctcttggtgttcaatggtgcacctttcggaaggtaaagtgccttacctctgcctgtctgatttattttaactctctcccataaggtttccagggtccagagggctccaattccgtttcacaagccctgcccagtgcctggtctacagcaagcaggcgctgaatacattttgcttgtttgatgaactgatttttccccaaccccctgcaccacccccagctcggaagaggtggtggaggaagtgactggagtcttttcagaatagtcacgagaaatgctggttagacccaagagagaacaggcagatgatgcccacgggcaatggttcagtagctgccactgaccatggctctgacccgccaggccaggacggctagagcacatgctgggagctgctggccgtggcaggacacgctgcctggacaccttcttttgcctttgggaaccccctttagactttcccggggtgctcggactttccttcccagtattccaatctcgtgggaaggtgatcactcttcaaggataggccagacccttctcttctcctcatgtgccttcgcttgtccctttcttgctggagacggtgagctggccagggacctgggaaccagcaaccagctcctcactccgcagtcttggcccttcttccggactcagctcctccaatcttcaatttggctctgatgccctaatttgaaactctcctttggtgtgatctttttgggaattaaagagggagctctgcatacaggaatgagcctgtgtgcaccctggaaggtaccagaagaaagtgcagtctgggcagagagtggaggcagaggctggacccactcggctcttgggagcgcgggggcttggtacctccagaatctcctccatctccagcctccttccctgtgacacacgggcagaatctcacactctgtctgaagtttccagacagttggaaacgtcgctcatgcatatatgaactcagtcaccacgttccccaaagacccaaggcctgagctgaggaggcattcgaccccagccagcgtccccagcctcgtccccccaagggtccccagcctcatccccacccaaggtccccagcctcaaccccacccagggtccccagcctcgaccccacccagggtctccagcctcgtccccacccagggtccccagcctcgaccccacccagggtggccagcctcgaccctacccagggtccccagcctcatccccacccaggctccccagcctcgaccccacccggggtccccagcctggcctgcggcctgcctggcagaggcaggaggttcccttcgtttttatcttgattctgaggaacgaacattggctgcattcccgacagccgggccaggagcagggatgtaggtttaggataccaggagaccctggggctgatgtggggggcacagagcaggcgccacttctggaaccttccccaccaaggctgttcaggaccaacgagcatgactgcaggcagagccaggggaaggaaggcagagaataggcataatgcccacctaggaaataggcacaaatgaagaccccacaacctccaacttggatgcggagtcaaccattcctcactacctgcactggtgaggtctgtgtgtccacctggccagcccgggatgcccaatagctggggatgcgctgtttctgggggagtctgtgaggtgcctctggctgagaccagcgtttgcagtggtggactgtggcgagcagatgcctccctgtgtgcatgggatcatgcaaccccttgaagggctgaagagaacaagaaggcagaggaaggaggaacttgcctctttcctcccacctgcctgcttgggctgggacactggccttctcctgccctgggactgggtccccaccatcagctcccgggtgctgccctcaggcttgcactggagccacaccaccagctttcccggggctccgrcttgcaggcggtagctggcaggacttctcagcctccgtcctcatgtgagccaactcctcactattggtctgcttctctgaaggaccccaactcatgggtccacctgaccgtggtccaagtcccatcacactttgcaaagctgactgcagctgctgctcactggcctccctgcctggccccttccatgcaccctcctccagcatccaagaggatcctgtgaaaacccacgtcagaccatggccctctgcaccgcctcctgcaaggcatgcagtggaggaagagtgacctcaagtcactcgtgtgaccacgcggggttgcccccgtcacctctctgacctcacagcccactacggtcccccacagcccactccctccctccgctctggccacgtggcctcctgcataaggctgcttctgtgccagaacgtccttccctctgacacacacaggctccttgctcctaacacctgtaagatccctcctcctatgtgaccttttgcctggccactttctctaaaattccaactccctcacactgcacattccctcacactgcacattctatatccccttccccgcaggatttttcttttttagagatggggtctcactatggatttttcttctttgccttaatttttatccaacaccctacacattctatttatttataccatcgtgtctgtcttccccagagaatgccagcttcttcaggccagggatctctgcttattctgttcactactgaattcccagtgcccagaacagcacccaacacgcagtaatgagattgttgacgaatggaagaccgcactgctccatggggatctgggagaggaaagggttcctctctaggcagctgctgaggcctcatcgatccagtatctacacaggggtccagtccagctcctaagagtgcaaagtaattatagatgcgattattctcctgagcacagaatcagccaggcagtgtgaggggccagcctgcactggtgctggacgcacacagagtctcagagccacaccctccaccctcctggggaactgccctgcagaaccaccccccatgggcgggcactcgtccttctggggctcttggaggaaatggttacagaagactaggccagatgacaataagggatggagaataactaagtgccaagccaaygagccatctgctggtaagaactccatgccaggcagcacaggcggtcccaacagcacgatctctggattagcccaaatagcatcggaacatttgacaacaaattgaactactagtaatagtgctcacttcaatgagccggggacacagtatccccatggcgagtcagctggcccgctgtaaccacccagctgggtctccccaccccaaaggcctccaggctgtccccttctcatcctgtcacttgaaaagcacaactcatggtgccaaagctctgacacggactccactggagctgtgggcagggggtgccaaggtaccgagttccaagccgttgttatttgagagcgtgccccccgccatgagagcaggtggggggacataaagtgacacaggatggactggccaaaggctgaggacgatcacttacctcacaggatgatgccacccccacggacaggcaaggagctctcaccttccccaggaccccagctgccaccagagctccagatggccctgggggtgtctgtaaagcctgtgaccgtccaccaggtggagaccaggctggccaggggagggagaggaagtgaccactggccctggcactggctggccggctccagcaggcccgaaggggagggaggagcctgggtgcaccagactctctcaataagcagcacccagacacttaacagatggaaagcggtggcttggaactcacttccaacgaaacaatagcacatgctccggctggctttgacacttgcttccaaaggcgacctgcacccagggccaggaccacggcatctgagcctcctcccccagccgccaaccccattcccaatggaggagcccaggagaactgggggcggccaaggcagcccttccctgctccgcagatccagaggatgcccacagcccccttcccctcccgcctttcccacactccctgtagcaattcacacaagcggggaggggacgaaactgctgaatccagcagatagcttgtggcggggtaatcctcggtccggccccatacaggacagaaataaaatcgccatttcagctccgggcgcagctggaggaggctgacgccccctagttaggggaaggctgtgggtgaccgagaaggaacttttcccgttttctattcaaatgaaatgagggtggcggtcgcagcagggagagaggagcgaggggagttttcccggcggggctggggggtccacagcggcgcggccacgctcagcccagcgctggcttaggagggacgggctgcgtggggaggcgacggctccgggccgaaggggtcgctcagggctctgcacagctgtccagggggcatcgggagataggcagccgaccgggggctggagtcaagggaagaagaaagagggggaagggaggtgcagggagtgaagaggaggggagagaggagagacgggggagggaggggggaggggggagggggaggggcgggcgggcggccgggaggaggagcgcgcgagccggagtcggagcccgagcccgagcgcgagccgagcggaggagaccctgcggcgcgcggcggcggctcccgggcgtcccgggcccggtggcggcgcggctgtggttggctgagcgccgcgggccgccccccgcccgccccctcccctgctcccctcccccgcctcccgcggcggctggcgtcgggaaagtacagtaaaaagtccgagtgcagccgccgggcgcaggatgggatccggctcctccagctaccggcccaaggccatctacctggacatcgatggacgcattcagaaggtagcccctcccccacccagacaccccctcctccccccgggtgacagcgccggggccgggcgcggcggggcgggactgtccgtgcgtctgccggtccaggctgcggcctccgtgcgctccgccagctctggtcgggggcgggggtccccacgcgccggctccccggggaaaggggcgactcgccctggggggtggggggtgggggggcgggctagtgtttccgtttcacaggcagagcttttctttttgaaaatctgattaggctgagtttttacattcaagggctggcacatgaagcctttaatttccggtggatcggcccgccgggcagccccggggtcgtggtccgcggagggggcgagcagccgccgcttcctgtcgcgcgggggcaggtgcggggggcgccggcggggacactgctcccccgcaggtgagtagctccgactgcagagggggactcgggccgctgcacctccggggccccgcggagagcctggggggcagcgggtccggctctcccctgctgtgcggagataggaagtccctcgaatgtccagcgttcctagcggacttgagttacacgggagaggggttcagaatagaccccctttgttcgtggccccctctgacgggcagggagggacaatgagcgcgccggcttggaaggggctctcatgagctccccctaaagtccccagggaaaagccattgtgaggaaatccctcaaacctcagctgggcgtttcaggaagcccttgcagctgcttctcacctttctgcccacggagtactccactgaaggaggccagggagagatgccccagccaggcacagagcaggtgccggccaggcttgagtctttcctgttcccagaggtgcatttggccagtttaatcagtagatttaagccaacaagcctccctcaccctgtgcccggcttgatccccgtgaaatggaaagtacagccctctcccaccgtagcccgctttgagagactcagataaccgggaggaggaagcatcttcaaggacaggtggtcacccccttatttaatcagtgctgggcagctgggcagctgggcagcggcagacgcacaactagacccaggtccctgactccaggactaggcgtctgcaattgcatgggactgtaacagcctcctttctccccaaaggaaggagtggccctcccttgaatatgtcactgcaccagcatgcacactcacacacacacacacatgctccaatgctcacacatccactcacaaacacacacacgcacacacgtgcatacacacacgtgcacatgagcacacagacatgcacaccacataggcacatgcacacacactttttctgcccgatagatgagaatgtatcaaagacctgcctttaaaagcaaaagtctttttaaagtgagttgtcaccagatcaacagtagcaggtccgtcctaagaacttcctaaagatgtcccgggagcagctctcttggaagcaggtgaaaagtggaggagagcttcaggaggggtgggaggaggacgctggkcatggcaggccaggctgttattgtgggcagggtagcttttcacagtggacacgctgaggttggggtgatctccagaaaagcagcctgcaggtgggccctggggaagacatggcatgtggcacctttgcgggggagaggcggattgactgccagctctaccacttcctgtaccacgagcaagcccctgggctccccaagctggcatccccgtccataaagaagggataataaaatctgctttatagactggaatgagaagggaatgagtgaatgtaaacactgcctggaacactgcagaacacgatgagcattattcttccctcagttccttccataaacgtccttttgtggtgcaaacagggaggcgccagacgggtctccaacccccaccccgccccccatctccacgaggtctgttgcttgctcctgagctgcccccgccctctgccccttgctgtgaaccccgttggaagctcctagctggactgtgagtcctggttgaagctgaatcgtttgcccaagccatgtgccgggcaaagcatgataacttctcgctcacctcccaggctgcacacccagcagtgctgtcacrgatgggttgcaccgggctcagctgagagcactttcagtgccgctgccatcagccgccattccttctcttaaagtaccaggcactgggtaaatcctggaatttccagcgtgaatctgtctccctgccatccrccccatctcctctccatcaaaggtcatggaaacaaacccatgttgcttcctaggagggagccctgggggtcactgggtgcaggagataagggatgtgttgctttccgtcactgtgttcgtcggcaccacctggccatgagtcctggcgatgggcacacccgccccttcgttatctctgctctttgtccctctggttacctgacccctggccatctcagtttccccctgagaccgcagagacggggaggaaggagggaacattagaaactgggggttctgccgagttctgtgctccggcaaagctccaggttgacaatctgaagttgtctgagggaggccccgggcagcaagtgccggtgtctcctggcttggccttacctgtgcaggtaaccctgcagacatgcccagtgattcagaggagccgctgcagccacttggcgccaggccaatgctttatttatatgaagaaaactccagacacgcacaggtgtcacatcaccagagtgacacagtgggagwcagcaacaggaatttgggggattgtcttccctcctcaggagcttttccttcagaggttgtgcagaggaagctgggcgtgtgaagtgagtyggaggttgcctcctgagccctacacgaaggcaggactctgtgccctggagtccaactgaggctccgttttcagtgctcccctctcatctcgagaaccttgggtcagttacttcactctgtgcccctgtgctgctgtgctaataattaaatgggataaggcagattgcctggtcaatgagcccgccgtgtttattgagcatctactatgtgctgagtgctggggtccatgggaagctgagtgctggcggaatgggaaggcaactacaaatgataaacagyagcagacgttgcaggctgggtgggccagccccgtgtggggcctgatgaacaggtttttttccctgacgatcggctttgcaggctttgtrggctttgtggggaaggagccctttgtgcagaactggtagccatgaggatggcctggtgagaagctgctgaagggctggggacagcctccacccagccagcagcatctgcaccggcctgttcccgtcatctgttccttggcttgccagggtgcacagatcaggacttggcacttccccagcaccaggtgaagccctcctgtcacccccaaccccgtgtctagaccctcaggtgggctgttaaagaaggggagaggtggaagccaggtccccaaacctagggtgctgaggtccttgcttcagagagactgtgtcctctaggagctgaagcgcttcgtctttccccagaggattcgttttttcctttcctcagctgcccctaccctggggggccctggctgcagcacctgctcctttctcttgcctatggagaaagggtttgctcagctgagctgcccatggagtgacagggacgacgcactcagcactggggagctggagggggtcccacctggtggcacatccaggcttgggtttgccaatcttccgaatcggggaagagagaggcctttgggacccctgggccaggctgtgggctcgggtgtggtgaggagccacatctgggcaagactgaatgctccggggcctctgtggtgccactgccctgacctggcggccccctcgggacactcgcactgtgcgcggcctccctggcgcctctgggctgtggtgttctggtcttggccttgctctgcagctggaacccaggtctgaacacatcggtggccgcttgagtttgcggggctgtttctactgtaaaccagagcagtgaatgcgcacagcccaaagggaggagccgcgctagaargtgttcaagcgtccgcagaagtyggctcccagttcttaatagtttgccacccaccgtggctacgccacacctacgcttgcctccacccsacctatgcctgcccccttcacatgcgggagcccagggctccgtgccctgggcagctggtggggtctgcccaggccttctcgtgatgcttccacccagcctggtcctggcacccaaggccaacctctgcgggccccagagctgtgcctttttggctcaggtcctccccrcagtgcttggagtccaggcctctgcaccctgctggggtggtctgtggtcctggcccaagggaatgtcgctccctgctgcctggttctactgatctgtcctgttcaggcccctctgccttcatttcttgctttggcacaagcatgagctgctgtttcccccagctcctcaggggagaggagtgcactgccccaaccttgtctggtgtggttagcatggtggggccttaagccctacccggctcctgcgtgcctttcccctctcctgcccacgacatggtcaaatgcaaacctcctttcattttagaaggcatgggctgctcagcccacacgcgcagtgccctttcctgtggctgcaggcatctctgctcaattgtgcagggctgcgtcccccggccacactgactcctctccaggtttctcggctccagcaccactgtctrcgccctccttcccaggtggacggcggctctcctcgccatcctctccacttccagcctatcatctgtctgcctgttacatgtttgtaacttttgacctttaaattggtataaaaatggtactgtaagttcactgaaccaagaaaatctgctgaaggaagggggtcagtcacacccttttggggtttccagtgtatgaatggagggggtggcggtggtggagggacagggagcaatgagagttgccagccttattgctgtcctgacccctggctggggacgactcccctgtctccacctgaattgaagctgggctgtgaaaagtagtaagaaccctcggtttttggttcctttttcaaccagcaatcagccatgaagtgcctgaccacttgagagctacagcaggtgctgtctcggagagggcacaggaaactgggcccttcccaattttagcccaagggtgccgaaaagtcagggagctgctggcctccacactccttcccattggtgtggtccgaattcccctttagccagacatttccaatgtccagaggcccaggaggggacagctggaagccagaagcccacctgacgccatcaggaatttccatgaatgacctggaaacctctcagactaaaccaatgccgcccaatctgggaatccaggagggctggtcccatagagtggtggggacatggtgctgagacggacagcctcgcctcatccgcctttcccacttgccagccgggaggcctgggcaaaatcactttctccccagggaagtggaggctcactgtgcagtccacgcggagcaatggggtgaagtttccagagcagggcagggcatgtggggaggctcaggaatgccacccttgccctcaggcctgggcacagcatagcccccatgacgcttctctcatcctggacccatcagcccggaagactctggaagcagcagtggcagcaccttcctgtcacttgtcttgtcactccccgagtccactgtgagctagaaccacaggctcccatgaagaaggagccagaaccacaggccccatgagcccaggtcccacagccmgcaccttcgtcttccagccagcctctccggagctcagtgtgggtggaggggctgtctggcctcagaaatgggcaaaagacagctctcgttgtcagcgaggtaaatctagcgcagaggaagggcacactgtcccygtcagacgcctcagatgaactgacatgcaaatgagagatgaaacggggacgagccgggcagctgatctcagtgcagcaactgggacacctcggggcataagccgggcagggaggcggcaggaactgggccccagggggccaagacttcctgagaggctgggcccggtagcccagtcctgggcttgcttcccagggggtggtgggcaaccctgaaccctctctcacccaatcacctgctcccctgggtgcaggtgacccagcaagccgcactcctgggaaatttcagaaggttttgggcaagaagggcccagagagcccccagagaccagacggcacagcccgatagctgggcctgccccagacaaagcgtgtctgcactccttggctttctccccagacaaacccaccctgagctcaggatccctccagcttccaggagcaggtgcggggcctgcagggacggctcgcagagaaggcagtttgcgagtcagtgcctggcttgtggaggttgagaccaaggccagttgggtgcttgcatttccaggggtccaaatatttttgagaagaaaatgttctaagaaagtgcacagggtggtggatgaaagaccacgctctgggtaccgtgtacaccgctcgggtgacagtgcaccagaatctcagaaatcaccactaaagaacttacccatgtaaccaaacaccaccccttccccaaacactattggaattaaaaaaaaaaaaaaagattaaaatggttaaaaatagaaagtgcacaagcaagggtccatctgcaggagttggaggagcgcatgcctgtattcctggcactgcgggcacagtcatgccatgggcaccagggacgcccagtgcactcagccacccaggggtggctcccaacattttcaagctcaaaaagaaatattttcacttgagggtgcaacttatttgtcttgaacccatccctgactgcctgtctcccccctcaccctgaccacatctccccaaatcccgaagctggtcacgcaacgggagcattggccctgaacagaaacccgcagtacccctgaaaactcggtctagaaacaactaaaagaagaaccacagcattttattccgtttgctttagattctctgccaatttttttttttttttgagatggagtctcgctctgtcgcccaggctagagtgcagtggcrtgatctcggctcactgcaacctccgcctcccaggttcaaggaattctcctgcctcagcctccggagtagctgggactacaggcgcctgycaccaggccyggctaattttttatttttagtagagacggggtttcagcaccttgaccaggctggtctcgaactcctgaccatgtgatccgcccgcctcagcctcccaaagtgctgggattataggcgtgagccaccacgcccagccttttttttttttttaattttaaattgtggtaaaatatatgaacaataaaccctccctccccatccccctcccccagcccctgacccccactgtacattccgctttctatctccatgaaactgctgagtgcggggacctcacagaagtggaatcacacaggatcgccctgctgtgcctggcctccttcactcggatcatgccctcaggtgcatccatgttgtagcacgtgtccgaatttcctgcctttttaaggccgagcggtattccattgtgtgcgtggaccacattttgtgtttccattcaaaacggatgaatcgatgaaactgcctgatatttttaaagcctcagtcattttcattcttagttcttcagtttgcaaagggccggcctgttgtgatgggtttattgttgcatcttctgaaaaactttgtgagttcccgaaggcctctccacgtcttgagtcatggctgtgctgctttgcgaagctgtgtgcatgtctgtggtgtagcctgtgtacagcctgtgatgcgtcgcagcggaagggtagggggctgcccagggaagacagatgcgccaggttccgctccacggagctcagctaccagccctggtggagagcgcagatggggccgatttgtcatttgtctgcgcttgagcccagcagctgtgtggcctccctggggcaagtcattcaccctctctgtgcctcagtgtctctgtgaagtggggggaagtttttggaagattaagtgggctaatacgygtcaaatgctagaacacactggcacttggtaaatgctatataagtgttatcatttttgtttgtttattatttatttatccatgtcatggatttaaggcagtctaatctcagtgcctggtggagacccgggcgccacccccccaggttgtcaagtggtccctgtgcctcccactatcgtccccagcacggtgccgtgtccgggcgtgcgtgaagggccagctcacctcacagctctgcttcccaggttagctcccatccaccctccccctacctgtttcctcaccgaaggaaggggcagaaagatgccctccatgccccttccgactgttgcagagggatggaggactatggtacatacacacatatacacgcacacacccaccacacacacacaccatgcacatgcacatcacacacacgcacacaccatgcacacacaccacacacgtacacaccatgcacatcacacacaagcacaccacacacaccaagcacacgcacatcatacacatgcacacacaccacacacaccacacaccacacacacgcacatcccacaccatgcacacacacaccacgcacacgcactgcacacacatgcacacaccatgcacacgcacatcacacacttgtacacaccaggcacatcacacacaagaacgcacaccacacacaaggacacacaccacacacacacaccaagcacacacacaccacacacacgcacacacacgcacacacccaccacacaccacacacatgcacatcacacacgtacacaccacacacagcacacacaaaaacacaccacacacaccatgcacatgcacatcacacacatgcacaccacgcacacgcacatcacatgcacacgccacgcgcctcacacacaagaacacacaccacacacacgcacaccacacacacgcacatatcacacacatgcacatcacatacatgcacacaccacacttacacacatgcacatcacacacaagaatgcacaccacatacacgcacatcacacacatgcacacaccacacatgcacatcacacacctgcatatacatcacacacacatcacacacatccacatgcaccacacccaccacacacatgcacgcacctaccacacatgcatatcacacacatgcacacacaccacacacaagcacatcacaaacaccacacaggcacatcacacacatacatacacaccgcgcacacatcacacacatgcacacacaccacacacgcacagtatgaagatgacagagaagtcagcagagcccctgggggtttcaggagttgagtggggacgaggcaggtggccacacagctcggagggagggcagaaggcacccgtcttcgcagagtcacagtggggcttgcctcctataygtgccggaagggtgaagccccttatctcattgcccgatgtgatgaggtttgaagtggttgagcttggagggtatgggctgagcccacagcagacaggcctggcagtgccccccgtcttcccaccctgcggtcatgcagcccgactcttgggggcggggtgccaccgtgatgtgccgtcacttgcagcagtatgtcctcatgccaggctgagaccagcactgtgtgaccagcctgccccatgtccctcagcgctgtgtcacactccacactgaggccccactgaagcatgccaggccccatcctatttcttccaggtagtcgtctgcccagcacctcccctcccaggccttgccctaaagcccaggcctctcagcatccaggactctggaatctcccaggtgttgatggctgaggtcatcagctggatgccaggacacccaggatgctccaggtccttgctggggtctggagtttgtgattcagcctcagtccctgtggtgagtccaccatgtgtcctcagacaatggatcagagagcccccagaggacggcccggggccgagtcgggtccagatgccaaaggggcttctcgaggcatctccagctcccacctgcccctcggagtgccaggcttggcttctggaagagaaagctgggggtttagtgactccagccaactgctgtgagcccaaggcatcaaactaaaaatagcraggccaagagggagtctttgtgttcggctcagtgggcaatggtgcctcacctcgcagcatgacacagggctgatgacacggggcacgttggtcacaaagtgccagtctcagcctggcacagggacgtgccacctgcaggtgatgacacatcacagtggcagccgcycctgatggtgctgctgcattgagtaggagcccagatccagggagacagttgcagcagatgaggcaggaggccagcgaggggttctacctgcyttccgggctggcctctgcatggacacaaagcagaaagggcataaaggtgaccctggccaccaaagcagacctggagcaaactggaccagcgcaaggcccyggtgccagcactcagagacatttcttttctggcaggaaatttgtgcttcattttctaatgaaattccaaggcaatcaaaaggcaaggaaagaggagggaaaggaagggagggagggagggggttccattcccatccgaatggaagcccccaaggcttctgtagctccccccatcaccaacttcactcaccactcttatctgatgcctcctatttgggtacacacggccgggtcggccttgcgagagactcagtttcctctcgacttccgcccgcctgcactgtcaccacgtcctgccattgacctctgttcatccactcatggtcactgctgtgagttgaattgtgtctcccaaaaaagtggatttctgtgctaacctgtgaatgtcccgttagttggaaatagggtatttgcagacataatcacatcaagatgaggtcatactgcattgggatgggcctcaagcccatatgcccgccatccttctaaggagagggaaaggcagacacacatttgtccatggaaatgagaacggaagacgtagagacagaatcaggccatgtaaagacagactcagagaccagagtgatgcatgtacaagccaggctctgcgggcagcccctagaagctggaagaggcaagcctcctccctggagtcctgggaaggagccagccccgcccatgcctcgagctcaggcttcaggcctccggagccaagagagataaacctctgtggtttcatgtcacccagtttgtggtctttgttatagcagccccaggacactcagggggttgccttgtccacccccatcctggccctctgagggactggttggctcttagaagaccgttcaacctgccctctggtcctcctcccccacccagagacccctggctacaccctgcccaagggagctcaccaaagcccacagggtccctgtgatcttgtcacctgggctcccacaggccagcagtgttggaacctggacatctggctccagccttggtggccacccccgaccttgctctgctcctacagctcccggccttccctgccctggccggcccttgctgaatgtccccgctcctaggaagccggatgtgtcgcgtgcaggtgcctctctgcactgtaataactcctcaccaggcacccttggagcccaggatcaagtcactcaccttccaaccctgcccctgcccagagactggcacgagaaccagtaacagttgttgaataatgaacaatggatgcatgcagctcacccgtgagagggcgttgctckgctgggccagggatgaagcttctcccgcgtggctccaccgtctatccctcaagctcctgatgctcccctgggcacctctgcgccatgaggccccgttgaagtcagttggggaggcagtgtggaccgtgagaagggagtcctaagcacaggaaacgctgccttcctggggccctaaagaacaggctcaccttccccaagggccttcaggccctgacatctaaaaagatgttctttatcaaaggggaaagcagccctggggtgggggcgtggccaccagtgcagtgggcgtggccacaaccgagagggcgtggtcattcgtgcagtgggcgtggtcatcaagaaagggcgtggctgcagccggaagggcgtggctatcagctccagaaggcccttcttgctgtccttggacttgggttctccttgtcgacgaggatctcagctggagctgccaggggcagggctggcaccaaagcacttctgaagtctccccgcctcccaagtgtgaggctgtggggaaggagggagggcagctggcttgtttctggatgagcccatctgactcagcagctgggacccagcaggagcgcagagcaggtcctgaaggtgccgaggccccacccgcagctccgtctcagctttgtgagggctgcactcccccgtgtgcatccggcgtcacaaaggaccacaggcccggcggcctccacagcagacaccaaggccctcgcggtctgaaggccgaattcccaggtcaggctgcagcagggctggttcctgaggcctctcctgggctggcacctcctccccgtgtccatgcagggccgagcctctgcatgtctgtgtcctcggcgcctcgttttacaaggacatctcattttaaaggcccggtctccaaataaggtcatatcgtgaagtgctggggtcagaactacagcatgaattttgacgggacacagttcagtccatagcacccgctttgggaagtgggaatgacctctcccttccccatcttctggcctttgtaaccctaatgtgggaaagcaggagggayccagaacgacattgggtcaccaaagagagcatcgcagcccaaaaggttgaaaggcggcaccaaggtcccgcgcctggtgaccgccgactcgccctcccgggctccaggctgtccccactcccccccgccccaaccccagcatgttgaggcgcctggtcccaactgcccattcactccctgtacacagactgcttctttgtcctccagccaggggtgaagggccatgctggygaaayagcaaacaaccccaacatgctttgcagcctggccaaccacatgaccagtttgaggaggttggctggagatcacaatgaggaagttggatgagggggtccaacttctagcagcccataagcctatccattcagacaccaaatccatggaaaacagagagacaatatactgattttcaaaagggagacataccccagcaagtacagaccagggaacagggtgctgacgtggccacagttcttaaactactcgacttcatggatggggcacagttttttttaaaggaggatttagaattctatttggcaggtggcatgaaaaagagttttgaatagaaacacacccctccctcccagttgcctgcccagtatgtttgttttgttctcttgaaacaaaggaagagagtggtgaggagggagggaagatgaaccaggaagaatgaaagcacttggcctgcttctcagatggtcttggactgtctccgctcacaggagttgcaggtttttgggttttatgcaagttcggatcacaacaggcctcttgcaagaaccaggcattacctttattccaaaagccttgctgggccttcttgaaaggactggcagccaccacttccctagaaacccgtggcaagttccctcctcccgaccccctgctgtttggtccaggaccccctgcagtcctgactgggacccacttggcccttctcaagggacccagcacaggacgtgtgtttctgctttgatgaaccgccctttcccccctgcagttctagtggaatctcccctcccttatcccattcccacttggaaatgatgatgatggaatgggcgatgccggcttaccaagacatccaagctctctgggtcgaagttggagagaggggtgcacaaaaaggattccactcctgtctgccttcccctgcctccccgctggggtgtccctttcccatggtttcctctaaatcttttcacccatgtccagccacaccattctcacatactgccttgaaactgggctygaaggggctgcgtgctgagagaaggtcctctcccccagtgatcctccagaggggctgccgcctgggtcccccgagcacctcctaccccaccctccccattcctgccatccccagggtccagggagcccagattccagggaagggttgcattagctcccactcggagtcctgatgcagcagagacagacagaggccctgggagaagtgagcatgaattattaagacaagacaagggtgaggccccagagagggggtggcggaagggtcatgttcatgcagcgagagttgcttcgagcttgaaccgcgtatccaggagtcaagcagattgcaactggcgagaggccttcagaaatgccccgtgagagtcctgtgygcagagctccatctcagcacacttcctgttcttttggttcgtcgatttttgyattttcagtcccctgtgatccattatttataacagtggagattggcctcagacactagcagtgaggaaaacaaaagcgaagctacgcagaaaaatgacaagagtgatgagcacagcagtcatgacaaatgagccctgtgcggaggcccgggatccgcgcakatgccggcgcgggggaaatgggccctgaaatcccaccgtcaggccaggcagctctgagcgtgacctggagggctgttcagacggtctgggtagccgtgtcctgcgcatgaacatcctccgtcgggagaggaattccccacggattatcagagctgctccctccaccccccsccacgtcccacrcgggccacatcaactccctctgcagcctctggccagcggctgagccctccgtgtctccyctcgttaatgcctccttcaccatcccctcctgaagtttcccccattgcatacacgcgctgaggcccacccggtatcaaggactcccattgcttgcgaaaaagattccacccctcttagaacagagaccagggccgctgtagcaaatggccataaatgccacagcttaaaacaacagaaacggattatctcgcagctctggaggatggagtccaaaatctgaatcgctgggctgaaatccaggtgtgggcagggccgcgctccctctagaggctcccccrgagattcccttccttgcctcttccagctgctggtggctgccagcagtttgggaattgcggccgcatcacaccacctttctgtttgttgttgacatccccgcctcccctgcctgcggggtyttagatgtctctctccttcccactgagtttcactccacatttgaattgsattaactcatgccatgttaggcaaacgtgcccctcaaatcctyccacttaacagacatttattgaaggttcctgtgtgcggggcccaagagaagggacattaaattaggagatgaaccttgggaggccatggcatgcttcggagcctcggcgtcaaaatgacaacccacaccccacttggcggttcatctggggccctggaatcagcagactgaggctggaacccagcaatggcacatgctggctgtatgttctcgggcctcagtttcaacatcagtgacatggggatagaatctgcccagcggagttaagtcaccgcatcccggagagccgagtgtctcatagaggctcctggtgtggtctccatgctgctgctcagcacggaatgaagaggttcaggaacttgcccacagccacggataatgagggacagagctggaattgagcccgggaacctgcacacacagcccagtgtgaccgtgccttctagagagaggccagccctggcaccaggtgggcatgccagcatcaccttcaaggtgtgctttaaggatccaagataatgtgggtgcttcaacagatgcatggcaataaaaggaaagcaccatgtttcaccttcacacacacacacttacacattcacacactcacatacttacacacattctcatayactcacacatatgcttacacacattcacaggctcacacatgcttacacacacattcacacgcacacacattcacacgcacacatacacttacacacattcacacacatacacttacattcacacacatacacttacattcacactcatacacatacatacattcacacacatattcacacattcacacatacacattcacacacatacacttagacaccacactcacattcacacacattcacatacatttacacacacatccacacacacattcacacacattcacatttacattcacaaacattcacacatacattcacacgcacttacagtcacacatacacttatacacagtcacacagacttgcacatagacttacacacatacacttacacacgcactcacaccttcacacacacaggcaatcacacattcacactcacgtacacttacccacacattcacacatacacacaccacatacacgcatacacttacayatgcactcacacactatcacattcacacacacatacacttacaaactatcattcacacacatacacacatacacatgcattcacacacatgctcacacactcacacatacacttacactcacagtcacatacacccacattcacacacatacactcacattcacacgcacatacactctgacacacatayacatacattcactcacacatacattcacacacacacggatgcattagttttcaagtcaggatcctagcacagcccacaccctgcatttgcttggtgtctcctgaggtctctagttatacttcccatcccttttcttgccatgtatttcctgaacacatgttatctttgatccttaaaccatgacttagagatacagatgtatgacaagctgagagatgatgtgagactgttgttaattttttctccatgtactaattacattgtggttatcttaaccacaaaggaagcgttctactccagagaaccgcgtggaaacagtgcagatggactagcacgatacctgagaggagctttaggataactccggtgctggggaggttggggcccagttcaagcaggaggggaggcgtggggacaggtgttgaagctgtgggtgtgcagcggaggcttcatgacgctttcctcctgctcttgtgtaygtctgagcatttccataacagggaagtgttttgttttgttttttaaataacattttaaatgcctctggcacatgggaatccatggtaatttctgtcgttgttgtatattctttttcaaatgcaaggacctgaaaaatatctcctaaactggaaaaggaaatgaggctgaatacagattttattttagcaaatagagaagcagtgattgtctggcggttaactgtaatccattctgagtgtgactttactgttaagtattctaaaaacaagagaccaaacaaaatgaacaatatgtccaaatgtgtatatatataatttgtaactagaggtaaattgcagatgaattgcagatgtacacagacagatggatggacagatgattgatatagattgattgacagatgattcatagataacttgcaaygtttcttcagtgaacgcatatttatttcttgggtaataagaaaaaacaatagaatgtggaatttggggcttggcctcttttagctcatttaaaaaaatattaaacacttggaattatcgagcgctgaaaaaggcaatagaaaattcaccttttaactccctcaaagatagaaatgtgtgaatctgctagtgggttgcgtttggctggtcctgcaggctgatttggtctgttctctctcccagagagatccccaagcccggctgagatgtgcytgtttgtcttgagggcagacaaagcctagcaaaatcttatggaagctgatataaaagcttaatagcttataaaagctctaaaaatgattcacagtctaggatagagaaaataaaaggaatttgaattggtttattttcctttagaggagcctaartcaatatttattctgagtatgcaatcagaaatatcagtaatttsagaacaaggcaaacagagctgcacatcccgttatggccacgagcccacctcgccttcgttcagaccacagctgaaggtctgacttaggtgcagcacgcacccctggagctgagggcctggagcagggccaggccgggctcttctctctcttgtctgtcctcgtctgtgggggaatgaagatgacacagcactcaggaggtccttttcaggacccagagtcactgggcttttagggcgtttggctctggttctagcccgagtgtggtctcagtccccattggtggttgtggttgtggcatgggcatcattagtcacacaacataaaaccacrgaacgcagaatttgctcaccctggttcacacaggagcaagcttgggcaccagcaccccctgaacgcatgccaaagggcaggtccagctcagtgctggggtgtggaggaacccacctggggcctgcctgcaaagacagatgccctgccgtgtttagaaaaagagaaaactggcctaaaccacagtgaggtcaaatggatcatttaacccgtygagtttggtttcttgttcatccgacgcggttgatcttattaacgcatatgtgtttgtgttgatgtggcctccagcttctgtcgcactgtggacacagttggatgtggctgctaatcaatgcggggctccgtaggtcagtgagagcaatcagagcctgctgtgcggtggcatccccgagttaagacaggcttttgtcccatactctattgaaacacccagaaatgctgacatgttgaagttaaggccatgtgccttggtgctacttgcttgcgaaacagcctttgaaggaaaaaggaggaggaggatccatgagtttcaagggtcccctcctgtaatcacggctgccactcaacggagtaagtaatgtgtagcgggccctctatctgcatgacgaatcctcctaacattcctgtgggcgaggtaggatttgtctcgctttgcagccgaagaatcagagcctcagaaaagttaagaaatcttccctgggtcaagctggtaggaggagggactggaactgaactcacatctccacctcctctcttcctactcctctgcctttcttgcacctagagcagtgtacaacatcaacaactgaccagggcgatcctagagrtaagagacagccgaatggcacggacccagccaagcccaggcctgcccaggtggaacagagccagctaggagcattcggtagcagaggtcagtccgctgattgactgttctcacttccaggcccacagcctcctccaccctgatggtctatgagtctagtgcggccctttgcacaattttagcaactgaacccttttcctcacagaattgtgataccgtcctaacatatgaagcatatataaacagttgggcaaatcataatagtttccattatttcataaatttgcatttgtggcaccaaggagagaattaatgggaacaagagggttcttgtgtgagttccgcatttggatttgggggttcgaggtggcagctataggctcacattagtgtctgcatcactttgcttcagtttgtcacggtggccccccaaatccagaaccgccctcctcgctgtgtgaggagggtcctgcctgcaccgctttgcagacatgggccagcctggatgcctgggcraygctgccctgcgactcgctggcctgcaggacatctgcaaaacattcaggtctcacggcagtggccatgaacggcctcacagacactgagtggacctgaccccaaagagaatgcgtcgtccttgaacgtgtcgatatttaggttattacacaatgagtgtgttgctttgcaattagtgtctgaaagagttagagcagatgtacatatagaaacgaagaaacgaaatctgaatccatgctgacagattccccctccccaaaccttgctcaaggtaacacaggcgaccaggagcaagtcccggccggccccctgctagcgtggtctgagtggcccaagcaggacccctgcccaggctcactggactctcctggagcccccagacacgacacccttcctcatcactgaaaatccacttccacagtgtaggagatgcatggatctgagggccagtaggaagtgctggagctttaggctttagacattctttttttttttttttttgagacagggtctccatttgtggcccaggctggggtacagtggcgtgagaaattctttaacactctgccgagtcctggcccttggggagtgaggcctggctatgaggcttcttgtcagaactccgtgtgactctcaggatggaagaacagggtgggggctgctcctcccctccctccctccagcccctggcctttgtaaaacggctccgcctacgcgcctgtagccagtgcagaaccagggaggcctctccccttcccttcccaggaggggccccgccttgtcctccatgccggattctgttcgtcctcccccaggtcctctctgctgcctcccactgccccatttcctccaggaaccttcctctctcctaccaccagcctctctcctacccccagacacacactctttacatgccgatttctgtcctctggttaactggcgtttaattttctcagctgcttggcttaatgccaaagagtgttcttccaaataaaaatggtaaagaccttttttctcccatgagaattttatgtaaacgcagtgcagcatgctcgtaggctggttctgttatcaatttctaagctcagcttccagagctagagaacttttttattggttataaaaaccctacatattcagtgcagaaattctgaaaaatgcagaacagtatcagggagaaaataactcatcccccactacccagagaaaaccgctgttaacaccgaagtgccacagttgctggcgttctcacacaggtgtgcgtttaggagtgtgtaagtgcgtgtaagtgtgtgtctggctttctttcacataattttgtgtcctgatcattttcactcagcattacatcagcagcggtttccaatatagcattaaattgtcttcaaaaacatgattttaatgcctctataaagttccatcatggaggctcactaaaatgtaatcacttcattgtttatgagatactcagcttaattccatttctctgcagtgaataatccagaggaacacgctcagtgtgcatctttgcttgcagcagggcagcgcagggcattggttggggtataaatccgggggtgcagtggagattagattagatcgtccgtggaaagcaccagaatggtgcctggcacttaataaatgctcttattagtatgtttatcttcattatgtccctaagagccattcctggaaatgagactgtgagtcaaagggcacaaataccgccaacctgctttccgacagcrctgtgtggatacacgggcccgaacggcgccagcctcactgcctctgcgttagtgccgccacttcatctcagatactctcctgaagataagaggagagtcccatgcagccataagaaagacaacggagagatctgtgtaccctccacccagtctcccctactgggactgtcgtgcaaaattatggcccagtcttacaaccagggtattgacagcgagacaagcccccatctgatccagattctccagttgtacttgctgatgtcgtttagatatttgtccccgccaaatctcatgttgaattggtatcctcagtgttggagtggggcctggtgggaggtgactggatcgtggggtgggtttctcacaaatggtttagtgccatccccttggtgctatccttgagatagtgaattcttgcaagatctggttgtttatgtgtgaaggtagaaggcatctcctctctctccctcacgggtgtgcaygcctcccttcatcatgtgatatgcctgctcctgtttcaccttccatcctgagtgaaagctccctgaggcctccccagaagccyagtgatgtcggtgccatgcttatacagcctgcagaactgtgagccaattagaaattggctttataaatgacccagtctcagatatttctttatagcaatgcaagaacagcctcatgcacttgtactcacttgagcatgtgcacttacttctgcacgatgttcttgcctgtgtagactcttacatccacaaccacagtcacagtctagaacattccatcgccgyaaggctgcctcttataaccaaccacatcccctacctgcacccatttccaacaccccatgcctaactcgatttccagcaccccgtcctggtgaacatgaatctgttctctatctcttcaattccgtcatttcaagaatattatataaatgggattacacagtatgtaacctcttgagactggctttttccaactgkcatcattcccttgagatccatccaagtggttgtgtgcaccttttccttgctgagccgtgttccatgttgtgggccgaccccagtttagcactcgcccattggagggttggagggcatccgactcatctctagtgtggggcagtgcgtcaccttctcacaattgtcaacgggattgtcactagtatttgccttccatgtcttggaggccaatgtggctgctcttagaaatcagtcctccttattttggttggggagatttctgatgtcagtttgacgtttataattaataagcatcatcatcaagttacaagagtaaataaaaatatgaggcagggtgaaatgtaagatgctcgagaggctgagatcagtagctgtgtgaatacagcagggcgggcaccagcagtgagckccacggggcccagcgtccggcctcattaaccagctgcccttggggaggagmagagcccgctcttccctcctggggaagggtagtgtgatggaaagacaggctgcccttctctcctgcaggagctcagcatcatgctgtgtacatgcctgggctctcttcttcagccctagccacttaaaaccacttggrgggaaagattgtagaataattataatgaggaaaatttcgctccagattcgttactccaagttcagagaagctctgtaaaaattgttgctaaggcaattgaataaagaatgtcagccgatgtaagcgataacagcaagacaatgaacataattgcatgttttacaacaaccaacctcaaagcatgacttccctgacatagatatgttttttaatgattttgaaaggtaacacagacattttcagggatttggagaggaaactaatgccatcctggtttaccagctttatggggtcatctctccggtgaaaaagactgcagccagcctygcagagagggcgctgtcttagggaggcacctccaactgtccccgcgacccagcccctaagtgcttcacatcaacactgttcttttgtgacggtgctgctgtctttcattcgccagcctgtcatgctcaactcaaacctcagttgccatccagttatcttttttttttttcttgagatggagtcttgctctgttgcccaggctggaatgcagtggcacaatcttggctcaccgcagtctccacatcccgggttcaagtgattctcctgcctcggcctcctgaggagctgggactacaggcacatgcccccacgcccagctaatttttgtatttttagtagagatgggatttcgccacactggccaggctgggctcaaactcctaaccttgggtgatccacccacctcagtctcccaaagagctaggatcacaggcgtgagccactgagcccagcctagttatcttgtttgtccaggaattggagcatttctaggtagcaccacaaatgtctgtgcaagaaacccacaatttccagtggtcattggctttgtgccaatccaaactwgagtctgacaaacccagcaagaaatattcgcggcagctgcaaggaagctcctcaaatagaaatagaaaaatgaaccagggtctgctcttcccttccgggtgtggaatcaacggaagccgactcaacacagagccctgggggcgtgaggggtttggcgggatctctgccggctgcagatctctgctctgttattaccagcccttctgcccagctcctaattgctctgaagagggaataattttctcagcagccattgccagccacatttggactgaatagatgctgaaatggcaagggtaaatggggcagagacagtgaaaagccattttctatctggagcccaaataaaatcttcctcccacactcctgcctggctcctccgcagcctcaatgcccttctgagagctgcctgccccagtaggaggccaggctgggaccaaggacacccagttctgggtaaccrtcttcccatggctccttggacaaccaccttaaagaagggaaaggcaagaagcagaaggaaagcagaggctggacattggaatcagcctttctttaaactaaaaaaaagttttcayatatgtgaatgcrtgtgtgaatttgaagtcgtatgtggaaggggccatatatccgtcaatgcatgctccaaaaatcagaactgatggacggcaaacagcatcggatgtgcagccagcattcttccggcggccacctcccgggggaaataggtgcagcagacaggaccgtctgtgggacggggacaggcaagcatgacagcaggtaccacagatcaggktgcacagacagggctgggggaggcagcgtggcacggcacccacttcccctcggcgtgtctgggctgaagcccagtggactcccgctgatcagaaggatcctccactagaaggatctcactggacgagtcccctccaaactggaacatgcaggtgccttgggcttcatgctgcacctttcagataaaaacacacaggtgagctgggagagctggagtcccatggaccccagagatccaggtcacgaggaggggatcgcgctgcaccaggacacattcaccaaggtgagccctggttcctccccacaggctgtgggcaaggaagtgtcgatgccaggctggctcagtaggtggaagaaccttccggaatgcctgcccgcaggctgctgctggcatsgagtctgtgtcctattttccattcactgcatgcatcctccaagtatgatttccactcggaaccctgagctgcctcatccctcgctccgtctcccctccctcccrcccagctcacactgaaatcacgcctcgcgttcagcggctggagtcctggtggattgctgcttcggggctctcagaaatccctttacttgagtcttggttttacaggaagaccatgaagcaccccccaggagctggagctcctccttctggacccagtgtctcttctcagcctcacgacgaggagacctgctcatggagctgctgcsccgrcctgagctctgatccctcctccgrcccagcctcaccctgcmagcagcaccatgtggggctcagaatggggatcttaagggaccctycccacaacctcccgataagcctttccacggagggcccaagcggagacaggagaacactgtatttgataaaatagagtcaaatccaggaaaatgcctctggacccggaaaggaaacgactcaccccccacccatgagagacccttctgtcctgtcccttaacccagaggccctgggcatgggtttcgcagccccctggaggccagaccctcaaactccagccttgtttcttctaagtgtgccagtcaagatgcttctcactgcmagaaacagactctttctcaagccagttcaagamgatctgcgttgctgcagaggccgatgggtgtggggagcaggctcagtgagagactgtcgtaaggaggctgagaggtcttcagaaaaatccccaggacctggggtgccaggagcctgggcgggcctgggctctcgcagcctgcagcccctcccctccctctcacagcctccgctgcccccgggctcagggcccctgcctgtgccttctcctgaggcttctcctttttacctctcagggtcccagtgtggccagcccggcactaaacccatgcgaccctggctcactgacagtcgccaccagctccacatctctcagtaaaagttcccccaaaagagtgtgattgggagctagccagcggggcttaaggcagccccctgctccagtccccttggccatggagacagggcagggttagcaggaggcaaggcatgcgcaggacagctggccggcagaggtcccgtgtgctgtcatgggtgcagggtggacactgtgaccctgggtcccccacttggaaggggtgatctagagggacttttgtcagaaagacccccacccagccaatctgactgatggggccatcaccttgacaacaggcttggtggcaaagcaagagggtacaaccgaccagagccccgggtcccctgtgccctcctgcactgcctgacagggctgggccatggcccgtaccaaccgtgagctgagccaggaatccagtcaaaccgtgtgcctgagtgacacgtagctctcttccttctctggattcactgctgatcaaccccaacaagcagcaggactgtcttgctgtgaacccaccgcttgcggacccctccccaggcctccattcccgcctttctgaaggtcaaggcagcgccctccccaagaaacggtgggaacagaggagccaggtgttcgttcttcccagctccggaaacgctgcagattgcrcactcgagttcctgctgacataacagtggctgccagacaaaatgtggcgaaaagtttttctaggtgcctttgttcactcagagacytcctagagacttgtgtgaaaatcacaggatttgcaaccagtggggacrttgagattcgtggcaactgaaatgatacaaacttgaactttgtgtcaaaccagtagtgttttgtgtaattcttttcaaacctgtcatttcacttactgcttctcacagccccaaggggcaggtggagttgatgccatcaaccctatttacagaatggtaaactgaggctcccactggttatgcgcttgcccacagggttgaaagagaagccatggacaaaaggagtcactggttacccaaagggcttcctgttctcaaatccactgctccttccattacgtggtgtctagaaggaggctcttttggatatagacattaaataatctgggagtcagtgtatgctgtgatcaagcatgtgcggtccgcagccgatggcccaggatgcagtcctgatgtacacttctggctgggtgcgtgggagccacacacatctctgtgtgccttggtttccgtgtgtaaacatcttagactagtgcttgcctgtggttggcacctggtaagtgtcagccttctctaatgtaggcagcttgagggctcccagacagtgatgttcccgctgacattcccaggtctcagctgattatgaagaggcatcaatttccagtgggggagccgccctctgtctcatcatttgtttctctcatcttgctttaatatcacagcactgccagtcaaaccacacaaaagggtttgtgatgacctgccgtgcattctcgtaagctccagccctgactcgcctgcaagccagaagccaacataaaactttcgtttttcccttaatcttgctgcctctgcatctcattttcaaatttcattttatcaactttttttgcactatttgtttctggataaaggatttgcaaaattcttcagcatgtggtcaggaagccctrtggcctcctgacgaggcagcctaggggtcctcccgtggtctgaagctgcagccgggctggcctcccacagtcaggagcagcatcaggctgggtgcttctgacaccagcraagagcgcggctgtccaagcccccatccctagggctcacgcctcatgcccaaactcgcacccactttggcgccgctggagactaatgaacagcaaaagctgaagtcatgactctcatccagatctaaaatgaccgtgtgtcaaacatttttactgaactgatgaatcgaatgggaactggtaagaaggtacgaccagttcaaaagagaaatccaagaaccctaaatgtataaggagtgaagcaatgttgaaatggacttacaaacggatgcagctatattctccagtggagacagccagtgccaacttttgtgcttattccaaatttcctgacagcctccccaccttttttccaacataatctcaaagagagattattctggatggcagaataaggctggtccccctaggtgtggcatccttgcttgcatagaggtggcaagagtgccaccataccaaacaggcctttttcagtttgttttgctggaagacctcagaagatatcagaagcaaaagcctctgttgtttgctatcctaaggttaggaagccaagcataaaaagctctcctccagatttcaccggcagtacttataaatttgatgaacccctctcttctcaaggcccccacgatattccaaaaccctggcctgccagagtagagccttttttcccatcttggaggctgtgaccctgagagcccctaccctcccccaggggactttgtgggcatggacgttgcacagtcaccctcggcccctcaagagcggtcacagcccagcaaatgagcgtcgttctcacgcacgtctctcaggcttaggctcggttgcataaaccttccccaattttatcctggcaaggaggaggacagatccttccggaacctttgcagatattgccaccaaaagtaaagccttcataaaagtttgcatttggggaggaaggagagcagatggtgaaaatcagatatcacttaagaattactcatttcagtttacaaaaaatctaggtcgttaaaggtgactgatagcttaagaagacagggaaagggcttcataacagagccggaaagtccaacagyacaacgacacgcatgatgccaaaaagtaaagcgttcctcactcattccactcagtgctccgtaactgattctccactggctcctgggctgcagcctcatgaagccagctgttcctcaactgaaaagagccctggaagccctgggcagcccactggcagggtctgaatatcatctgagcgaggccatcagaagctgtccccaggagtctgtgcttgggggtcagtcatcggaggtgcttactgcggtccttttccatggggctcgaagcttctgcattgaatcacgagctctggcctccagcctggtgcagaaccttccagggggcattggagtaaaagcttctgtagatgacagctaccccttttttggtccattttatagcagaggaaatttaggttcaaagaagttgagttgagagtcccaggagtaagaagcagtcaaggatccccccaggcctccggggccgcctgggctgcctggcctcacgacctggccccatgctcctgagatggagaagccccaggcccakgagcctgttgcccttggcaaagccacttcccttctgagtaaagtcagacgagcctgcccagtcccaagagactgcgattccgtaatcgccctcccctcgccttttgaggtcttgctggtaggtgcacccccttcaagccagcccaaggagccatgatttgagtcggtcttgccagatgtgtytggagagaatttaactccaagatcatccccygtgcactctgaggggctgggacaggatgtggtgccctttgtgcccasgaggagaagcacccagtggggyggggtggggcgaggactttataaaggcgtcatttgctgcggccacccaggttggaacacagggaccacagggccccccgccttctgcaggaccaccccgctcatctgagggagacactgtagaaacacatctttgagcagtggcttctaatccaagaaacccaatagaagtcaaacgcagattcctagggcccaacccggacccactgcgtgggaatccctcagccggggccagaagcacgctttgaagacaccaacctcctcagcaagcctcttgcaaaccacatcctgcttctccagaagctgcagatccagaatgttcaaagaaagagccctccttgccttcctcttcttccacccctgccctctgcagactggggttctgtagacccccaaagtaagtccgccacaccggaaggaagtgagttacacaggggcccacatgggaaccgctttttgtcctgtcttggtgggaaaatggccacgaccccagcccaggctctgccacgccacaactccacgggcatagcctgggaggccgcagcgtgaactgtgactagggctgaggatggtgccatggtagaagtgagggcctggcacccggccaagtgcaggactcctcggcagtggggttgggagaagcagcctctgcaggcgaggccaggaaccaggacacaggaggagaagcacatctcagaggagggagctctgggaggagccagcagagtcctgcaaaggaggatgtgggggaaatggggtgaggccaaagtgggggctgctgaaggggctactgcacccgtgcgagcakggccaggaccaagctgcataggcagccagggayacagccgatgccacagacgtcaggaaccacgcaatgacacaggccacctttgaccgaccgttacccctggggcaaataccagtggggataacgggcaaggagaggtgctgtttactgtcttattgttgccagttcagcagcccacaggaaatggtgttagtcacagaaaaaaaaaatctgttttctatatttcactgtttccaagtaaagaaaaaagaaaactaatcttagcttaaaaaaaaaaaaaatggtgcgctgggcaccgaaaaataaccatcttcctaggcctgcgtttcccccacaccggggacttgtgctggaaagaaaagctgcgttggcagccaggagccggggaaactgtccagggaggcatcctctgcgatgaaggcggggcctcggcgtggcccgttccgcgctctgtccagccctggagaagccccaccctcaccgagctcgaaataccccctccctgagagccgagactcatggccgggaccccttggacagaagatgcggatgctaacccggcgcttccaccacagccccggcggcactggggagcgagcgcggccatcccgcgcgtaggtggtgtttctctgcaggcgccagtttcaccgcgggcgcccaggatcctcaacggttctgttgtgatgtgattcccctcttcgacttcgtcattcagcctcagtccctcagtccccaaataccgaaaggcagtcttttttttttttttttgagacggagtttcactcttgttgcccaggctggagtgcaatggtgcgatctcggttcactgcaacctccgtctccctggctcaagcgattctcccggctcagcctcccgagtagctgggattacaggcacctgccaccacgcccggctaattttttgtatttttagtagagacggggtttcaccatgttggccaggatggtctggaactcctgatctcaggtgatccacccgcctctgcctcccaaagtgctgggattacaggcgtgagccaccgcgcccggcctttttttcttttttcttttgaagttaatgaacttgaattttattttatttacagaatagcccccatgagatacttgaagacccggtgccaagcgacagtgttgaccccaggtggtcagtcctgcctggccccttccgagggatgcgccttcaccataaccatgtcacggacaggcgtgtgggcaagggggcatcgctgtatttttcacaactctttccactgaacacgacaatgacatttttcaccacccgtatgcatcaaccaaatgaaaagatgagcctgtgacattcccgtgcgtagagttacagcttttcttttcaaaacgaaccttcagtttggagccgaagcggaagcacgtggcgtctgacgtctccagggagacccgccgccctcgctgccgcctcaccgcgcttctgttttgcaggtaatcttcagcaagtactgcaactccagcgacatcatggacctgttctgcatcgccaccggcctgcctcggtgagtgcgcgctgcgggctctgcccggtgacgccacgcggcctcctcgccttttcgggatggctgggaggggcgggaagaggcgctgaagggcccgaggcaccggccttctacaaggggctcttcgaaatcaatcaatgcgcagaatcccgagggaggctcagccgccctccgggcctctctgcctccacaggtgatggctgtgtccacaaggaggaaaccgtcgggctgaattaaacagaaccgccctcctaagagtgtgggtttttctgccgggcgtggtgtctcacacctgtaatcccaacactttgagaggccgaggtgggcagatcacctgaggtcaggagttcgagaccagcctggccaacatggtgaaatcttgtctctactaaaaatacaaaaattagccgggcgtggtggcgagcacctgtcatcccagctgcttgggaggctgaggcaggagaatggcttgaaccctggaggcagaggttgtagtgagctgagatcatgccattgcactccagcctgggcaacagagcgagactccgcctcaaaataaataaataaataaaaaagagtgtgggttttttcctctcacttcttcattcacttttggagaaagcggggtggttgtgtgtgtttggtccccagccccacatcaccccataggtgccttttctacccagggggcttgacccagatcaacactgggygaaaggctgacttcagaaatgkgttgaaaagaccagtgatctgccttatcgagtcctcagagtcccacaggagttaatgtcctaaatcaacagtgtgttcgagccagtgaattttctaattatcagcaractttccaaatgtaaagggtgagcaggagtagctttggctcaaggattaactttaaagttaggacggaggtggagaagggcaattgaagtttctcacagacaggtgagaaaagggagatgaaagtacacgtctgaaagtgcagcaaatggcagttttagccgcaaaaatagcccatggtctggggcatctttgggcaccatatatgaagcaatgtgccaataaataaatatatatacacagtattccgtatagcagccctgggatttgagtatcacctctatttcacagattttaacaatttacaactgaagatcagagattaacttggtcgaggtaacacatcttgcaagaggccccaaaacatgtgaggttggaggaagactcatcctaagcatttaaaactattttgtaggagagacttgcgcagttcagacggactcccaaaggcactggaagcggaaagacaaactatgagttcgtcatctgctgatataaatgttagttcctattttaccacagttttttaaaaaaaatctcccaactcaataaagtagacttgctccaattcccattttaaagtatttcagcatctacacgcacttaggattatacgcagctgtttaatttcatttacaatcggagtctcaatgccctggggacggcctcccacccttcccatcccaccacaccttggtcaggctggtcctgggactgtcctggttgtctcagggctctggccccatgwgtacattcaagtgtacatcccagagcacnctatgggcgaaaacacgggcttgggtgtgttttccaggaacacgaccatctccctgctgaccaccgacgacgccatggtctccatcgaccccaccatgcccgcgaattcagaacggtaagaggctccggccgcgctcctcggggtgtgcctggcacttctctccatgacatgggaggctttctgtgattttktaaatktgctactgcagaaaggtgtgaattgacagcagagatggagrgcgagggtaggagcsagtgtgaaggaagcttgactcgtcgtgttcccctgcagaggagctgggcacgttccaagataacaattgcagccgtggctctgcacctgcttctcaacgggaggaggcattgtacagaggggaaactgaggcccaggagggtgagccaagagctgcagagccaggccccgggatccccacattaaccccaggaaggacctcgggagattccctacagagcccctggggacatttcgtgtttacccacttagggccggtctctgtgttcataaagtgatgcctgtgggagattctaagcacagaagggccagggacaagggaggcccaggaagtcaagaggagaggccggtgaaagcctccgtgaatgtctgtgaactaggtcaagccagcggtgtatggcccaggaaggacgcggagcaggggccctcaggtcagtgacctgcccctgttcctggtgacctggggagaccccagcagcctccactgctctttgtggttgggcaaagtggaacttagatttcctcatgaggcgagggagcaggtgagctgggggcggggcgtgcgacctcaggacccctctctggcgtcctctgttcctcccagagtggggctcactgtgcctccaagggactcagtagatgcgatggtacacttgtcaatctggtcatcagggtgtcctgcccaactgacccatggccagctctgagcccacaggagaaagtgcatgtcaggcagacccttgtgtcagtgaggtcccagtgggcgtggccagcaccgtccccctcagtgaggccccccagtggacgtggccagtgctgcctccctcagtgaggtctcagtggacatggccagagccgtccccctcagtgagcgctcagtagacatggccagtgccgtcctcagcgaggtccccgtgggtgtggccagcgccatccccctcagcgaggtcctcktgggtgtggccagcaccatcccactcagcgaggtcccagtggacatggccagcgccgcccccctcagtgaggcttcagtgggcatggccagtgccgtccccctcagcgaggtcccagtggacgtgtccagagctgtcctggtcagccgtcctccctgtcaccttgaggcctcagccgagctcctctcatctggctgtgcccgtcagtctcccctcctgccctagccaggatgcccgtctcctgccccacacagtctggctctgactcttggcttccagactccccggaaggtgcagtgctaattggctccccagagactccagtaagcatcttgtcagcctcagcaccagctccagcctggggggtctcgctcagaagcaaagtcactgagtgacctgtcctcctgacacccacaagactaaaatgatctctcagaggggacctcacagaaaccagcaccttgtccatgccagctgggtmtctgagagaaactgctttgttttcctgaagtcatttgaaacagcgtgcagagacatttaaactcggcgggaaataggagaagcccaccttgacccttctaattctctggccccaggtgccttattaacaagagacagtrtcagacacaccagacaaaagccctcctgagcccaaagagcccaaatgtctggaagctctctgctgagatgccaaaatgcatgcctttctgataaagagacagagacagatgaggtaccatgatatggacatggcagtggacgtggacaggggagcagtggagatggagaagatggagacacacgcagttgaggatacaggcgaagaagatggagacacacgcggatgaggatacaggcgaagaagatggagacacacgcggatgaggatacaggtgaagaagatggagacacacgcggatgaggatacaggtgaagaagrtggagacagacgcggatgaggatacagatggagaagatggaggtagacgcgggtgaggatacaggtggagaagatggaggtagacgcgggtgaggatacaggtggagaagatggaggtagacgcggatgaggatacaggtggagaagatggaggtagacgcggatgaggayacaggtggagaagatggaggtagacgcggatgaggatacaggtggagaagatggggttagacgcggatgaggacacaggtggagaagaggaagttagacgcggatgaggatatagatagatgcatagggtgtggatctaaccgggtacaggtgatgyggaaacggatctagacagcgatgtggaaayggatctagacagcgatgtggatgtgatctagataatgtggctctggacgtagaaagagcttcagatgctctatctatgatcgtgggtgtggatataggcatagacatggtgaagaggagagaatagactctcctctctcatgacaaactgatcgtggctgggggcggcacgtgctgagatgtggctgtatttgtcccccaggctggtgcctgcgcctcctgcacccccgtctcctttgtgccttcttccattccctctgccactgttaggtccaggcctcactgagctctgacctccctgcctccagcctgcctctcccacacggctgccaggttcaacctggtaagacaccttcttctccatggtggcctcccaatctgggccctgccaacttatgcctcaccaacttctccaacttacccctgtacccacgcccgcaccatgcccagcccacaggatcctgccttcccagctctgcagaaccagcttctgcttatccgctaggtgccagcccagccacctgccttaagcaccatccrcagtcacccagcccatcaccatcactagcaaagtcacccagacccatcaccatcaccatccagagtcacccagcccttcactatcaccatccaaagtcaccagccccatcaccatcacyatccagagtcaccagccccatcaccatcaccattcaaagtcacccaccccgataccatcaccatccaaagtcacccagacctatcaccatcatcatccagagtcaccagccccttcaccatcaccatccaaagtcaccagcccctttaccatcaccatccagagtcacccagtcccatcgccatcaccatccagattcacccagacccatcaccatctccatctaaagtcacccagacccatcaccatcactatccaaagtcacgcatcctgtcactatcaccatccaaagtcaccaagccccttcaccatcaccatccaaagtcacccagtcctatcaccatcaccatcctaagttaccagcctttcaccatcaccatcaaagtcaccagccccatcatcgtcaccatcctatccaaagtcatccagtaccaccaccatccaaaatcacccagacacatcaccatcaccatccaaagccacctagcccatcaccatcactatccaaagtcatctagcaccatcaccatccaaagtcacccagacacatcaccatcaccatccaaagttaccagccccatcaccatcatcatccagagtcacccagatccatcaccatcaccatccaaagtcactcagcccatcaccatcactatccaaagtcaccagcctcttcaccatcactatcaccaggcccttcaccatcatccgaagtcacccagacccatgaccatcaccatccaaagtcttccagacccatcatcatcaccatttgaggtcacccagacccatcaccatcaccatccaaagtcacccagcccatcaccatcactatccaaagtgaccagcccctttaccatcactatccaaagtcacccagacccatcaccatcaccacccaaagtcacccagccccttcaccatctccatccaaagtcacccaacctgtcaccatcagcacatcactggcttcctcccctcagtgtgcgcctcagtctgaagtgatctcacttacttgtttgaggttctcactgctgctggccccgctggacggtcttctctcataggaaggaaatttcaccttgctctctgctggatttccagcccctaaacgaggcggggcatgctgggtgcaggatggaatgagttggggayggagtgaaccagtccagctcgtgcgtgcctccccctctgcactgcccagagcagttttttyttctggggacgcagggcaacgtctggagacatttctggatgtcaccaggggtaagggcctgctacttgtatctgatgggtggagacccgggatgccaatggcatcctacagcgcacaggacaggcccacaacaatgacacacgtggccggagacatcagcggtgctgaggcggagcacctggtgwctgaggtctcccctgtgctctgtcgctgtcctctcaccctcccccaatcttccaacctagtagttctcagacaactgcgtcagaatccgcagggggcttggtggagcacagagctcccctcagtctctggtttgtgacggaggtgggccccgagaatctttctgcagcagaaagccaggctttctgcaggttcccagtgaggaggacgaggctggcccgggacacgccactgatgctcttctgacccaggggcttttctctcccgcttccgtccctcttccctcgccggcaggtgacgttactggccttttcttttttggccctgcctcccccttggcttctcccctcttcctctcctccactcggtgcctggtgacatgcggccatcctcagagatgtgcttcggggcccgcacgccttgctcctcgcactcttcctgcaccggagccgcsgtgcgaggcctcgggaatgctcaccgtttctctcccgccccccggccgcatgctgcagccattccctcaccacatgtccaggagggagccggcatcctttgctgactytcttgctgtgactatggtgctgcgtggaaaaggggccgtgggaaggctgggcaggtggctgctcagagccccacctgacacggtgacccacggggcctggaaattcactgccccgatttccacacaggtgcctgagctcctgcagagaatgcctgagagcgagacgcatgcccgtcaatttgtgctttcaggcgtcctaagcacacacgcctgctcttatttgaaccactccctgtaagctagttccactaaagagtggctttccaccctggctgcagattgcaaccacccaggaatctttttttttttttttttgagacggagtctggctctgtcgcccaggctggagtgcagtggcgcgatctcggctcactgcaagctctgccttccgggttcacgccattctcctgcctcagcctcccgagtagctgggactacaggcgcccgccaccacgcccagctaattttttgtgtttttagtagagacgggatgttagccaggatgatcacgatctcctgacctcgtgatccacctgcctcggccccccagagtgctgcgattacaggcgtgagccaccgcgtcctactttttttttttttttttttttgagacagagtttcactcttattgcccaggctgcagtgcaatggtgtgatctcagctcactgcaacctctgcctcccaggttccagggattctcctgcctcagcctcccaagtagctgggatcacaggcatgcacraccacacctggctaattttgtatttttagtaaagatggggtttctccatgttggtcaggctggtctcaaactcctgacctcaggtgatccgcccacctcagcctcccaaagtgctgagattacaggcgtgagccaccatgcccagcccacccaggaatcttttaaaaggtaccagttgatgcccagacccctcaattaagtccagatttttaagagattttttttttttaaagctctgcaagtgattccagcacacagtctggggactaaccgctgatataaggtctggaaaatctaagaaaccactctaccccaccctctggtgaccagaagcttatgtctaccagacccagggccttcccttgctgaaacatgctgggtaaactctttgtttcttcctagcagacagcagccctctccctctagctcagaagctacgtcagcagttggttggttggttggttggtgggttggttgggttgtgtctctctttaacttcctccacttctgaagtcacctgcagtgacttggtgtggacttggtcacctcactgtccccccagcctcaggcccaggaaccatgtctttggaggaggctctcctgctggcagctggttgcatctggcatgcttggattcctgcaggtggctggttgcacctagcttgcttggattcttcccagattcacagccatagggtgggcgtttcatgaaatctccaaattccaagggctcttgacagaccacctccatcctgatcagaaggggtgatgccggttgcacggtctcttagagcttaaaactctagcttcttctctgctcctcattccaaactaaacaaattgttgcattggattattctttcaaaatactccttgccttaatgccatcctttagattttggtggctggctcctgktgtggaccgcatctcacaggtggacttcctggtttctgcctcctgttacccctcacagttatctctcccttgagtcctgctaccttccagaaaaataggctccaaacacactttcatcccatcactcccagcatggagttctccagtggcctgttggctacaggacactctccagccccccgcattgggatgtctggccccaatccaccataatgtacttgtctccaatctgctgagctgcatgaatgcccaccccagcccagcgggcactccccttctgcaaacctccaagcacattccccctctgcacactgccaatcttcctgtccccgccccaaatccaaaggcccctcctatggctggggatccactggcagctgcctaacccttcctatgctcctggacgtttggtgcaatctggagcacgctcaagccggcatttgaaataacctggaacacgtttacatcatggaaaatatggaaaataggctgattggcttccactcccttttagagctggcaagaaaaataattgatgactaaacaacctaacgaccaacaaatataaaaagtcatagcccaaccatgatcaaataaggctccagcattcctccttggagggactctgagccatctggtgtcattttcctttccaatccgggaacattctggagatcctgacatccagctaacatgggcgttgcttcctgacaaccctaccccttccattccccagtcactactgcttcaagatgcagtggaaggagataaatcagacacctcagtagcgtgagtgaaagtrgggtgtgtggtgagacacatacagaggggagagggccagaggacggcgccgtgcgacacacaccattgctccttttgttcccggtttcggccaagttgtgccgcaggtgactctccaccggctgagctctgtgcatgcagggccagtattctcggccattctggcttagagaaaagctttctatattccagaatggctccaggcctcctcctcctcctattaaatgtgttttaaaagaggtcttagagcccaggcagttagatcttagaaaaagacaaatacagtagaagctggaggcaagcttatcctttccaaagagggagtgcttcctgtgttaatttgttattgagcatgatgaagattcagctccattgagactgagccaagagttgactcattcatgggagcaacataacgggttgtgagaagccaaaggattaagcatctgggagccaagactgatcttgagtggcccagaaatgcaacccaaggatcttgggcccaagggccaggaaggtttctgcagcctcctggagcattcacagaggctccctgtccgtccacttttccctctgttgctgatgtgatggctcctgccctcagcttaccagactcctcggagaggctggcctctgaattggttgaatgggcttgaagggggctggactccatttgggtggatgagcaggcccagtgcccctgtatgaggggaagttgtcttggtaagcctgtttttgtgtcaggtccccaggacaccttcctctgagtctcttgcgtgggagaagttgctggacacgcctctctggctctgtccccgccggcactgtgtgggatccatgctgttctccctccagcccttgccccacctcctggagcccttctctgcgcctggtcactacccgccccccacctccagcattaattttctagggacaaggggcaggggaaggaggagaagaaagagtccttgctgctcctcagagaagacacaggagaagaaagtcggagaggagtggggagccagggtggcaaagccccttcctgctgcccacgcaggtcctggctttctctccacccactgcaccatttccagggctgctctcatggtgggagccggagagacactgagaagaggaaggaaggaggatccaagaggagcccagcacacccggcttctctgctgcccaccctccactctgtcctcccagcccaggcccttcctaggcaaccctggcacgggtcctcactggccacactgaggccatcagcaaagcacctggcctcttcacgccttgggctctgggtctgtaaggcagtgaggctgaggttcctgggacagctgggcactgtggacttgcccagctgagcacaggcatcaggggctagaggggccctagtcccgatgacgaccgagtgccctctccacctggggagcttggaggactttgctctgcacttagggccacgcttcaagcccagtgcctcttatgaccaagtctctggggagaaatgagccctccagtgccaaatgacccaccactaaaaggccttttgaggcagggcctctcctgagcccacgcaggcacgtggtgggagatgagagggtgtgggctcacttcttgacattctgtgtgagtgaggtcattcatagggtgaggggagaatcaaggggacagagggccctctagtccccagcacttgggctcagctggcaagtccacagtgcccggctctcccgagaacctcagcctcaccgccctacagacaaagggcccaaagtgcagggaggtcagtgccacacaggttttattttttcacattattggtgtttaaaattgtaaagattttccacrttacctgtaaccatcaaaccacatgtattgcccccagttaatcaccatgaacagcttggtgtgtatacccctccatattcactgtgtttcttcttccaggaatgagctcattctctatacatcactccgtaacttgttgtttttacctagtaaggagtcatgggcgtcccaccaggtgaatacttgcatgtttgtcttcatcttcttaacaactacctgacactgcagtgtctcagtctgtctgaacttaaacagctagacattgagttctcagagtctggaggctgaaatccaagatgagggtgtgggcaggttctgttcctggggaggcctctcttcctggcttgcatacagctgccttctggctgtgccctcatgaggcagagcaagagacagctctggtgtctttggcccttgtaaggacaccaaccccatcccatgggccccaccctcaggaactcctccaaacccaatcacctcccaaggccctacctcctaatcttacccactggggatgagggcttcattatatgaatttggggtgggggtgcctcaacattcagaccccagcmccatgggaccactaatgtggcatcctgcctgtggagagatgcacagactgacccatccagacagcacagtggagcacgctctttcaacccacctgcacctgaccacagtgggcactcaggaagaaatgggtagagcgagtgaatgaatgaatgagcaagtcaaagacatgaacacatgacatctgactgtctccctgtgtgcttgtgtttcattctgatacatccctccctaaattcatctgctgagacaaaggattttaactggtgtttctacactgctttccccaagatgtggcaacccacaccccaccagcaacacctgtgaygtctgccgccctgtgtccttgtagcacctctcttaccaggtttccaaatgttgctaaactgctgggtcaaggaatagcatctgcctggggttagcctcacttgtgtggattttttcttactcctcttggccactgactgctcctggtctatgcctgttccattggctgcactgtccttccctgcctcttggccagaggctgtcgtgtgtcagcgacagaaacgttttggctgtcgtctgcacagccagtattctctccccatcacgctgggcctcgtgatgatggggggrkgggggttgacatcacagagatcccagtgcattttcgacttcatcactgtcaccatcctctcttgttcatttgggggatacagccgccatcagctcaacagagcaaaagagagggaggccacctgcatccrccaggtgctgaaatgggtccaggcagctgccagagtctgacatttccaacttgatacagcacctgtgatcggcagtagtacccatgacaacatttatttaattgaccaaacacgaacattatagaggaaggtgatcatttaaatgatatacttgaaattcatctgagtaaggaagctgagaacagtcaaagaagctaatttaaaaaataaaaawaaataaaaagaaccacctaatccgctgatttctaatcatgccgagtgcttatctctcctgccaggcatacagcgagcgccttgcagagtctcacagcggcactgtcttctcttttgcagcactccgtacaaagtgagacctgtggccatcaagcaactctccggtaaggccctgctgtcgttttttaaactaaaagaaggaaaaagaaatcttgagcttgcccctgtgataaaatatatactagttaagcatttgaatctaagcatttgaaatatatrtgagttacctttgaagcatttaactatatgttagttaagcatttgaatctgcatttgaagccgatacaactgcagaatctgaaaccttgtactactgtaagggctctgcctttctaaccccagggagaatagcatctkcctggggttagcctcccttgtgtggattttttcttactccttttggccactgcctgttcctggtctatggccgttccattggctgcactgtctgtccctgcccctcggccagaggccatcccaaggactttgcagttgcagggcggcatccactctggtcttcctggcccagcacctgtcctccccbctccactgtgagttgccaaggcaggcatttgtggcccctgggatgccttggggtgcctcatacagttacttgggccgctgtgttacaatcctttttctttttctttttttttttttwaaaaaaaacggagtctggtcctgtcacccagggctggaatgcagtggcacgatctcggctcactgcaacctctgcctcccaagttcaagtgattctcctgcctcaccctcccaggtagctgggattacaggcgtgcaccaccaagcctgggtaattttttttgtatttttggtagagacgggattttgccatgttagccaggctggtctcgaactcctgacctcaggtgatccacctgtcttagcctcccaaagtgctaggattacaggcgtgagccacagcacccagcctagaatgccttttccatttgatttttatcacttttatttatgtgtgatttatacatcataaaatgccatttaagtgcctattttgatgacttttgaaaaatgtgtacacccttgtaaccatcaccaaaatcaagrcatttgcaccacctagaaaagctctctcttgccccctccagtgtgtctcagtccacaacggacctgctttctgacatcatccatgagatttctttttgagagtttcatatataagaaattacatggtatatgtactctttttgactcaacataatgtttttgagatccatccatgtgctgtgtgtagagacagttcatgctttgtattgctaagtggtatcccatggtgtaggttgtaccacagggcgtcttccattcactgtggatggacatttgggttgttaccagtctgggggcttttaagaataaggctgctgtgagcattaaagtacaagtattggtggaaacgtatatttttatatatttcatttcacttggctaaatacctatgatacctataaccttgccaacttttttatacagttaaacatatacttaaccgtcttccctaagagtggatataagagtctgtagagtgttccccagtctgggtttgtctgacgtttctctcacgaccagcctgggtgtggtgggttttggaaggaatacgtggggcgcatgacagccaggtaggaccacgagcttctccactgcagagttactgttgatctccttccctgctcytctttgaaagcaagtcacgaagtccagcccacccaaacasaggagagaaaaaccgaggttcgttttctctacacagatattcatttctccagcaccatttgttgaaaagatgatcttttctcccactgaattaccatgacacctttgtggaaaatcgatgggccatgtatgtgtgagtctttttctggactccagatcctgtcgtgtgaatttacatgtcttaaaacaacagcacaccatcttgactaccgtagataaatagtaggtcttgaaatcaggtactctaagttatctctggtttcttttttctttttcaaaaatgttattgcttttattttcaaataaattttagaatcagtctatgaattgcttccaaaaaaacagtctgctaggattttgactgaagttgcattaaatatacagaccaatgtgggaagaattaatatcttaagaatgttgagtcttctggttcataaatatggtctatctccccattcatttgggtttcctttaatgtttctcaataatgtgttaccattgttaatatgaagtacttaataaatactgayaaatacatcactatttcatgtatttaatggtactgcaaatggacttttttttcatttcaatttccggtagtttttagtttataggaattggcttctgtatgggaccttgctaaactcatttattaggtctagtacctttttgcagatttcctgtgattctatagatgattttcttatagtgctggtcttctgacaacaaattccttctgcttttgtctgaaaaagcttttctttgctgttttgcttttttttttttcaaagagagagagagataaagtctttgtctgttgcccaggctggagtgcagtgatgcggtcatagctcacgacagccttgacctcctaggctgaagcaatcctccctcctcagcctcccaagtagctgggactatagrcacacaccaccatgcccggcgaattttttaagtttttatagggacaaggtcttacagtattgcccaggctggtctcaaactcctaaactcaagtaatcctccctccctgagattacagacgtgagccaccatgcccgactgacagtgtttttatttcatcttcattttgaaagggtattttcttgccatagagaattttagtttcacagttttccagcactgtgaatatgtcttctcattgtgttttagctagtacagcttctaatgagaagtctgtgatgtcttatctttgttcctctgtgtgcaatgtgtctttttccctctggcaacttaagatgttttctttatcactggtttgcaggaatttgattatgatggccttggtgtggttttcttttggtttaacctgcttggtgttcattgatcttcttggaactttgggatcatatttttcatgaaatttggaattttttctgctctcctctgtctctctcctttcccctgggaccctaactacctgaatgatagacagcctgagagcgtcccctgactcactcacactgtttctttctttccagacctttttttctgtttgctttatttttcttagacttttccrtgacgtcttccattgcactggtcttccctcctgcagtatctagtctgctgttaatctcgttcagtgaaattttcatttcagatattgcattcttcatccctaggaattatgtttccctcctttttcgtatctcccatttttacatctcccatttatgcctcattatgtttatatttcctgtaaatgcttatacctcattataattctgtttcatgccattgtctgctggtttcctcctctctgccatatccgagtctgtctctgttgattgatttatctcctgggtatgggtcatatttttctgattctcgtgaatctagtagatcttgatggaatgctgatcacaggaatgcacgctggttcatcatctggttttgtttctcccagttaagagtgttgggctttgccttggcaagcagttaagttacttgcacatcagtttgatgcctttgagccccacctttaagctttgtgagaatggctctagagggcccttaccccagggatagctcagtcctactaagacttgatccctttggggtctcccccaaactcctggctgatcaccaaattccactctggctgtttagagtgcaaatgtttggagatgagaatgaaagcgccagggccttgaaggtcgttgcaaggatgctggcttttatgctgagtggcgtgggcagctattagaaggctttcaggagaggagtgacatcatcacatttgtgttttaaatcttgctcagggcgctgggtcgagatcacgaaagggaagtggcagcaaaggtggaggcagagaaatccaagaggaagctatttttttgggaggaggcggaggcctaggccggggtgggggccatggaggtgatgaggagcgcaggttccagcaggttctaaaggaagagacaagctttttcctaagtggaagcgggatatagagacccatccggggcttctttgacctgagcactgagcgccacggcccagggagggggttgctgcgggtgggcttggtctgctcatcagacatcaggtgcatgaggagcaggcagagtcagggcaggcggcctctcggctgtcggctcccaatggatggtgttgaagtctgggacttggtgaggccagcagggagtgagtgagcaccagcaggaggggccaggcctgagccggacggagaccgaacccatccgtgggagaaggacgctggtgacaggacaccatcgggagcagaggggaagccataaagccctggaggcaggaagaggcaaaggctggccgggtgtgggtgaggtgctgcagggctctcgcaggccagcgaagacaggcgagatggctgtgctcagagttagaagagcatcgctgggagcagaggaaagagggatttctgtgtcacctggggrcccatccaggaccagtgggagatggagttgggctcattgagggaaagaggtgaatggaaggaagttggaaccagctgtcctaaggccggagctgctcctccctggaggactccggcaaaggctgctggccttgggctgtgcgggcacccagtggctgagagatcgttgccctctgcagccctcctgcaacttggatcctaggagccacaaagaggcttgaaaaataatccatcctgagaaacacaaaggctcacattaaacttcgcatcgtaaagttttgagtaaaagaacaataaggggcatttctgctaaaggtgccaggatgagaaaaagcaggaaacagtgctgcaccgccaggctctgcaccgtctctacagagggctggggttggttcaggagcattcggcccaggctgtgatctcragaaggtggtcagggcccaggctcccgccagccctcacggcagcacgaggctggtacgagacaggtgcttcaggtgtttgttgagagctgcacacacttctgctgggctgggcaagacttccctcttcagagaggatgagcggccacacggaaggccaggctgggtgtccctccgggccagccgaggagcgctgcgcttattccgcagtgaggagtcgctggctgtccaggggagctgcattttcctagcagcgacaacccctcccacatctccatagtcacatcctggctgggctaacaccayctttccccgcytctgggtgcgtggggaccccgctctccaaataggccagtgttccaggcttttctttaggagacaaagtcggtgtcaggtagaccccccccaccccaccaaacacacacacacacacacacacacacacacacacacagctttcctgagaaatgtgtttacagaacattttttccatttggggtttgtccttaggaattcttcactctctctatggcaacaaccttccctctcccgtccatcggccttgggtcccagagccactgagccgtggcccaaggtcaggagttagctctagcgacgccgccctgagttctggcctgtaagcaaccccaggtgcccttgtgaatcaacagaccacatttccagtggcagaaaaggaaatgggagctgtttctagactagcacaaggctcagggggtggggggtgggggcagggtgcagggaggccaacgccacacagccccacacccagcctttcccaaggccctgggttcctcactgattctcagcaggtttcagtaaatgcctctaacgggcccggtggaactgtgcaatgcagaaacaccccagggttttgctgttttgctacttaaatattcaggaaatagtaaagagaagagtattatcaaaaacgtgacttttcatagaaaagggagaataggccagccctggcctgggtccacaaccccagtgtgagctgcagagacttctctggagcggtgaacagctcctgccaggaaagagcatggcacagcctcgttctccagcgtagagtagaaggaatggccccrtccacgygaaggtctgtgttcaccaagcatcttctgtagaaaaatgctctcttcgcctgatcatgggagggaatcaaatggatagagcatttmtcccttttgtgactaaaataaaggtaatagcaactacaaaaaccacgacacaggcttctcagcatctttttataacgatagtgctgattttttggaaaatccttgagcctcaatcacttttatttgatgtaagccgctcaaactcaaagagtgttgttttccagattataaaacacagatctcagctgatggcggttgacgggtgtcccccgagtgccctcggctgccaggagctggcaggggagatgcctgtgatgaggattgggtgctgtgatcacagcacgcgggaaaaggacagggcctccctcagcgtggcagatcgcgtgggtccatgggtccgtgtgatctcatgaccgtatcaaggggattgtgtctttttgaccagagcgttagggaaagcgtgctgcagtcacacgccaggacggccccccacggcccaagtcctataggagagccaggggccatcacgattttcttaggcacagcagcagttgaaccgtgctgtcacacttaacccaagtgatgacagcctcttcaactaggacagtgctgtaggggtctggttctgcttgttctcccccacattcctgcctgccctaggacccaggacctgtctctagtcacacacaccctgttcagcctctgcatctggcccccgcggagacccacaccacattctactcccctggccagagaccgagggtgactcggaggcttccagttcccagcagctttattggcgttgctgtttccatagaaggacaataaaagggggccataaggaggcrcatccgcagagtgygtgcttgagcttctgcaagccagaggaggccggcggccggcagggtgggcaggctggctggctgtgccccacaacatgcatgtggagaggttttgggggcagccatggaaccccggagctgcccccacatgagagttcccccaggtggtgaccaaatgcatttacagtccagccgcagtccagatgcagatgcgctgtaactgtagaacacacagcaaattctgaaggcttagtatgaaaaagaatataaaaatctcagtcatttttatattgatttcatgtttcctggttgagatgtcattgatataacataaagcccaccattttaaagtgtacaacctcagccaggcatggtggctcacgcctgtaatcccagcactctgggaggctgaggcgggcagatcacctgaggtcaggagtttgagaccagactggccaacatggtgaaaccctgtctctactaaaaatacaaaaattagccgggtgtggtggtgcacatctgtaatcctagctacttggaaggctgaggcaggagaatcgcttgaacctgggggtagaggttgcagcaagccgagatcacaccactgcactctagcctgggtgacacagtgagactctatctcaaaaaaaaaaaaattgtacaacctcagtcttttttagtgtcttcattttgttgtgcaaccatcaccactatttmattccagaacatttccatcaacccaaaaagaatccctgtacctgtgagcagtcccccctccatccccttcaccccccagcccctggcaggccctgttctctgtcctgtgcattctgacctttcacataacagaatccgtggcctttccagcctggcttcttccactttgcacacggtgttgcaggctccccgcgttgtggcatatgacagctctttgttcctttatggctggatgacgttccgttgcgtggctgcgtcstgtggctgcattgtgtggctgtgtcacgtggctacgtcacgtttggttgatccgttcatcagctgatggacatttgggctgtttccacaaaggctcttgtgaatgatgctgctgcaaacgtttgtgtgcaaatttttgtatgaaagatacatggtgaaatgaggtattttgaggtacattggattaaatgagatattaaaaatttttttaaagtctagccrtcttgaaggggagggcctgagagaagtgctgaaagttcacagcagaggataccggatgctgcgggtgtgccaggctggcctgtccaggaggtccctgcagcctgggtgggaggtcccttacccactaatgggtgcctcctccaacccctgagtccccctacctgaggacttcctctgtgtgtggcatacgcggctgccccgaggtcagtcctccccagtgaaagggagctgaaggacaggtgcccagcttctttgctccacagtgggaccaatctctgacatcatcaatgcagttgctcaaagggagctcagagcraggagtcacctgtacatcaactcaccctctgggagctctcttcccttccatgcctcaatcccccactccctcccagggcttcctgggctggcctccaaatgcaccactagcccccagctccttgtctccggtgggcttttgaggatttccaactaagaaccttagactccaagacaggtcaagccccctggcatactcatttgtcatttggatgaaatagccttaggagagctayttaaccccactgaacttccatttccctgacaaaataggaattctaatgcataccttgcatggttcttggaggataaatgaagtaatttatgcaaaatgctgagcacagtgcctgccacttggtaagcgcccagtaaatggttgttatcattgaaaatgayttagggggcatttttgaatggctaaagttatgtctctctggaattgctgaattttaatagaacaggaatgcttcctaaggtctaaaacaaaaggcggaggactggctgtgtctgccctggaagccaagttaatgctggatgtctgcgcatagacatgttgctcatgagaaataataatgctccttaataatattgtctatttcagtgcaatttcagtctagaaggctttataagcaaagccacagtcatccttacttgcatttttttgaaacaaaaagactgcagtgtataaatgaaaaataaccatttctggaatggtgtgttcagacggattccccttagagtagcctagccaacaaagacagcagcagcccttagcgtgccactgtcagagatattgatggcaaacagtaatacggaagcctgcggaatggaagtgtcctgacggcagatttgagtaaaatggagatgatgacagctgaacattgctgcacggacctcaagactgcaaacgttaggactgccctccctgctcctaggcatttgtgagaaccaggccaacccatacccacccactgctgtgtcctgcctgactgcactgaaatgcacagatcctgtgggtgcagtttgatgagttttgttttgttttttgttgtttttgtttttgaggagtttcgctcttgttgccgaggctggagtgcagtggcgcgatctcggctcactgcaacttctgcctcctgggttcaagcaaktatcctgcctcagcctcccgtgtagctgagattacaggcgcatgccaccatgcccagctaattttttgtatttttagtagagacaaggtttcaccatgttggccaggctgatctcgaactyctgacctcaggtgatccacctgcctcagcctcccaaagtgctgggattacaggcatgagccactgtgcccagccacagtttgatgagttttgatagaagtgcatgtgttagatctttcaggaatcaccacccaaaccagaaataccatttgacccagcaatgacgtttatatatatacccaaaggaatataaatcattctattataaagatatayctacatgtatgttcattgtagcactattcacaatagcaaagagatagtatcaatccaaatgcccatcaatgatagattggataaagaaaatgtggtacatatacaccatggaatactatgcagccataaaaaggaacaagatcatgtcctttgcagtgacatagacagagctggaagccattatcctcagcaaattaatgcaggaacagaaaaccaaacaccacatgttctcacttataagtgggagctggacaatgagaacacatggacacagggaggggaataacacacactggggcctgttgggagggttgggggagggagagcatcaggataaatagctaatgcatgctgggcttaatacctaggtgatgggttgacaggtgcagcaaaccaccatgacacacgtttacctgtgtaacatccctgcatgtcctgcacatgtatcccagaacttaaaattaaattaaattttttaaaagtgcacgtgcatgtaaccgccaccacaatcaagacagaggacatttccatcaccctagaaaaatgtccccgtacccccttcaaggcagtcctcactgtggagtgctctgcctatttttgagtttcacggagttgaaatcatacagcacgagctctttgtgtctggactctttcactcaacatcatttttgtttgtttgtttgtgtgtgtgtgcgtttgttttttgagacagggtctcacgcctgttgcccaggctggggtgtgaggcacaatcatggctcactgcagcctcgacctcctgggctcaggtgatcctcccacctcagcctccgagtagagacatgttgcccacgctggtgtcgaactcctgggctaaagcaatccgcatcatgatgtttgtaagatccattcgtgcagttatttccttttgcactgctgagcactgcatgcctcgctcattcattcttctgtggagggacatttgggtcatttccagtttagggttcggctactagaattattgtacaagtcttattgtgggcatccttgtccatgatcttgggtccacctaggagttaaatggctggctcatatgctgtgtttgtttaacttaagacttamttgttaagtgtaagaaactgccaagctgggccgggcacagtggctcacgcctgtaatcccagcactttgggaggccgaggcrggcggatcacttgaggtcaggagttcgagaccagcctggccaacatggcaaaaccccatctctacaaaaagtgcaaaaaattagcagggtgtggtggtgtgtgcctgtagtcccagctactcaggaggctgaggcaggagaatctcttgaacctgggaggaggaggttgcagtgagcagaggttgcgccactgcactccagtctgggcgacagagcgagactccatctcaaaaaaaaaaaaaaaagaaagaaaaaaagaaactgccaagctgttctaccaagaggttgtaccattccacattcccaccagcagcatctgagtgatccagctgttccacatccctgcaacactaagcattctctgcttacattttagacattcgagtaggtgtaagagcaatcctatcttcttatagttttaatttgcatttccaagtaacttaatgatgttgaacatgttgctatgtcttattgactatttgaatgtcatattttgtgtagtgtctgttcaacaatactttgctcaggccaggtccggtggctcacgcctgtaatcctagctctttggaaggccaaggtgggtggattacctgcggtcaagagttcgagaccagcctgaccaacatggtgaaacctcctctctactaaaaatacaaaaattagctgggtgtggtggcaggtgcctgtaatcccaggtactcgagaggctgaggcaggagaatcgcttgaacccaggaggtggatgttgcagtaagctgagatcgcgccttgcactccagcctgggtgacagagcaaaagctgcatctcaaaaaaaatatgtaaaaaggattttgctcattttttaagctggcttgtattatttttgtcactggtttgtaggaaactctacataagctaggatataattcatttgtcagatatatgtggcaaacatttttcccaatttgtgatttgcctttttcgttttcttaatgaggtcatttgatgagcagaggtttttaatttggtgaattccatccaatgtaacaagtttttctgttgtggtcagtacttcttgtgtcttctctaataagttttgtttttttttttttttgagacaaggtttcttgttgcccaggctggggtgcagctgtgcgataagctcactgcaacctccgcctcccgggttcaagtgattctcctgcctcaggctcccgagtaactaggattacaggcgtttgccaccacgcctggctaatttttttgtatttttagtagagatggggtttcaccatgttggccaggctggtcttgaactcctgacctcatgatccacccacctcggcctcccaaagtgctgagccaccgcaccaggccccccaaattgctaggattacaggagtgagccaccatgcctggccctaataattttttttatcccaaggtcatggagatacattttagaagatttagagttatagctgttatgttttttcttaatttaaagaaaatttttaacaacccaatctgttgagatgttatgttttaatctgtcattcatttcaagttaatgttgtgtgtgttgtgaagtagagactgccattcattttcttccccacgctgacacccagctgttactgcaccacttgttaaaaagactccttttcccgctgaatccatggctcctttgttgaaagttaatggtatctctgtgtttgggcctctcgctgaactctgttctgcttcattgatctatttgtctatcctcacaccaacaccacactggctacgttactgtgccctggaatcaggtactctaagttctccatgtgttcttcctctgcatttgttttgactgtataggttcttttcttttccctacaaattttaggatcaacttgtcaatttcaaaaaaaaaagccatctatgactttgattactattttatttactatataatttggggagggtagtgtcttaaccatactgagtcttccaacccatgaacatgatacatccctccacttatttaggtctcatttaacttctcaaaaggttatggctttcaagataaaggtccttcatgtcttcggttaactttactccaaagtgttttctgttttctggttttattgtgaataagatttcattaattttccaattgtttgctgctagtttataaaaatataatagatttttggatgttggcgttggatcctgtgaatttgcttaattcattggttagttctagttgttgttttataggttcctataattgtccacagagacaatcatgacatctaagaataatgacagttttaattattgcattccaatttttggcttttatttcttttacttgtcttgttgtactagttgaaactgcaatacagttaaataaaagtgagagcagacgtcctcgccttgttcccaatcttagaggagatgccttcggtctctcaccattacatacgatgttagccacagatttttttgtggatgcctttcataaggttggaagtccccgtctaatgttagttttctgagagttttttgtctcatgttctttgacaaaattctttgttaacttttatcaaatgttctctctacagctactgaggtgggttgaggaggtgtcctctttttccttgttttctaatggttttgtcccataaagaggtattggattttgttccagtacctttctgcatctatgggatgagcatacatatggtttttctgctttattctattaagataatgaataatactgattgattttcaaatgttaaaaccactttgctttcctagggtaaatgcacttatatttccaggaaatgttcctaggaaatttcctggggtaaactcacttgtatttccaggaaatatttccaggaaaatacttgggaataaatgtaacaaagtatatgtaggccctctccctggtgtgtttgctttttatgtattgacttgtttttgtttttgtttttgttttgagacagtgtcgctctgtcacccaggctggagtgcagtgctgccatctcggctcactgcaacctccgcctccaggcttcaagtgattctcctgcctcagcctcccgggtagctgggattacaggtgtgcaccaccacaccagataatttttgtatttttagtagagacagggtttcaccatgttggtcagggtggtctcgaactcctgacctcaggtgatccacccgcctcagcctcccaaagtgctgggattacaggygtgagccacagcacctggccgcttttcatgtattgctagatttgatttcctaacaattcgttaagaatgtggctgtctatgcttaaatgggatattgatttgtaattttttttcttgcagtgtctttgtcatgttttgatattggccctatagtggcctcataaaacacattgggaagtttactttcttctgtattttctgaaagattttatgtaattttggtattattttgtcctatgtccctttacacttaatgtatttgggttttttgtgtgtgtctttttaatagttaataacaatgtattttattcttgaaaatcactgagagtacattttgcattctcaccacaaaaaaaaactatgtggcataatgtgtatgttaattcacttgatttagccattctacaatgtatatatttcaaaacatcatcttgaccatgggaaatgtatctaatttttgtcaatttgttaaaactttttttttaattccaatttttttttttttgaggtggagtctcgctttgttgcccaggctggagtgcatgaccatgggaaatgtatctaatttttgtcaatttgttaaaactttttttttcattccaattttttttttttttttttttgagatggagtctcactttgtcgcccaggctggagtgcagtggtgcaatcttggctcactgcaagctccacctcccgggttcacgccattctcctgcctcagcctcccaagtagctgggactacaggcgcccaccaccgtgcctggctaacgtttgtatttttagtagagatggggtttcactgcattagccaggatggtctcgctctcctgacctcatgatccacctgccttgacctcccaaagtgctgggattacaggtgtgagccaccacgcccagccccaacttttattttacgtacagatctaaacgtatcacatgcaggtttgttatgtggtgtgtcgcacccagatggtgagcagagcccccaagtctttgttgatatggttggggttagctctcccagtctttgttcatatggttggggttggctctaccagtctttgttcatatggttgrggttagctctaccagtctttattgatatggttgrggttagctctaccagtctttgtcgatatggttggggttagctctaccagtctttgttgatatggttggggttagctctaccagtctttgttgatatggttggggttagctctaccagtctttgttgattagctctcccagtctttgttgatatggttggggttagctctaccagtctttgttcatatggttggggttagctctaccagtctttgttgatatggttgaggttagctctaccagtctttgttgatatggttggggttagctctcccagtctttgttgatatgrttggggttagctctaccagtctttgttcatatggttggggttagctctaccagtctttgttgatatggttgaggttagctctaccagtctttgttgatatggttggggttagctctaccwgtctttgttcatatggttggggttagctctaccagcctttgttcatatggttggggttagctctaccacgttgctatttgctgtttcttgatcttgggttttgtttttctgttcctccttttctgccttctcctgtgttaattgaataaatttttgttttccattttattccttctgctgactctttagctgtctctttttgcattatttttcctcggctgttgtaagtgttacaatatgcatctttacttttttttttttttttttttacaattgatagactttgttttttagattcacggcaaaattgagtgaaaagtgtggagctcccacatgttccccccacacacagacattcagcctctgccaccgtcaacgtcctgcatcagattgtatattggttacagccgggcgcactggctcacgcctgtaatcacagcactttgagaggccaaggcaggcagatcactggaggtcaggagttcaagaccagactggccaacatggtgaaaccctgtctctactaaaaatataaaaattagccaggcgtcatggcgcacacctgtaatgccaactacttggcaggggaatcgcttgaatccggaaggcggaggttgcagtgagctgagattgcatcactgcactccagcctgggcgacagagagagactctgtctccagacaaaagaaaaaaaaaagactgtacattggttacaatcagtgaaccaacattgacatatccttatcagccaaagtctatattccacctcagaattcactctcagggctgtacattccctgggtttggacaaatatatgatgacctgtgtgtcccatcccagtctcagacagaatcggttctctcagggctgtacattccctgggtttggacaaatatatgatgacctgtgtgtcccatcccagtctcagacagaatcggttcactgccttcaaaaccccctgtgcgccacctattcatccctcccgccccaagccccagatctttttactgtctccatagtttggccttttccagaatgtcacatagttggagtcatacagaataaagcctcttcaggttttctttcacttactaatatgtctttaagattcttttatgccttttcccggcatcttagcattgaagcatattccatggtctgtatgtatcacagtttatttgcccactcacctattgaagagcatcttggttgcttccaggtttgggcagttatgaataaagctgccataaatatttgtgcacaagtttttgtgtgcacataagattttaacacatttggataaataccaagaagcacaattgctggatcttttggtaacagcatgtttagttttgtaagaagctgccaaacggtcttccaaagtgactgggccattttgcaytcccagcagcaatgaacgagcattcctgccgctccacatcctccccagcttttgtgtttcagtgtcttggattttcaccactctgataggtgtattgcagtatcttcttcttgttttattttgcaattccctagtgacatatcatgataagcatcttctcatatgcctgcttkccatctgcatgtcttctttgaggtgtctgttcatatcttttggccacttttaatcatcctgaacttttcacaatctatttagaattaatactgtaccgcctcacataaaaaataaggacactgcagctatataagtctacttactcccctctcccaccacctttgagttattgtgtcatatgttttatatctgcatacattttaagccccataatacaatattataatttcctttttttttttttttttttttgagacggagtctcactctcttgcccaggctggagtgcagtagtgagatctcagctcactgcaacctccacctcctaggttcaagcgattctcctgcctcagcctcccgagtagctgggattacagatgtgtgccgccacgcccggctaattttttgtatttttagtagagacggggtttcatcatcttggtcagactggtctcgaactcctgacctcaagtgatccacccgcctcagcctcccaaagtgctgggattataggcgtgattataggccactgtgcctggcctataatttcttatttaaacagctagttgttttctgaagaaattatgaaaataaacttccagatagttttttaatagttgcctatatatttgccatttctgatgtttttatttcttctcaacttccaacttatattatatcccttcactctaaagcatttcttttttcttttaatgtttcttgcagtgcatatctgctagtaactaattctctcagcttttgctgattggaacatgccttttttttttttttttttttttgaaatgatgtcttgctctgtcgcccaggttggagtgtacaatcagttcactgcaacctccgcctcctaggttcaagcaattctcctgcctcagcctcccaagtacctgggattacaggcgcccaccaccatgcccacccaggcactccacccaggaggtggaggttgcagtgaactgagatctcactactgcactccagcctgggcaagagagtgagactccatctcaaaaaaaaaaaaatttttttgtatttttagtagagacgaggtttcaccatgttggccaggttggtctcgaactcctgacctcaggtgatccacccacctcggcctcccaaagtgctgggattacaggcgtgaaccaccgtgcccaggcaaggaacatgcctttattttgccttcattgtgaaggatgagttttcatggtgtggaattctgcattcacagtttgttttcttcaagaagcttaaagatgttgactcactttctttctggcctccattgtttctgatgagaagtcagcttaatttgatcattattcctctgtatgaagtgtgtctttcttctctggctgctttctttggggtttgtttgtttgtttgtttgttttgttttgtttttgagatgaagtttttgctctgttgcccaggctagagtgcagtggtgcgatctcggctcactgcaacctccgcctcctgattctcctgcctcagcctccaagtagctgggattgcaggtgcccgccaccacgcccaactaatttttagtagagacaggatttcaccatgttggccaggctggtctcgaactcttgacctcaggtgatccacccacctcgggctcccaaagtgctaggattacaggcgtgagccactgtgcccaggcctctggctgttttcaagctgttgatttctttcctttatctttaggtttcagcagttggactatgatgtgcttcagtctcattttcttcttatttatccttcttcatgttcattgagcttccatggactatgaatttaccttttcagcaaatttgcaaaattgtcagccattacgtgttatatgtgccattctttctcactaatgacctgtatgttagaaagtttgctgttgtctttcaagtgactgcagctttgcggttttttataatcttttttttctttgcccttcaaattgggtaatttctgttgacctgtccttgatttccctgactcttccactgactccagacttctgtaagttgatccatgaagtttttttttgtttaggatattatattttaaaattctaaaatttgcacttgactcttgttcatagatttgtctctcgagactcccctctgtttacgatttactgacgccgcttttgtttcggtgtttgcacgtacctgcaattgctgcattaaagtctcgtttgctcattttggcatctgagccggcaagcgtccagggtgtctgagggatgattttctcttggccatgggtcacattttcctatttctttgcatgtctattttttattgtagactaagattatgaataacacctaggagagacattggattttgttatcatcctctgaagagtgttaattttgctccagcagtcagttccgttactsactgatcatctgaacttcgtgcagcctggttttatgctttgttggggtagatctctagactgacccttctgtggttttagtaggaagcctgaggtatttatcaagcctctctaactcgactacatttaaactccaaactttgtctcctccacagcaggagctgaaacctctgccacactaggcccacaaacatgcgtcattcagggatccaccaaggaacagggtagtttatacagaatttgggtcccactgccatggcytcctcctttgggaactctcctttccatttccatcctctctgacaacctaaaactgtgtcatctgacgcttcaacctggaactttctgcttaagttttagccatctacattataagggcactttatagcaagaaatagaatattattccattctaggccaagtacagtggctcacacctgacatctcagcactttgggaggccgaggtgggtggatcaactgaggtcaggagtttgaaaccagcctggccaacatggtgaaatcctgtctcttctaaaaaaaattttgaaaaaattagccgggtgtggtggygcatacctgtaatcccagctactcaggagctgaggcaggagaatcccttgaacctgggagccagaggttgcagtgagccgagatggcgccactgccctccagcctgggtgacagagtgagagtctgtctcaaaaawaaaaaaaaaaaaaaaagaaatattccttcgttcttttataggagcatagtacttcattttgtagatgtactattgtgtatcctactgatagatacttgtgttgcttccagtcttgtttttacagcgatcagatggttcttcttaatttctcttgctacaaatgttgctgctgtgtacaacctgttaaagtccacagatggartaaaagctttggtttgcaaaaatgactcaatctttacaaacattctgtcatttgtaccataatcaattagtttattggatcaccgaattgcctgacagaatccttcctggaactagtctatggggtcatttggcatagagtcaaagcctcagacacgatragccagagttgatttcctttggcttcacataattaaactttcccagaggattatcaggttacagtgacacacacacaggctgtcagataatggacaaagtcccagcagcgtgtacaaccagctggtggctcccaaattcaaattcccccagcggcatccrttcggttattcgtacccacaccctcccttagaagttyacccctccgccaggcgcagtgactcacgcctgtaatcccagcactttgggaggccaaggcgggcggatcacctgaggttgggagttcgagaccagcctgaccaacatggagaaaccccgtctctactaaaaatacaaaaattagccgggcatggtcacgcatgcctgtaatcccagctactcgggaggctgaggcaggagaatcgcttgaacctgggaggcggaggttgcggtgagccgagatcatgccattgcactccagcctgggcaacaagagcaaaactccatctcaataaataaataaataagttcaccccactaygggcaagaagccacacagaaagaaaaataaaataggtatctctggggttttctgaagggaaagtaagtgcagctctgtcccgtctttgcagctctaaataggaacatggtggagtagggcaggtcgggcttgacgatgtcatgacttggcctctctcagtgtcacgcagcccctgcaggttataaggaggattgagctggccaggcacagtggctcatacctgtaatcccagcactttgggaggccgaggtgggcggatcacctgaggtcgggagttcgagaccagcctggccaacgtggagaaaccccatgtctactaaaaatacaaaattagcccggcgtggtggtgcatgtctgttaacccagctgctcgggaggctgaggcaggagaattgcttgaacccgggaggcggaggttgcagtgagctgagatttcgccattgcattccagcctgggtaacaagagcgaaactccgtctcaaaaaaaaaaagaaggatagagctaacatgcatgaaccacctagaacagcacccagagcatagtaacagctccttgcagatgttacagtaccttgatctatacaacagtaaagggaaatgcatgctagctgccccagaygctgccagcttcacaggcatttttctgcctgcaaactaatcctaaggaagagaggagggcagggggagaaattgcacccagtcaaatgtaaacgatacaaaaygtgaaattcccctctctgaaaatgaaagggaaaaaactcgattcaatgcctgcccctgaggtgaacctgaaatgacaaggcagacactctcyagaacttcacgtttggccaccagggtcttcrgttgattttcctttcttcgtcatatctgagtggctgaaacgccagtgatctgggatagtcctttggctgctgatagacttatgcaatcccttggcaggcaggacaggccagaggaagggmtcctgtgcctttaaggtcactgttaatcwtgtaactttattgtgttcctgggctataaaggaaatgtcgtccttgatctgaatgtctgttttatgatgtccataaacagtgaattgccagtgactgtaccctgagtgagaacatcctcagccagttgaatagttcaagggcagttgcaggggtcaggagagagcaaaagtgggacagaagatgagtttgcttcccaggaagagagacagtgccaccccacccctcgctgacagggaagccttccagcccttcctccaaagagccttggctctcaggggtyggaggttggacaagagcagaaataaaggcaccctgcycccaccccccacaatcttccggacgtctagagtgcttatctctttgggggcaagtaatgtgaattattttccctaatgcaaaaataaaaaataagagaccccttttacccttttctgaaaggatagcagaggtatttttcttttcttttttttttttgagatggaatcttgctctgtcaccaggctggagtgcagtggcacaatctcagctcactgcaacctccgactccctggttcaagtgattctcctgcctcagcctcccgagtagctgggattacaggcacgtaccaccatgcccagctaatttttttgtatttttagtagagacggagtttcaccatgttggccaggatggtcttgaacttctgacctcatgatccgcccacctcagcctccagaagtgctgagattacaggcgtgagccaccatgcccgtccagcagaggtattttttctaatacttgagaagtgtctgctaagtatgtattcaccggagggtgctcagcacctcgccctgttgctctgggttgggactaacaaggtgaaacatggctcattgcatcatattaatagcatgcaaatctaagcccagtgatgccgtgcaatggctacgatcaagggcaatagaatggatcgtgcatgagctcccaggccacacacacacgcccttgtgatgtattattccctctactcttgcaggtcggtgcttgggatgctagtgcccaagctgatgttcctaggtcacctccctcaatgcatgggtctaggggccagcatgttctattgctagggccatgtgtgcattcgtttgcctaggggagaaaagtacacattcccatcagctcaggtgcgtggaggacggaagaactgctgttgctgctagtattctcttcagcacaagataaaaaggagataggcaaatcagctggctggccaatcaaattaacttattgttacactaatttttagaatcagaattatgggtcaggctgtgctagcaatcagtgaaatcaaatttcatgtyattctgcrctgggtagactcaggatttgcctgaaacaagtaaacaattcctggaagaagtgggcgaggcagaggcttgaactatccactcagaccaaggaggagtcaggcaatggcttctgggcatcgtgtggggtgsgggcagcccctgccctggacacccgtgaacacggaggcagccgtgtgaacaccatgaggcagggtgtccatcctgccacccacacagctgcgtcctgcccaggaatgaggctggcagcccataggcccctcctyggtccctctagaggtttgcttcattccagtacccttggttctgtcaagtgggcagggcctgggcccctctgctgcaaacccatggcccaaagcggacctgatccggcagcatctaaaaacaggacccggagaatctgctggactccaggattgccctggaacaaacctaaagtctcctatgacatgcaaacaattctgccagccccggccagcattccctgcatgtgcttatcaagtgaggaggccagcaggacttagcacccaggtgagcacacttcattgagtccaggtgtgtgcagatgagaagcagccaggagttgaggctgaagaggagcctacctaaacctgtcattacaactgattgatccttggtgtagtcaaatcttctgcctttatgaaagtcatggtatctagaggtaaatccccatcagcttggagcagcaccatgaaatccactctagcatgcagactcgggggcacttttagatattctattggttgttcttgggggacagcttcctttggagaacatgtgagttgtctgtgaatatcagcttgctctccctcggtttccatcacatggatcagcgagagttaatgctgactccccctccctcgggggcttatttgcaatctcccgatttgctcaaaaacttccaggtccagagggaccctaaagaccctgtcatgtccccctgtgaattaccagcatcccaggccattgctgggttttcttaaaactattaagacactatcaacgtgaaatgacttgaataggctttaatttttaaaattcattatacgtcctgcagcatttaggaaaaagagggaggtgtcacacataatatcaaatttggctgacacaaggtgattttgccacgaaggttgggaaggatgaacatttgcaattgaaaactgtttgttgcccccagaatccagcggtttcaggctctctgaggattccagaggtgctagagggggtaaggccacattcaggtggtgcaggtgggattcaccccttcacagcctggaggtggtgcccggagcgcaccctgtcaccccaaggatgatgacaccccagggaaggtggtggaagcaggaaggggaggtcagaggaaaactggggccctcagtgggcrtccgtgatgcggaaacactaataatgccaacagcaatagcagaggcaggcagggcttacgtggccagggctgggctggtgctgtcctgagcacttgacatgcatgaaatcacagttgttttaagttctgaactcccctgggaggaaactgtggccacagcaggaattccaatgattctagggtcaggagaggaggcacccacttcctgatcagggctctgtttgtggatgcgtgggtgtggttggcctttgtgcacactggyggttttgcttctttcccccagcaaaagaatgcagattttgcattatctaaagaggcggttccgtgagcccactgtgctgagtcacatatattccatcggtgtaagtaccaccacctgggcagtgcccctggagtgttctcactgggagcgcagctttgtgtctgtacccttcctgagaatagctgacatgctggcctgggtggcgcattggccgaggtgtggctatgacagaccaggataccagcatctgccccagcactgaactgagcacaccacagaaggtgtggacagagtggcatgaaacatgacagctgcttgtgctcgaaattagatgtagccacacaaatcctgtcgtgctcaaagggttccatctccaaagtccaaaggaaaactcttccttaactgttattccattctgtctatacatttcttattttgaagcaaggataggttcacacgctgctgtaatgatgcatgcagagaaagcccaytcatggcccggtttctcccagtggtgacatcttgcaaaactctagcacaatgtcacagcctggcattgaccgtgacacggtccagatccggaacatggcgtcccccacaaggatcccacctgcygctctttaatagccacgctgcttcccttccattccccactggatccctgtcccctggcaaccaagaggtctctctcttttttgtttttgtttttgttttttttttgagacagagtttcgctcttgttgcccaggctggagtgcaatggcacaatctcggctcaccccacaacctccgcctccagggttcaagcgattctcctgcctcagtctcctgagtaggtgtgattacaggcatgcaccatcatgcctggctaattttgtattttcagtacagacggggtttctccatgttggtcaggctggtctcgaactcctgacctctggtgatccacccacctcagcctcccatagtgctgggattacaggcatgatccaccatgcccggcctctggtctctatttgtatgatgttgtcaattctgtaacgttctacacatgtaatcatgcagtaggtgactttgggattggcgccttccacccagcacaaccccctggcatccatccgggttgtcgcctrtatccgtggttcattcccttctttctgagtcatactccgcggtatggatggaccacggttggttcaaccattctcccttgaaaggcatctgcatcgtttgcatttgggactactacaaatacatccgccrggaacatgyggacaggcctttgtgtgaacatcagttctccgcgtacatcatctctctgccctggtgcttgcatctttagttggttttttctgtcttttgaagaacctaccagactgttttcagaatgactgtaccatttttcattcccaccagccacgagtgagtgagccgtgtttccacgggggttggcattattttgtatcccagccattttgataggtgtgcagtggtgtctcactgtggttrtaactggcatttcctaatggcygagtggctctcagcatctcttcatgggcttctttccatctgtgactttctccagtacccatctgctcatctcttgcccgctttcaagttggctggttttgttttctaccattgagttttgaccattctttatacatgctatctgcaagtctttgtcagatacgtgtcttgcaaatattttctgccacaccgtagcttgtcttgtcatcctcttaccaggatctttctctgagcgaaaattttcattttgatgaagtccagtctatccatttttctttttctggtttgtgtttttgctgtcaagtctaagaactccccaccttaccgaagaccctgaagatttctcctatcttctctctgtgttttatagtttcatgttttacatctgtggtccactttgcattgatttttatataaactgaattctaggtcaaggctctttttcttgttggcctgcggatatctaatttttccaacactactgaaacactatttccaacactattactgaatgccaccacgcctggccatatatatatatatatatatatatatatatatatatattttttttttttttttgyagagatggagatctctctttgttccccggctggtctcaaactcctgggctcaagcaatcctccaacctcgacctcccaaagtgctgggattacaggcatgcgccactgtgtgtggctggtattttatttataatttcagtgtctacatggtcattgctaagctttcttttctctgttgaattgcttttacatctgggtcaaaaatcagttgggcgtatttgtatggacatggtcataggccctctgtttctttccattgctctacctgtctgtctttctgccagtacctcacagtcttgattaccgaaattatgtcataagtctcaaaaakaagataggctgattcctctcattttgtctgttgtttttcaaaattgtttttattcttgtgaatcctttccctatctaaatgttagaataatctctatttctacaaaaaaaaaaaaaaaaaaamaaagtcttgctaggctttcaatgggaattgtgtaaaacttgtttacctatgtggggagaatttactatgttgagtcttccaacccattaacatggtcagtcttgccatttgtttatatcttctttgatttctttcatgaatgttttgtagttttcaacatacaacttctgcatatgttttgtcagtttgacacctaggggcatttttgagtgactgtaaatggtactggtgtttgtttgtttgtttttgagacagggtctttgtccctgaggctggagtgcagtggcatgatcgtggctcactacagcctcaacctcccaagctcaagcaatcctcccacctcagcctcctgagtagctggaaccacaggcacatgccaccacgcctggctattttttttttttttttttttttttgtagagatggagatctctctttgttccccaggctggtctcaaactcctgggctcaagcaaccctccaacctcgacctcccaaagtgctgggattacaggcatgtgccactatgtgtggctggtattttatttataatttcagtgtctacatgatcattgctagtatatacaattgtagtaaatacaattgaattttgtatgctttccaccctgcaaacttgctaaactcgcttcttagttctaggagggttgtgtttttttgttgttgttgtttgtagattcattggggttttctatgtagacaacatgtcattggcaaacaaggacagttttctttcttcctttctaatctgtttgccttttatttccttctcttgcctattgcactggctaggactcccagcactatgttaattagcagcagtgagagcagacagctttgccttgtgacagtcttagacaccaagcactgagtttttcaccattaagtacagttggctcttctgtatctgtgtgttccatatccatatatccaaccaaccgctgatcagaaatgttttaaaaacaagaaaaacaatacaaattagtaaacagtacagtatagcaactctttacataacatttacattgtattaggtattctaagtaatctagagatgatgtagcgtgtacgggaggatgtgcataggttatatgcaaatactataccatcttatataaggaatttgagcatccttggattttggcatccttgtggggagtcctggaaccaatccctcagagacaccaaggaacaactgtataatattggctgtaaggttatggttgatgcttttaatcaacttgaagaagttctcctccattcctaattttatgagagttttctcatgaacatgtgttgaattttgtcagatgttttttatgaattagttaatatgatcatgtaatttttcttctttagcctgttgattggagactacattgattggttcccaaatattgagccaaccttatatccccagaataaaccccactaaatcttgatatgcaattatttttatctattactgaattctacttgctatttcattagtgatttttgtatctatattcatgagggatgttggcatgtagttttctttttgttgtttttccttgtctgcatttggtatcagggtaataccaacttcataaaatgaatggggcccaggtgcagtggctcacacctgtaatcccagcactttgggaggccaaggcaggcagatcacttgaggccaggagttcaagaccagcctggctaacatgctaaaaccccggctctactaaaaatacaaaaaattagcckggcttagtggcgggcrcctataatcccagctactcaggaggctgaggcagagaatcacttgagcccaggaggcggaggctgcagagagctgggatcataccactgcactccagcttgggggacagagtgagactcagtctcaaaaaaaaaaaaaaaaaagaatggtagtgttccctcctcttctgttttcttgaagatattgttagaatcatgttgactttttaaacatttggtagaattctctataaatgtttagaaccatcttggcctggacatttcgttttggggagtttttaaattacaaattgacttttgctataggttgtttaaattacctgtttgatattgaatgagttgtagtacctcatgcttctctaggagttggtccattttattgaagatgtcagagttatgtgtgtagagrcatttgtagtgttcccgtattatccttttgatgtctgcagggtctgtagtgatgttccctctttcattcctgatattgacagtctgtgtcttccctctaattgtttctttgtcagtcttgctagaagtttgacaatttcttattttcaaatacctagctctgttttgttgattttctgcattgtttttctgttttctgttaccgggatttctattcccctatctttgtgatttccctccttccttcctttgctatcattgtgggtttactttgctcttcttttcctgggtgctcatggtgggatcttggcttattgagttgagatttttcctctcttcaaatgaaagcccatagtgctataaatttccctctcagcattgctttagtcatgtcccacagctaagttttgtgttgtattttcatttttattgagttcaatgtctttttaattttcccttgagacttcctctttgacccttaagttatttagaagtgtgttgttaagtttccacgtgtttggagatttgtctgctatctttctgttattgatttctactttgatcctcgtgtggtcagaggacatgctctgtatagcctcagttcctttagattgggtgagatttcctgtatagcccaggatatggtcaatcttggtacatgctctgtaggtgcctgaaatgaacatagcactctgctgctgttgggtgaagtggtctgtaaatattcatcatttgatggacttctaaatttatctcaagactctgagatcatttactctcaaaggttatgtgatacgctaccttttccagacaattcctaagtgatctaaacccctgctgagttcaccaagtggcctgtaaaaccctatgatgattcttgttgatgggagccatcttcccccactagtaggtgtgggcctttcttaaggtgagggccttgagctcgcaccagttcaacctatggctgtatgaaaattttctggctgacatttttacgcttgtaccttcaagaaatataacaaaacatcatttttcttcttcttatcaagtcatagaatgctaaaggcagcgggaatctagggtgatctggtctaccctctcgtttgacaggtgaagcaatgaggtgttgcgaagttaaactgattagttttttttaattttttaaatgaaattaatatacgttaattatagaaaatgcataagaaaaaggggaaatgcataagatagasggaagcaaacatttttaaataaaatttatataaaacttataaccaaagatgactactatttttattttggagtatactctcccaatatgttttcaaaagcaggatcactctctatgactgctttaaaatcttttttttgtactttaacaacagacatgaacatttttcaaaatattattyctaatagcaaaatatcattccagatatatgtctgatgatacagttttctcatcatttatttaatgagtctccattgrgtgggcgtgcaggttgtgacagttttctctgtgttaaataacactgtgatgaatatcttttgtgtacatgcatgatgatttcctagaaatgggaccctgggtcagtgcttgtgaacatttttagcttctgagccccattgccaagttggattcttgaaattttttgtttgtttgggcagctttggttttgtttttttgttttcttttgagatggagtttcgctcttgttccccaggctggagtgcaatggcacgatctcagctcaccgcaacctctgcctcccaggttcaagtgattctcctgcctcagcctcccgagtacctgggattacaggcatgcaccaccatgcctggctaattttgtattttttagtagagacggggtttctccatgttggtcaggctggtcycgaactcccgacctcaggtgatctgcctgcctcggcctcccaaagtgctgggattacaggcgtgagccactgcgcccagcgcagctttggttttatttgttttgtttatagtggagggttagacatgaaatcaacatagaagatgaygtaaacttatgactaagcctggtgtgggctctcggtgttctggggcatgagctagaggatggctggagccaggtagagaccgctcccttccttagaatgtcaccttgctgacaaggacagcgctgtgagcatccacaccttcctgtgaggtatctggcattgagcctggtcaggaaacaggaagacaagcaggttccattgagcctgggacctggaccttgtaaagccagccacccagcccagttttacaggccaggcaacaaagggagcaaccggctggacccaggcctgcctcccccgtgcagacccgccgtgagaacaccgtgttctgaattgagacstgccttgcactcactttgtcccagtaattgcccccataaaatagacctggacactaagaggaaacttcccatatttggaaacccagtcctgcctgctttttatagctggtgtcgaggacaagagaaccacaagccgtggccagtctgctgagagaccactgagggacagacgggttgtgggcctggagcagccccggagggaaggagcatttgaaagtggacaggtagarcccaggcccagagagccccagggctgctaccaggaaggccagcgcatccctccaggtaacgggcagctcctcggccacagcctccaccccccaacacgtgggattcgggctgcaatggcctacacatcttttcytcttgtccgtrttccatctgtctttcttctttggtttgtagagagagaagaattaatccagagcgtgctggcgcaggttgcagagcagttctcaaggtacagagtcttctaaacttacaaccagccagagatgggcacatctttctctaagagcgagggcaggccccaggctctgaggctggccttggccggcaagcgtggctgtctcacctgcctggaggagctgcccgcacggtggaagccttctgtggcttctgtaactaagccagcttggatggggcccaggaaacgctcaccttagaccaaagaccatgttgagtgggtgcattagaatgtgagctcgtgaggtcgagaatgttctccaccggctcttctgggatgggagaacaagctataagaattggctccactggaaaataagcttcctcgctgagcttctgtgtagttaggagacttccttttcatcggagtcatcccaacaatcctgacctggataccstattttccatttctcaaactgacttctctgtggcgtcttactgcccaggttaattaaaatagtgaaaagcacagacgggtgggattttttaaaaacctttgaattggccgggtgcggtggctcacgcctgtaatcccagcactttgggaggyggaggcgggcagatcacctgaggtcgggagttcaagaccagcctgaccaacatggagaaaccccgtctctacgaaaaatacaaaattagccgggcgtggtggcacatgcctgtaatcccagctacccgggaggctgaggcaggagaatcacttgaacccgggaggtggaggttgccgtgagccgagatcacgccactgcactccagcctgggcaagagtgacactctgtctcaaaaaacaaaacaaaacaaaaaaacctttgaattgtttaactgactgggttggagcctccagagagcacaacaggtcctccgaaggtgtctgtgcccatcaggggaaggtgcggggactggaccatctcaactgcatgagcagagagagggccatgtgtccaccccagagagcttgggtccactgctcaggcccgaagaagtaaatatgcccaaccagcccagaaaatacacctcatgatactttggtgattctttcctccccatgggacatgatgatttctgaaaagcaagtcctagcatgttggcacctcagaccctcaccagcccacctagaggccttgcccatgcccacagcagggactcagtaggtgtttgcttaaccggttttggctctgagaattttaagggtcatatttactctctcttttctttttcattcctagagcattcaaaatcaatgaactgaaagctgaagttgcaaatcacttggctgtcctagagaaacgcgtggaatgtgagtgacgtttctgtttcctttttgcttctctgtcctttaacctctattcaaattaaccacttggaacrgggaggagttcagtgccgaaggtaaatacaaataaatgtcttttctttgtgaaatacttgaaaattacctttgatgttaacaaaggctagcacagtgactaactaagcattttatttctattttaaaagaagcacagctcatggtataaagcattctttcagccccaaagaataaaaatgaacacacgaagccttccgcacttagcccctctgagaacctctgctgagtgtcttgtctgtgtctttttgtgtgtaaatgaagacattctctgcacactgatcggcaccctgtgggtcataattttttggaatatgtctactaagttgttatctcttggtttctgatacagtctggatgtcccctccacatctcacgttgaaatgtcattcgcaatgttggaggtggggctggtgggaggtgtttgggtcaccaggcagatgcctcctaaatggcttggtgctctccttgagatagtgagttctcgcaagatctggttgtttaaaagcacgtggcatctctctaccctcctgcttctccrttgccttccaccatgattggaggcttctcgaggcctccccaagagccaagcagatgccggcaccaggcttcctgtaaagcccacagaactgggagccaatcaaacctcttttgcttataaattgcccagcctcaggtatctctttatagcaacagaagaacagcctactacagcctccaatcaccaccaaaggaaaagcagaaaaaggactagggagccaaggagtgtcgattcaagtcctgattcaatgatcacaaagctcaaattctgggaagaaaacagcttcaagtcacccaccctttttgtcctcatccataatatcaagatcaatgcttgaattccataggcctcacaattctgtgttccactcacagcttgacaagtgaactctttgtcaatgacaaggcaaaggttaatgattaacaggcactgtatttaccaacttaggaactaaataaacagaatccagacaggataccattaagagttgcagcatcaccaaaaatatctggctgattgactgaatrtcgtcrcttttctttttctttttttgagagacagagtcttgctctgttgtccaggctggagtgcaatagcacaatcttggctcaatgcaaccttcgcctcctgggttcaagtgattctcctgaaacatgatttacatagtcagatttatacttttcaaagtgtgttgacatttctaaaaatgtatgtggtcactggatcttcaagacagtttcattttccccattgtcaacgaggaagccacagagaggttaggtaacctcaagttcactcagcaaattagaaaaataaataaagctgggactggcacccagggtcctggccgggctgctgtcacdgcctgctacctgcccttctggaacgagtcacttccctgcacacctggctgaagaggaccaggcactccatgaggattccttgataacgcaggttagaaagctaaagctgcaagcaacagaaactgatcgtggctgctttcaacagaaaaggagtttttccctaaaggattttgggaagcttccccagatccccaggaaggcttgggaacagggctcagaggttgtgcagcagcaacaattccccaaatcccgtgcagagctgatgctgtgcggatgcctgtgctgccgtctctgagccccagatgcggcaccagctcccctgtactcctcactctggacctaggtcccccggaggctccacaaccacttatgcagatatcaggctgcttctccatgtcactggctacaggttcaaaatctagacagagccaggccrcgcacccaaggtctagctgcaaggcaggccccacgaagggaggctgtgagtatcctgaagctgcctcacaaagcaccacagactgggaggcttaagcatcaaaaactgactctttcacagctctgcaggccagaagtcagaaatcaaggcatgagcatgactggctatttctggaggctctgaggggccctggttccatgcctgtctcctagaaccttgtggttcccagcaatccttaccgttcctgagcttggaaggctacattgctataatctctgcctgtgtctacacgtgatgacattctcccaggatgtctccatgtcaacagtctctctcagctaggtcttataaagatgcctctctttgaatttagggcccaacctaaatccaggatgggcccatctccagatccctaatggattatatctgccaaggacctttttctacataaggtcccattcacaagttccagggagtaggttgtgaacagatctttctggaggacacaattcaacccaccacagcgagtgtttgcatttccatattctgcactgggaggctggctcagctctccaccaagccccatgtcgcagggaattctccaaacttgggtaggggtttgagccaaagcatgcaaaaaaggcttgctgcagagtccccacccctctttacggacacaaaaagccacgcagtcactacggggcgagtgtgcagatgcccgcgggcagcaggtgcctcccacctctcctcctctctccagcacctgggtttttcctcagccttccccatctcctacgccccacctggaagccagtgccagctccccccatgctcttcccggaaagtgcaaacaggcaagttgaagaggccatgtcgtaactctcaaaactcttacagagaattatgtcgcccacaacaagatgaatagtaaccctgtgtgtctttgaataactgaccctggaaaataaccatcaagccagaagaaaagtgttcctattttacctgcaagtggcaggtgagtcgaagaccactgaaggaaatggcccataggaccttcccccctagcctgttctggctgcggaattctccaaaatttctcacttctcagagggaagcatcttcccataaaaccctcagtaaatgcacatagatggcctggaaaaggacaccgctcttgacccaccgagctcaggctcactgcactgaccaaaattcctggcgcttctatgggtaaaaccggttgtgactagttgtactgatttctagcaccagagacctaggactgcagaaatgggattgagggagctcacctctctaaggagtagagaaggaggaacagtctaggagttgtggagggtaagggaggggcttgggtgaggtcaggggggactctcctcagtcctcctggctgccctcctcccctggcatgcaactsacacccccaccccaggaggcagccatgtccagacaggctgtcctcctcctgaactccacctggctttgggctcatcctccccgggcacttctggctgatggctccccactctccagcggatgtgctttagcgggaggtggccaggatgctgcacctgtgctgagccccagagattctgagttccagagacactacaagggcagcagagccktaacccaaagatgcaagagcccagacattttaggaagcttggagggcagaaacggaaagtccttttgaggagagggcctgcagctgaacctctcaygcaggccactgggtaggtgcgcgcccagcttctcagaaggtcagtcccaaccctgcacrgctgccagaagctagccagatggggaaggcggccaggagcctggtccgacaccccgatgcacagggcctgggccagaggcagatgctcccatctacatatgcacacacacatataaacacaaacagagaaaggtgcacatgcrctcacatatacacatgtgaaatcacacaggcatgtcaggatgtcacatatacatgcacacgtgtaagcacccaggcacgtgcagatacattcatatatatgatcacatacccacacatgcgcacacacagctgcttctgctatacatgagctgctgtgagctgttttgttttgtcttgtcttgtttttgttgttgtttgagacggagttttgctctttggcccaggctagagagaagtggcgtgatcttggctcactgcaacctctgccccccgaagacaggacacttctgtctcagcctcccaagtagctgggattatagsygcccgccaccatgtccggctaatttttgtatttttagtagagatggggttccgccatgttggccaggctggtctcgaactcctgacctcaggtgatcgacccgcctcggcctcccaaagtgctgrgattacaggcgtgagccattgtgcccggccaagctgttttctgcctcttgagttaaaggattcatccactagaactggccaccttaaggccatattatattgtggtggacttgtcttaaatggaatttcctgcttcttcttaaatgtataattcctctgaattgaatataaatttcttcatttctcctcattgactttcaaagctcttcttccttttgatatacaaagtttagccttgttcgagagatctgggatttcccttacgttacggattattttgtaaacagaacacccaggctcctcccctcatgtcctggctggaggtgaaacattaaaaagagattttaaagcagggccctttactcccttccttcctggtttgtggccagggcacagggcagctctgctccatccaccctttgtccctgtgctctgggcttggaccaaaacctaaacacagcgtgggccgtggcaggagctgaccggctggggcaaagtttaacacaggccatacaaacagcccagagcctggatgctagaaccaagccttgcttttctctgtcactcmggaagtgtgctctacgcgggctctttagtgaggctcctggaggaagtgttgaaacacaactctattcatacatgtctttaaacagctttcactagctctgtagccaaaggactgggcctgccaggttcccggcctcttgctggagcacagtgaggctggggaaggagcacagcacagagcctcctgagcctcggctcagctctccccgacccccagctcggctctccccaccctccggctcggctctctctgacccccagctcagctcttccccacctgccaggacgatttccccaaagccagcgtctgtcagaaaatcacccttagtttttcctgcaggtggcctgtgacttgtagaagctcacaaaaatctctttcaaagcccttttttgttgctgttttgttttgttttgagacagagtctcactttaatgcagtggagtgcagtggtgtgatcttggcccactgcaacctccacctcccgggttcaagtgattctcccgcctcagcccccagagtagctggaattacaggcagcctgtgaccacgcctggctaatttttgtatttttagtggagacggggtttcattatgttggctggacaagctggtctcaaactcctgacctcaggtgatccacctgccttggcctcccaaagtgctgggattataggcatgagccactgcgcccggcctacagtccttttaagaggacagcccggggtttccagataatactagccccacacacaggcatgtcctagggtccacacctggtcagcgggaataacaggcagccgtgggctgggctcccagccccctagcagggtccagtgggccagggagcctctgctttggtttgtggtgcgtggtctgtgcccgcctgtgttcagcgtttgaaggcagaggagcgggccatgatgggcagagccgacgtccaggctccacrgtagggccgtcctgctgctgtctgcagacctctcaggcttgaggccccccgccccacaggactggcccgctcctccctctggattgaggtggagcagggctggcagtgggtcgaagaggggagctgtggaatcttccccaaagcagccgggtgtcctggaaaggccagggagtgaggaggcaggacccccggggacacaggcacacacatccaccacatgctcacctctgcytcctcctgcagacctccccgccagccccgtcatttcatggcatcttgctttctcttcattgaggaatgcacttttgcaatgttgttactcactatccatctacttggccaacagcctcttcataaacttaattgccacaaattctgcatctctgggatgcaaactagtgaagctgtgctgtgtcacccaggaggcttaattttaacatcacctcaataggtagccagggaagcggatctcggtggactctgcactgtcaatacaaacgctatgcacccatcaaaaaccatgagctggcttaaaacagagccttgtatggacatgggaaaaaaattataggtttgttgcaaactcatttagcagcaaaaatgtgatctgaactgacatgaagcccttggtatttatttatcctgctcagtatgataaatagcattttcctcgggggataaaaagaaaaacgtgagctgcgacagcagccactaacatggggaagggccgtgacctcctgatgagtgaaaatagcaagttagaaaacaacaaattttatcttttaaaattaataatagatatatagatacatagacacacacaggatggatagaagctagatagatacatacatacatagatacatacatagatagatactatatagatatgtaaatagaaagataggtagaggctgggtgcagtggctcatgcctaaagtggttccccagcactttgggaggtgaaggcaggaggattgctttagcccaggagttcaagaccatcctgggcaacatggcaaaaccccatctctacaaaaaatacaaaaattagccaggtgtggcggtgcacccctttagaccctgttattcaggaggctgaagtggcaggatcacttgaacctaggaggtaaaggttgcagtgagctgtgattgttccactgcactccagcctgggtgacagggcaagcccctgtctcaaaaaaaaaaaaagaaaagaaaagaaagataggtagatacatagaatgggtggatagagagatagaacggatagaaaaataggatggataaatagaacataggtagatacataaatatgatgaatgcatagatggatgggtggatggatggatggatggatggatggatggatggatggatgaatggatacatagatgaatggatggatagatagtatataaatggatggatggatagatacacagtaggtaggtaggtagtagatagatagatagatagatagatagatagatagatagatagataaacaggatagatagatagatagatagatagatagatagatagatagataaacaggatgaatatttagaaggctgggagtgggcagaaagcctggaaggacacacattaatacaaataatattaactgagttgttttctgggcccataggatcctagacaagtttttaaatattattctttgaagtgctatttcctacacttcctacaatgataataggatattttatattcagaaaaatgacatttaagacatagtcaatggtccatggaccttggacagagggcccagctgccctgtttgcagtctacaccgcatgcccaacccttccccagatctactcactttcagaatgtgctgccttccacrtgtgarccagactgagctcctttctgccactgatgttgaattgtccatttgctcacrtcagtgtccacgtggcaaatccacagggcrtgggtgggatcctgcagtctagacaaagccaaggagcaccgctggaggccacgttgggcttcccaatccacatgcaaacccaaaatgtgttcttgkgtaccttttctgagaagacagcctgtggcatgcatcagcttccttgaggggcccatgatgctggagaaaacggagacccggctccaaaggagaatgtggactcttagtggttggacaaagacgtcccgacctcagacctcaggtaccctgtgtttccccagcggcagctcatctggactcggccatcacgacagcgaccacactggctccagccacatgcacttccggaccccatgtcctctagctgttgggtagaagaggggtggagaagrtttctgtagcacagaaacacatcagcaggaccagatccaaatattgcactctccagattcttcgtccttctggcagaaagaagcagtgtcccgggaacatgcccctacttgacccctgaccctggaaacgcctcgaaacccacccgggaggctgattccagccagtctgccctgggccactgtactgggagagtttctttccggagctgcagtacttcctttggggtgggaaggagttgttacaaactagccaaaggctctgagttgcttggtttttcctttagaaaacatttgctttttatttttagcagttattcagagccaaacttcatgaaaaggggaatagagtggtatcgtgggagtatccttttgcataaaaactaaggtgtgattacaaagtaacaaagctaatcttttttatttcaattggtttatgaaccaactctaattgaaaagccgtgcaaagctgcttgcttcatggcagcttttctggggtaaacgtgcagtcagccaagggtaaatatcttgaagtttaacgctcgctcggaggcataagctccagtttgtttttggttgaaaaatagtatcctaactgttgaggtacacctttgcagtgggactctgtaactgcccaaggggttcaccctgcctgctacctaaacagagctcattcatcaagacaggggaactgcaatggagaaagagccattcacccagtgccggctgtgcgggagaccagagttttattattcctcaaatcagtctccccgagcattcggggcgcagagtttttaaggataacttagtgggtggkgggaagccagtgagccaggaatgctgattgattggtcagggaggaaatcatagggagttgaagctgtctgcttttttttttttttttttttttttttgagacagagtctcactctgtcccccaggccagagtacagtggcgtgatctcggctcactgcaacctccgcctcccgggttcaagctattctcctgcctcagcctcccgagtagctgggactacaggcactggcacaccatgcccggctaatttttgtatttttagtagagacagggtttcactatattggccaggctggtcttgaactcctgacctcgtgatctgcccacctcagcctcccaaagtgctgggattacaggcgtgagccactgtgcctggctgcagctgtcttcttgcactgagtcagttcctgactggggccagaagaccagacgagccagtttatctatctgggtggtgccagctgatccatcaactgcagggtctccaaaatatctcaagcgctgatcttaggagcaatttagggagggtcagaatctcgtagtctccagctgcgtgactcttaaactgtaatttctaatcctgtggctgttagtctcgtccccaggcaagaagcaggtctgctttgggaaagggctgttacagtctttgtctaaactataaactacaaatgaagtttctcccaaagttagttcagccaaggaatgaacacagacagcttggaggttcgaagcaagatggagcccgctaagttagatctctttcactgtctcagtcataatttggccaaggcagtttcaactccaggaatgtgatcaagtccaagttctgctgatcctcaactttgcctatttatttctcttctgttttaagtcaacactttctcctggtgaaactgctctggaaggacgttccaatgaaaagmttttcccataatgagatcgtaatccttgctgaaaacgctttgccgttcactgcattttaatgctctggcaccacatgtgcccccttttctttttgggataaaagacgcctttgtcccatgtcctcagctggtgcttaggggtatggagcaaaaagtgggtgccagagttgagattcagggagtggagagtggggaggagcttctgccttctgaaaactgcccggatggatgcggtagtgcagcggtggccacggcacatgcctgcgaggatagagtcagttgtggctgagctaagcgcggaagtgcaggcaaaacctgagtatcggcagccagggcaggtgtggggacctctgcactgaggtatattcctccctgggagccacagggagcccttagttaccagccttgagagatcctccacattcgtccgtggtaacccccttgctgtctctctctctgtcaccagtggaaggactaaaagtggtggagattgagaaatgcaagagtgacattaagaagatgagggaggagctggcggccagaagcagcaggtagggtctgcgctggggccacgggcggccgggcctggggagggctccccgtaccagttgggctggggctgtgggctttgtttgcctaaaagaaaggctggtgcagttcggtacagttcaggcttgggagagtgcagtctggaggcagccaccctgcttgcgacctgcttgtcagtggtgtgactttcttctaacaaaagagcacgcatgggccgggtgtggtggctcacgcctgtaatcccagcactttgggaggccgaggtgggaggatcacctgaggacaggagttcaataccggcttggccaacatggtgaaaccccgtctctactaaaaatacaaacggtagccaggcatggtggcacatgcctgtaaccccagctacttgggaagctgaggcgggagaatcgcttgaacccaggaggtggaggttgcagtgagccgagatcgcgccactgcacyccagcctgggctcgacagagcaagactctgtctcaaraaaaaaagagcacatattggagataggggctgggaagacgatttcacagaagaagagtcctcctcctgcagatccaagcctyaggagcaatgtgtccagcttggaataagttgatatccacttttaaagacagaacaagaagaggaaaagcattaggggaggagcctcctgttgcccccagggacccggttccttgtgtgatgttcccactgggttgcattccagcgagggcttcagcactggggacacagaagtcattctcctgggaacaggcatccttcacaggcgcttcggggggcccagtgagctgtgactcgtggggaaaatgccccagtctccacgatgccacctccaaagtcagttttgtgtacagcaggactctttactggagccagggtcaggacacgtgtggatgaaccacgaccaaactggggatggaaatgccggtagtagcaaagagacggcggtgatgatgagcagagygcatgcattgaggcacttactgtgtgcgggcgctgtgcttagtgaggggcacacaggacctgctcacacctccgggctttgcctccatgcccgctggtgccagcccagacaccacaggcatatgatgtggctcatggttccccagagtgccactgcccggcctcagtgggatttaatggggactaatggactgagaaacagccctgtgcaattgcactgagttgtctcagagccacctggcatgctgacgatcattccctgattttgaaattgagggcaatctgcttattgaggaagcgtggcaagtgaaagggtctcagaggcagaaggtgaagggaaagccgacgggcctcatctggtcccctcaaagccccgggggcctggcctcggggtgggcgcagggaggaaggccgagcggaaggaagcaggccttgtctgagccacgtgagagcctgtcctacagggaccgtgccacgtgtctgtcccatgcactcatgggctcatttggagttagggatgtctcagcccaattgacttaggggaagtcaggccatagtttgtggccatggaaagttgtgagtgaacaatccatcttcgtcatccctgtgctggaggctctttaaaggacgggagacagagtctctcatttgtgagccaaggaagagctcccaagttgcacagggacggccacacagctggggtcccaaggctgggacctggcaaggctgggacccggcttggcagcctcagacacacagcaccttcacctgtggcaccgcccttggccgtgggctctacgtggcttggttcagccctctggctgtcccttgcgccccaggtgccatggctgctttggcaggagggtggtgttccagggtggtgctgcctggcagggttcccctctgcccagagccaggcggagatgggttgcctcaagctggggctgcgggtgtagcagggccagcctttccagccccaccagcagcacgaggggawgaggacaaaaactgagttctagtcttcagcctgaaaccagactccctgaacagcggcctctgggccccatatgggttggggaactccaccgccccaaggggtgtgtctggagccaggccatgcctcccgaagctgcccccagctcctcacccacaactgtgtgtccctgagcactttctggaggtgtttgtaggatgcagcctcttatcccttaaacgactgcatttaccgcccacctacagcagcaggagtgagtggtgagacagcctccggcctcacaggtcttgcctctgccgtgcctgatgggcacccgctctgtagaaagcaaggcgagtgctcggatcacacgccgctcctggcgtggtttctggtgtgcactagtcctgcaggtcaggttgaggttgcaggggggaagattatttttatcgaagttgtagtcatttcctggggctgcgtaacgaattctcataaactgggcagcttaaaacaatagaaatgtattcccacatagttctggaggccacaagtccaaaatcaaggtgccagcaggccctgccacctctgaaggccccaggggagggaccttcccggtctctcttggcctctggtggctgccggcggcattctctgcctgcttcttcmcctggtgctcccatccgttctgtccaaattccccctttttgtaaggacacccatcctattggagtaggggtcaccctcctccaggatgacatccccttaactacatctgcaacagtcatgtccccaaatgaggtcaccctcagaggcagcagggttaggacttcaacatacaacttttggggggagatgtacttcagcccataacacaccacgtgggaggataacaccgatttcagagcttgcagaggaagccgccaggaactccagtgagacatcagcccccaggtgcctgtcaggcacgccgggctgtggggggcacctgggcccatctgagtaacggaggcgcatccgcacttcccccaggagtacatttttagaacccacagcgccataaaccaaagacaaggagacttcctggtgccccgtcagcttctggaggcgacgttctcggctgacagctctggcagcctcccctgtaggtgagagacaggtaaatgggactcttgcttccaaaacggaacagggtaaaaattctcaagcgttgtcgacacattgagaaaaaacaaatccagcctcctgggctctggtctcatccccagccgcgtcatgtgccccaggccggcgttgccacacatgaaaccccttcctgtttttctatgtagaaaggaactcagaatagagacactgagatattcgtgttgtcccttttgtctttgtcaacagcagagttacatcttactcatgagagccctgtagcaatgtggggaccctgggaccagtctcagttaagctggaacttccccggatgactggggagaggagctgcaaaaggcagggtgggggtggggggccttcccgagatggcagcccagccagaggccagcgttcttgcctctgggaagagaataaaggccccagacagggtggagctagctcagccccgtgccacacaaatggccagtgtgagcctgaaatgtggagctacattcagcccacatagcacaccctggtggggcctcggagccaggggtatggatccaccagaagctgccccttgggaacagcagtggcatcggggtccggcacacagcacccgggagcaggtggccgtcccctgacactcacgggctaggtttctcctgcttttccctcaaagaggacagaggtccaactgccagcttacatttagggcaggggcaggggcaggtctaccccaggggccacggccactctggcccccagcactgtgccaggcagagagcagagcatggaatatggggttcacccagagctggggagtctgcaggagcctggggtggcaactgagggctcagcgttcatcccaaacaaatggccttgcccactggcctaagccccagagaagggggatggggaccccaggaaatgaaagcaaagataagctccaaataggatgaaaagaaagagctccatgccagctgctctgtttgctgaagacgctggttcccgtggcagcggagcgcagagagaggggctgcctggccaggcagggtcagcgggccccagcagaccctcctctgctcccagctctggtatctgcaaggaaacagcgggattcgamcagtcaaactgtcttgctcggtgaagatttccataaccctcctggggaatgcaggagacttacagagacagcacatgtgcgaatgtttacacaaaacaggttaaaagcagcgaagaaatcatcatcatgccatctattttttttaactacgcagaaaacgttcgttacttctcagaaatgtgtaaatggaatttctcgtttaatggatgacaatggaaatcatttgattggtgcattttgttggttggttttgttaatactttgctgaatctgttagcgttcccccttacacatcaaactgtggtagcaactctgatgggttttgcaagcatgaaacagagggaagggctaccaaatggatctcygtggagcggtggttatcacggggaagagacggcagcatgccgagaaaataacacygaagcctctttttccagaaaggaaatagattgattattctagttttgaaaatagcacaggctcattggaaaacctccaaactacactgatgggagctgaagggtgcacaccgatcatgacaacagccggcaatgtccccccagtttaaacctggacacgaggccttctagatgtttttctgtgcatagataccttgttttgaaaaacaactaaaacatgcgttgtgtagtctttttttttactagtggcattgtgagcaataaatagattaaattttaaccagcgtacagctcatagattttcccagaaggccacaatcaagcactctttttaaacctaccgaatgtgctctttcttcctcgtagcgtggcattttttggcacttgctttcagtacatactgtgcatagcattcttattttcccttttcatgtcaagtttcctcacttggcataatatccgtgatgatcctcctaatggcataatagtccatcatgcggaggcactgtgctggtttaaaccgcttcccgtcttgggacattcaggtggcttctagtcggttttgtgtttttgttacagcagatcacaccacggtgaatatctgtgtgcatagagctgtttgttcctgtttaattcttggcttaagataaattccccaggatagatatgtgggcttaaaggatacgaatttctatatggctcttactgggcagtattaacttgctctcccagaagaaggggctttatttacaaatcgcaggagcttctgctgcatttagctccctgagtgcccccatagcctggtgaatgtcacacaagccaggcgtgacccccacccaccatcgtccaagtacacagggagcctgttcacttccaagcaagttcacacccatagggtgtgaacccagatcggcccagccccctggtgcactctgctgcaggggcccaagagcagccagacctcctggggcagctgctcctcattcagcctctggggaccaccctgaagccakcacactgcccaaccggaaggtggctttcctctgaaacatgcctggctcactttgccctgctcctatgtgggatacctcgataccaagtgctaaacaaaaacagagtcagacagaaaactcatctgctaacattacatgtaacagggaaagttggaaacattctaaaagtccatcactggggactggattgctaacgtgtgctatggccacaccctggagaaacttggaaaatgaagctaagctctgtggagcaacttgggatgagttcatgatatgttagatgacaaagcaggttgcagcagactgactttggtgcaattccatctttgtttaaaagtacaaaggggctgggcgcagtggctcacgcctgtaatcccaacactttgggaggccaaggcaggtggatcgcttgaagtcaggagttcacgaccagcctggccaacatggtgaaaccccgtctctactaaaagtacaaaaattagtcaggtgtggcagcatgcacctgtaatcccagctactcaggaggctgaagcacgagaattgcttaaacccaggaggcagaggttgcggtgagcaaagattgcgccactgcactccagcctgggcaacagagtgagactctgtctcaaaaataaataaataaataaaaattttaaaaagtacaaaggggcggggtgcagtgactcacacctgtcatcccaatactttgggaggctgaggcagaaggatcgtttgaacctaggagttcaagaccagcctgggtaacatagcaagaccctatctctacaaaaaataaaaattaaaatattgttaaaaggtaaaagcggccacccatgtgtgtccacacttcaaaacattctggaaagatacaccaaactattagaagtgatttccagagtatgggatttagggaaataaatgggtaaagtgaggacttcggttttcatattttggtgtttttttttttactttactcttgtgttgtttagattttttagaatgtttttcttttgaaaacagcttctaaaagagaagatagccctcaacatctgacttttttttcttttttttttgagatggagtttcgctcttgttgcccagactggccaggctggcgtgcagtggcacaatctctgctcactgcaacctccgcctcctgggttcaagcgattctcctgccttagcctcccgagtagctgggactacaggcacacgccaccacgcccagctaatttttgtattattattatttttttaatagagatgaggtttcaccatgttggccaggatggtctcgatctcctgacctcatgatcatcccgcctcgacttcccaaagtgctgggattgcaggcatgagccaccacgcccagccccaacatctgactttctgtgtgttttccaagagtctagtgtgaggtcagaggtcagacaggtcatcagggattttgcttcgagtgagttgctgctgccctgactcctctcccayagcaaataagaccacacggggctygggggttgggtttgtcgcttgcttttgctgtgctgagggcttcaccagactgaaacagcaggaccacagctcatctctgctccttctctctaggaccaactgcccctgtaagtacagttttttggataaccacaagaagttgactcctcgacgcgatgttcccacttaccccaaggtaagatgagattccggcccagaagaagctgcagctgtgtccccagccccacgcccagccctgtggccctgcggccagaccctgctgtgtgtacgttcacatcaaccgcccctcccagccctgggccgctgacggtgcgggttactttaaggcaaagtattttttctctttgacatttgtttagcaaaagtgatcccagaccataccttcccctgcaaggacataacagctccgtgctgctgtctgcccggccccgggagctgacctgggtagacagtttttacactcaaacgttactggaaagaactttaacgtttaactgaatttttaaaaatccattccattggcccttgtctctgagcaattcttagttgtcctggcaagttttgctcttttgcacaaaagtgttcttagttctaagagaagctgtgacgttggtgaagtagcaatggcatttttgaaataacgacaaaaggagggtctcgagttgccggtcacccgctcaacgccttcagctgggaagcaggcaaaatcccggcccacctgcttttttttttttttttttttgagacagtgtttcactcttgttgcccaggctggagtgcartggcacaatcttggctcactgcaacctctgcctcctgggttcaagcaattctcctacctcagcctcccaagtagggggcrttacaggtgcccgtcaccatgcccagttaatttttttgtatttttttagtagagacagggtttcaccatgttggccaggctggtcttgaacttgtgacctcaggtgatccgcctgcctcggcctcccaaagtgctgagccaccgcacccggcccggcccacctgatttgtaatgtgctctcatgctaagattcagggggcacagcttccagagacagcagaggcctgggctaaacacaggtgggctctgccactgcctgcggttcaagtgatggcagagccttccacagcctccatgtaggccactggtgtccattagtccgtgattctatccacgcagttccaaacaatgtcctggatattgtcaggttctgggtggatttggggggtttttgtttttttcttttgatactgagtctcactctgtcacccaggctggagtgcaatggcaygatctcagctcactgcaacctctgcctcttgggttcaagtgattctcctgcctcagcctgagtaggtgggattacaggcacscaccgccatgcccggctaattactgtatttttagtagagacggtgtttcaccrtgttggccaggttggtcttgaactcctgacctcaggtgatccacccacctcagcmtcccaaagtgctgggattacaggcgtaagccagcccagcctcatctgagatttttgaatggagactagtgcctttttccattggaaaatatgccccgcgcttctcaggatcctgtcccagggagccgtgaagcacagcctagatccaaaataaaaggtgtcagccctccagatcygtccccttacaaaaaacagaaaaacaaatatccagtaagacctaggagaagacagtgtgcaataccaaagcagtgttcttgtcttctgtatagaaccacagccytctgtccttgtgacagcttaacctaaagcctgatgtcctcagaagcaacccaggggcaccggccccatcagcaggcctgctcttctagctctcggcagaarccaggaatgggttccagacaggagcatctcagaataacttcttaggtggtatctgaatttatgccaagtgaattttacccccrcacttcactttattgccctttttttattattatttttgagatggagtctcactctgtcgcccaggctggtgtgcagtggcacgatcttggctcactgcaacctccmcctcctgggttcaagcaattctcccrcctcaggctcccaagtagctgggattacaggcacctgccatcatgcctggctaatttttgtatttttgtagagtcgggattccaccatgtttgccaggttggtcttgaactcctgacctcaggtgatccgctcgcctcggcttcccaaagcactgggattacaagcatgagccaccatgcccagctattgtccattttatcatcgggcttgttgaggtctaatttacatgcagtaaagttatttaggcttggagtacagtgaattttgacaaacttgtttagtcctgtgacctccaccacaagcgagatatggaacatttctgtcaccccaaaccctcccctctgctccctcaccctgcctctggcatccaccgatgggatctccacccgtagcattggccctttccagaagtatgtggcctgtgagtctgacgcaggtgccttagaaagagaacgggagaagctgggtgcggtggctcacacctgtaatcccaacacttggggaggccaaggcgggtggatcacctgaggtcaggagttcgagaccagcctggccaacatcgtgaactccccatctctactaaaattacaaaaattagccaggcatggtggcgggcgcctgcagtcccagctactcaggaggctgaggcacgagaatcacttgaacccaggaggcagaggttgccgtgagccaagatcgcaccactgcactccagcgtgggcaagagtgagactctatctcaaaaaaaaaaaaaaaaagaaagaaagaaaaagaaagagaacgggagaaagaggagaaatatctcagcatgcacatcactgtcacaggcccacggcgcctggttaacacggaactcctgtcctttctagtacctgctctctccagagaccatcgaggccctgcggaagccgacctttgacgtctggctttgggagcccaatgaggtaagtgcggggcttgcaggcaccacgtcccagggggaggcagctcaggatcttggacgccagtgggaccacccccatcgctcttcctccttcttgctttytcctcttctttttaaagactgaaaaaaaaaaacaaaacttgttttgccaggttttagttgaaactaactaacactttatagcagggcccaggagacttcacagcaaggggattctgtgagtgggggagacggctgtcaggggcagggaggctccacccagggctcctgayggcgctgggccccccgagccatctgctcatcctgcagaccctcatgcacgccggtggcagccccgtgctgcagaacacccctgccaggagcaaatctctcctcaaggaaggggctgcggtcagagtgctctgctctgagagcagtgyctgcaaaggcaaggcacaggcaaccggctgccccagataagtggacatgtgggattccgggaactgtgtcaccttctgcagcaaggcttgaggccaggaattccacactagcctgagtgatatgatttggctgtgtccccacccaaatctcaccctgaattgtcataatccccacgtgtcaagggcagggccaggtggagatcttgaatcatgggggcagttttccccatactgttctcgtgatagtgagtaagtctcacgagatctgatggttttataaatgggggattgtcttttgcctgccgccatttaagtgactttctccttctctgccattctccatgattgtgaggcctccgcagccatgtggaactgtgagtcccttaagactctttttctttataagttacccagtctcaggtatgtctttattaacagtgtgagaacagactaataagctgggcaacatagcaagacctcgtcgctacaaaaaaaaggtgttaaaattcctatttgctgaaaaatacaagaatggggaattttttgtttcatctcattggctaatagaccccctcttttcacaccccaaaaaatgaaaaagttccctcattgcagacctcggcctcagctgttttcaacgcaccaaaatctaaggacgttttcctgcttgtcagcaacacagaaaatgcacaaggctcctcagcaagctcacctgtgctctttgacaagctcggccgcagcgatgtctctgcaaagggcagaaagtgggctcttgcctcttggcacccctgaggccaggctgctgacacctggggcactgccctctcctaagtgaacctcttttcatgtgcatggtctcccagcaggagaaaaactgcagcaccagccagaaaagcaaagctccagcctccactccccagctcagttcacccaagagcagcaggcggccagtcccaggggctgcactgctgcaaacctgctcaaaacctccagccgccacgtgkcaacttgctccccagctctgagagtgcaggaccggggcgcagagacgacagaagaggctttaaatatgcagaatgactgtctaggtcaacgcacaaaargaaagggccccaggtgtgggagatgcaaggggtgagagggaaagctcagaagagacgtgttggagctgctggcctgcagcagctcccagggtccctgcacagctgctgagattgggcagagcaagtacacagcaagtagacaccgcagacagttagagcacactgactcctgctcccagcctgtgggcaaccgccgcacctcagcatcatgtagaaaaatcaccatccccaaagtcattttgacctcagcctgctgggaggaagagccaagccaggggccactgatggcaaagcacctgcgtggaaactggcactcgctgtcttttctgccaccttctaccagggaaccctttgagcacgggccactgtgactggggaggtggggcttgccccacgaagctgggggatctgtgtctccataatagaaaggccacctctctgtcctctgatcacagagtggattcacagctgctctcgsggctggcaggtgggcaaggcagacagctcccggcagctggactcagcctctgggtggcatctcccacggcccgtggctcctgcccagcagatctcaagggcactccaggagaccgatgagggttccagtgcttccaagaagtatctagctgcctgtgtgtgagaatgcagagatgcccaagacaggagccttggcctctggcagatctagggatgccaggaattttggagtgtgagtggcaaagagggacaactaaagggacacacatgaaaacagcccactcggccccacaaaactgcatctggccacgcatgaggcacctggcactcagagaacgtcagggcgcctaaaagtgatcacctccctcccttccagcaggggcgcccccrcttttctccgagtggtttggcccagtgtcctgcccatcacaaaccagacagaggacatgacttcaggctgctgtgtcctcccatgtgttagggcctccgagggcccagggctgtggcccgtgagcgtggcctgcctctatcctccgagggcccagggctgtggcccgtgagcgtggcctgcctctatcctccgagggcccagggctgtggcccgtgagcatggcccgcctctatcaagtgcagagctggaaggctgcaggagcctcccccgtcatctcatgagtcccccactcacgaccatgcagcccactcagaccacgacctgccgccacatgcgggaactgctggctccctcgtgcccgcccggggctgaggactgcacgtgcagccacagatgcatccggccctcctgccccacagcctctatgaaggccacataaatggcaccaagtgtctctgtctgccgatcagcatcccctcttggcttcacagcagacgcatctgcctttcrggactgccttgaacaacatctgggctggtcaggtggagagcgaggagtttccaggttgcagcccctatggtcctgagggctggcgtccaggatggtgggggtccagcagctctgggcagcgaggcccctggctgggtgatccaggtggcagctgaccagtggcctgggagccagccctcctgtcctcacgtggggccccatctccaaaagccagtgcagtgccctgcacattatccaacctacatctgtactgtctccccaaggaaaacgagtgtgtggttcacgtgctttaaggacgtttcccaggtgacattccaagctcccatctgtggccgcaagtgggggagtttccagttttccagatrgattttctgccatgccagagaaccctccgcctccttcagagccatctcatcaatgcagtgatcgcaagcttcgatttacaaaaactcgcctcccttgcagcatttccaggtttcacacacagcgwaacaagtaaaaatggatttttgggcagcacgcctgtcctagtttgctgaggctgccataacaaagtaccagagactggggtggcgtcagcagcaaaagttgattcctcagttctggagctggaagtccaggatcaaggtgctgccaggttcggcttctccggaggcctcggtccctggtctgggaccttcttgctggggcctcggtccctggtgtgggaccttcttgctgggacctcggtccctggtgtgggaccttcttcctggccagcaagatggccgccttcttgctgggtcctcatgtggcctgttctctcggcacatgcatcccaggtgctcttcctcctctaatgaagacactagtcccatgggaccaaggcctcaccctgactagatggaaacttcattacctccgtaaaggccccgtctccaaatagccccactggggtcggggctttaccatgttgacctggggaagggggcagttcagttcgtaacatgcccttttgggaggagaaagtcaggcaatgagcagacacaggcaggaagccacgccgggctccagcagggatggcccagtgccctgyacaggcagcaggcagctgggctggaggtgggccctgggtggaggacacctaccaggtgtgtctaaactgcccctttcctacacatcttccttcgcactgggctcgccacccaagacctgctttttccagaaagcaaagcctactttggtcaaactctcatttttaaaaatcacttcatcttttcctccctaacttaattagctccaaagcactgagctgtattgaaatagatcaccacaatgacaatcctctttgggactgaaaacaaaatctatttcaacttgaacagggatattgatagaagacagggctccatgaaaaagggttaggaggagccgcttgctggggcaggggccgcatctgggcactgcagttaagatgttaaagtgtcttcggtcccagggggccgcagatgaacacagttcagcgtttctggatgtaaatcgtcaaagctccttcgatccccagcctcgggcaaggaaagggcctttctctctgtgatgccacctgtgctcaggtgtgcactggatggaactgtgtcctagacccctcagctgtgatattgatccgctgagattgtttttcatctgtagaaatcaataaattcctttttggtgcagtgttttgtgaacgggtgcactctctcacccggtcgctgtcctaagaaytctccttgacttcggaactggccctccacgccccaggatccacctgccaggagacccccagtgtgctctcaaacccccacccatctgagtggcctggaaaggctggtctgaagacctctcttcccatgtctgccgaccaggctttgctctccagggactttctgggagggggagarcccacctcctgccaacggccctgctggcactccgaggacagcagagggaaggaagccaggggctggggagccggccacacaactgcccagtgcctatccttctcctgtgcccacagatgctgagctgcctggagcacatgtaccacgacctcgggctggtcagggacttcagcatcaaccctgtcaccctcaggaggtggctggtgagtgccaaacccgccttcggttcttcctgggcacgtggtttcatccagttccacaggaatggagggaatggatcaccagggcaccttccggatggcactgcgctccctgtgagcagaggtgacatttccccgggagttctgtgaggacactcagcctgtctctgttcctccttccaycaaaaccttctttacgcccgagctactcctgctctgataagcaaggagtagcttatcagtgagactctgccatcatcaagcaaagcagcatgtcctaaagcagcggtgtgtgggagcgtgtgtgtgtgtgtgggagcgtgtgtgtgtgtgagagtgagtatgggggtgtggatgtgagtgtgtgtgagtgtggggtgtggatgtgagcatgggggtgtctgcatgtgtttgtgagtgggtgtgtggatgtaaatgtgtgggagcgtgtgtgtgtgtgagtgtggggtgtgggtgtgagcatgggggtatctgagtttacgggtgggtgtgtgtgaatgtgtggtgggagtgtgtggggtgggagtaggagtgtggaggtgtgtctgtgtgtgtcagtgtggatgtgtgcatgtgtatatctggatgtggggtgtgtctgtgtgtgggtgtgtgtgagggtgtgtgtgcatgtgtgtatctgtggatgtgaggtgtgtgtgcatgtgtgtatctggatgtgggggtgtgtgagggtggatgtgtgcatgtgtgtgtgtggatgtggggtgtgtgagtgtgtggtgtgtgagtgggtgtgtgcatgtgggtgtctgcctgtgtgaatatgtttggcagcaggtttttttaatgaaatattgctcagaaccaaatattaaaagcctattaaaggtttcatggtgactggggacccagagctccctcttggagtctcccctccccccatcccctaactttatgccccactgtggctcctcagacacctccggggagaccccagtccttgactgcagggtgaaacccctggtgggagctctgtccccacacctgccccgggtgccgtggtgtggcccgctggacgttctcagggtccctgtgtcacctcattggtacctgtggtaaacctggaacactgttgacctctggttgggatgagggtttggcagagaatgttcaaaccagcgcacagccttctgggtggctttgggaggagaggtgggcgggcccaggcacagggtgactcggaccccctgcctcccgcagttctgygtccacgacaactacagaaacaaccccttccacaacttccggcactgcttctgcgtggcccagatgatgtacagcatggtctggctctgcagtctccaggtgggtcctgcccgctgcacacccagacctctactctcgggggtcagacggaggcccccttccagggagcrgcagccccatcccaccaagagagccacaggcgtggggtccccagccgctccgcccctcctagggacgcacccctgcccaccgttgtcagtcaccccatgggcgaggctgctcctaggattacgagagcaggtgagtccccgacctggtcacccccccaacccccacaggcaggccgatcctctcccaccatgccaggagatgccagatggctgcaggggcctttgtcccccgcttaccactcacccaattccaccccccctcaccccatcccaccctccgagtgaagagagcaaacacctacrccctgttttccaatccaggagaagttctcacaaacggatatcctgatcctaatgacagcggccatctgccacgatctggaccatcccggctacaacaacacgtatgtacaggattttctctttttttccttttaaaaggcaccctggctactggagggaacctgtcagcccaaccctcagagcagttcccagatggagctgtcaacgacggcctcccagcccccaactctgcctccactgacacagctcctggcttctggactttgcccagggccttgggtctccccggagtaggaactttcaggattatcaaaccccaggggstctttcccactcctgtgcgggcctggcttcaggctcaggtgcacggcagatccctggccccgccggcgccttctccaccccaggcagggagcaacacctgtccgcatgcagggatgggggctccacacccccctctcaggagctcgcctctccctgggcaggctcccagctggcttccgcagggaaagcacaggcaggagccagaagagagcagaagagggggagaagagggactgcagagggacaggaggtgggagtgaggtgtccctcgtggggccagggatcagaaggacagaccgttgctccactcctgcctccacaggcacagagttccgccccatgtggcggacaaggtccaggccatgggcttgggtctgtgtcctcagtggcgcagcagctctctctgttgaactgtgtgtttgtgtgatgtcatcacatgcctgagagctctgctgccatgtgtcagcgcctagtgggttcygaggtgtggctgtcagcgctcctcccggggccatcaccatgcacacccatctgttccccttttgctcatttcacactcacagtggccggcacagcacaggtcagcagaggccttgaccacagcatcccagtgaacctcagcctcgttctgcccacctgcctctggcacctggtgacrtttgataatytyacaagaggccgtgatgcctcagggcctgtcccagggagcatgccgcttcctcagaggtgtctgtctggtgggactgcmsgagcatggggacgtgcagttgcaggggcagctgagcggcaggagggacctcctggccaggccagggcacaggcagctcccccagcccccacggcaccttctcctgactctacttgctccacttacatggctgggtgttgctccccsgtgcaggtacctggtgagggcgcctgagtctcccctcactctctccttgcctcccaggtaccagatcaatgcccgcacagagctggcggtccgctacaatgacatctcaccgctggagaaccaccactgcgccgtggccttccagatcctcgccgagcctgagtgcaacatcttctccaacatcccacctgatgggttcaagcagatccgacaggtgtgtggggtgagggccctcccaccggagtgggggcacattcagggacagagcagcccccactctccattggctggaagctcccagaagctcctggccacagcagtgccctggggacccaagggaacccctccctccttcctcacctcctccagggcccagagtggmgccccaaaaagagggtaccctcgccatgcgcacgtgyatcccactgacctgcacttcccagcctgtatttaattcagccttcactggctccctttgagataaatcctttgtccctcttccagcccaagaaactgaggcttagcaaaggtagggagcctgcccaaggaggggacaggccctggacagacacatctgctgcatccaacataggagagctgccccctgccccataaccccagctgctgtcacctgccaccyacagcccagtcagcccccttccttttatttatttttttttcttttgagacagagtctcgctctgttgcccaggctggagtgtaatggcaggatctcggctcactgcaacctccacctcctgggttcaagcaattctcctgcctcagcctcccaaatagctgggattacaggcatgcgccaccaagccggctaattttcggtatttttaatagagacggggtttcatcatgttggccaggctggtcttgaactccagacctyaggtgatccacctgcctcgacctcccaaagtgctgggattacaggtgtgagccaccacgcccggccaccccttccattttagataagggggctttakgcctctcagggcgtgatgggaggagagtgagaggatatctgcgtgagaggaagatgacctggtccacctgccccagacaaacacctccagctcaccgaaataacgccccattccacacgggaattcctcatcaaaccctcactctctgacatttgcaggggagggaagctctcggagtaaaccctgggagaaatgtgttgggttgaatagcagcgtccttcaaacaaggtccacctcccgtgaatgtgatcttatttggaaaagggtctttgcatttgtacttgttaagatttccagataagatcagtgtggattgtctaagggggccgtaaatccaaagactagtgtccttggacgaggagacagagtagaaaacagcccagacacagaggagaaggccgcatgaagacgcagtgattggagatttgagtgaygcagccccaaactaagggacttcggggcccccaggagcaggaggagacaaggaaggaccctcccctggagtcttctttgagagcagggccctgcccacactttgatcttggttctggcttccagaactgtgagagaatgagtttgttgttttaagccgcctagtttgtggtactttgtgtggcggccccaggacactcacccagggcaccgtcttctgcggttccacaaggcagacctcagccattcgaagtctaagtggcttccttccagaggcagcaasaaagactgcctggacttcagcactgggaagatactcaccaccctccmggcgtgctgctgagcctccctttatcagagagcagcagcctcttctaccatggctttccaatttgtctacgcttccaggaagttcaaagcccagtgtaaaaaactgaagtcagtgaagcatttggggaagctccgaggaagcagcatgctccctgggacggggccctgaggcatcacggcctcttgcgaaattgtcaaatgccaccatgtgccagaggcagaggtgggcagaaccaggctgtggttcattgggatgctgtggtcaaggcctctgctggcctgtgctgtgccagccactgtgagtgtgaaatgagcaggagaacagatgggtgtgcatggtgatggccccgggaggagcgccgacagccgcacctcagaacccactcggcgctgacatacggcggcagcgctctcgggcctgtgatgacatcattgcacaaacatacacaattcaatagacaatttacagtcattattgaatcactggttcccagtacagttatctcccctttatctataggctctctggcctctcctccatgtttgtgcccctccccaccctgcaagcaggtgccctgtgtggctacgataagctgtggcaaatcttcgtctgcagtaggtcaaggagcaaccgtgaagagagaacgctgcatctgccactgctaccccagtggggagctcctccagggacaggacctggggaatcaaagcaagtgaacgccccttagtgtaggcctcgtcccactgagccatgtcggagagcatcccgcaagagaaggaggcggcacctgattggaggagcagccgctctgcacaggggatcgttctcgtgcccatccaccgtggggacacaccagcattggcctgcttcaaatgcttcactgactgcaaaatatgactctcctctgggggtaaaattagttgtcccacttttttaaaaatatattttgtcatggaagatttcaggaataactgaataaatgcttcactaataacacaattaaatgtttacaggaaaattgaatwattcaagatacaagtgatccccccmaaaaaatatatatatatacagttgaaatgacctagattgatgggtttgggttttgtatctgatgcttgttgttttattttcttggaagaggaaaacatcatacctggcacagagatgtgttctgtaaatgcttgtggggtgggtgggtggatggatggatggatggatggatggatggatgratgggtggatgggtggatggacaaatggatggaagggtggatggatggatgggtggatgggtggatgaatggacagatggataaatgggtggaaggatggatggataaatggatggaagggcagatggatgggtggatgggtagatggatggaggatgaatgggtggatggatggatgaatggatgggtttttgggtgggcagatggatgtgtggacaaatggatgggtgatggatgcacatatgaatcggaataagagatacatgaaataatgtgtgcagggggctcagtacacagtaggcctccgctgaataattgttcagactatacccgtgttaacacgttgttctctcgctatttagggaatgatcacattaatcttggccactgacatggcaagacatgcagaaattatggattctttcaaagagaaaatggagaattttgactacagcaacgaggagcacatgaccctggtgagtggcttattctgcctgggtgggcagccaggcggtgggctggcgaagcaggtcatccatccagctcacactggaagccaagaagctgaaattattagtcttcttggaacaaggtgtctataaatctggttttcaaggtcatgactcttactaggaaagtccgggcagggcctccctcctgatgggnnctccttcatggtcagaggcagcattctcccattcctcyatctcttttggatttgaaggagataagtgggtgaaggccgtgcatctcgctctgctttccagagaataaaaccagctctcccatgaaggcacagccccagcatggcactctgaaagcccacctatgtgggggcaactccaacacagctcccgctccccargccagcatcccccaccaggcccacaccrtagccyagcacccctccataaccaggacaaggtggccagagaaggggtagggggcctcccccatgagaaggtgcacttaggttgcccagcatctgccttttggaaaggacaggcactgggcacaccaaggcacacaaggaccagagcacgactcatgcctggaatccagcactttgggaggccacggcaggaggattgcttgagtccaaaagtttgagaccagtctgagcaatattagcaagactccatctccacaaaaaaagaaagaaaaataaaaaaatcagtgcatatctgtggtcccaactgcttgggaggcagaggtgggaggatcgctggagcccaggtccaggctgcagtgagccatggtcgttccactgcactccagcctgggcaacagagcaagggtctgtctcagataacagagagagagagaggtgcatgagaactgccctcccggccttcagagagaaagctggttttgtggagccttgtctaagcatcaggtgcacccctggcattcttactctgaaatttgattatctgtttaaaatcaatagcatcactttccacctccagagaggttgaaagatagggaactctcggctcaggctgaccttctaaccatccagtcccagtaggtagagtcattaggactcatcgctctctggagctgaggtgcagttaattcccaaagactgtgcgagaggatgggagctcccgcaggcaagggctggacagcaggcaaacctccccaggccagggccaccagaagccccttccctaagagggaaacagtcacatagagcggcttcctggcaagcaagtttcttgctcctgaaaaaccaagggaaggagggaggcgccgccttgtcctctaagatatgaggaaggcagagatggacctgcagtcaggggtgacccaggccccgccgatgccttcctcctctgaggtgggaggagaggtcagggaagagacggggaggggcaggatgccagaggatcgggtgccaggtggtcaggacaagtgaacccagctgaaggtccccactcccaccccacccccagccttacacactgcagctgtgcagaccagaggcaaagcgaggctcagagcccagggttccgtttatcccaacgacctgcaccgcggggtcagatgacaagcagcacggccaggcatcgtctcactgctacggagccccagacggggctttatgaacacgggtggaggacagaggttggggtaaggtctcgggggaaaggttctgattcaaaatgggccccaatagggaggcctctgaggatagtgcgggccagcgtgggaggtgtgaggtgcagggagtgtggccggcagggcctgggaccttgaccttccccagagacactgctgccctggccctgccctaggtctggtgtcgggacagctccactgaggccggccaggcacaggctagtcattgcctctgatctggagccggactccacagaggagtcaaagaaaggcctgaatggcttcctgggaactgatagggcagggaaaggaagggcgaccacagcaggatcccttcgaggtcctgccgaggttggaaggcaggatccaccaagcatcatgcagactccgagctgaactgagctgctcctcacctagtcacgttccccaaaccagcaggtgcagcccgcagcccgggggcatgtgcctcagctgggctttcctgtctaatcmgcttcagagcctggatggcaaccaacactttggtctggaaacctggtgattccagacactcatttgtgcccggtgcaggcagggccacgggacgccagccctccacctcttgtcctatggcgacatccgggctagtttgggtggaagctgctgcattcctgggcctgccctatctcctcctgaagctcctatggcatgcccaaccctggccaagctgagacagagctacctgtcccctgggaagatgagcaatgcacccacctagggaacagcagaaaatagggggtgaccaggcacagggcagtgcttcaggggatatcacctgggctggggtggccagaaaggctggaaggaggggacccaaacargaccttgaaggttcattctccattgagaagggagcctgtcctccctgaaggcagccaagctcagttgcatggtccagcaggtcctccgtctcttcctgcctgtaatggcaagtccagacccgagcagcagcagcaggcccgtgttctacctcctgttacctcaattccaaaatctcttctttcagctgaagatgattttgataaaatgctgtgatatctctaacgaggtccgtccaatggaagtcgcagagccttgggtggactgtttattagaggaatattttatgcaggtaagagtcttgcagagcaatcaagcctccagccactcttattagccccacttagtaagggtttgcgttaaacgagcacgccwgggtggtcccgcatattccccgggctgccgacagttcagcctccagaaagccttcagggtaagcgtacatcagaaacaaaataggttataatttgagacctgaaagacagtaacaatccagaaaagctaatactctaaaactgtcacmtgtcactgctaattgagccattattacaagcagccttgtcaaacaaattgcctgaaagtcaagaagcaaggactgcagaagcaggagggggcccaggagggccgagacccagcaggtcagctcacacagatggccacggggaaggtcggggacatagaaaaccaagccagctgaaaacaaccaccaaatattaatacaacagcttgatgaaccctaggagaagtcgggaggctttctgcaggacgctgctgccgtcctgggatacatccatccaactcacctctgcctatctctcaggtcggtcttcccagctagacctgcaygcccagctctgtttagcactgaagatagggtcaccttctccttgttcttactgagacacatttgtggtgtggtttggttggttggtggttaactggcgcatcttgtctttctctgagaacagcgatctggttatggggcatttctgtctctaatgtcactgtctgctgcattccctgcagagcgaccgtgagaagtcagaaggccttccygtggcmccgttcatggaccgagacaaagtgaccaaggccacagcccagattgggttcatcaagtttgtcctgatcccaatgtttgaaacagtgaccaaggtgagtaactgtcaccacatgtcacacttgcttacactcagatacatgcatgcacacacaggcrcacacacatatacacatatgcacacaggtacacacagacacacactyatgcacacacgtacacagatacacacagaygcacatacaggcacatacacatatacacacacgyacacagctacacacaggcrcacacacaggcacacacttgtgcacacaggtacacaggcacacaaatgcacacacacggcacacacaggcacacactcgtgcacacacatgtacacaggcacacacaggcacacaaatgtgcatgcaggtacacatgcacacaaggcacacaggcacacacaggcacacaaatgcacacacaggcacacacacacacacatgcacacaggtacacacaggcacacaaatgcacatgcaggtacacatgcacacacaggcacacacagggacacacaggcacacataggcacacaaatgcacacacaggcacacacatacacacatgcacacaggtacacgcaggcacacacgtacagaggcacacacatgcacacacaggtatgcacatgcacgcacacaggtacacacaggcacacctgcacacctgcacatcctgagcagcctcttccccggctgtcgtggtgaccgctgtccctgttccatccagagcctgctmcccacagcctggcccgtgaccccagcatctcccactctgtgctgcactccctgccttgccttgctgggccctggggggcccctcactgccctcrcccatcgctgccggccttcaggaccctggaggcagcactggctgtggactctcctgtccccactctgcgtcccagttcctcacctgtggaggaacccctgagctctgtgccctcgagctgtgaagcccctgtccagctcccagtctcaccgcacccagccaccgagaccttgctccttgcacacagctcgttcctgcccagctccccccagggcctctgagctgcctgtggccccctgccaaggcccccacctcaaggcacccccagcatgtccaaaacaggcccatctcttgttccccccggggatctgggctcacagcctcacaccctccgaccttcctgggctcctacgctgcgcatccttctgctctagggcatctcttggagccaacccacccacttcccactcccaggaccctcagccgggaggctgtcagctcctttcccctgccccgtgtctttgtaagaacctcccaacctgtcccccaccctcatctcacgggcacgggggacacaggaggcaggaaggggactttctgtaggacctcatggagggtgatgagggccagagacagagccgcagtgggtggaggcagcagagcnggcacgagggtgtccaggagctgggactggcccagaggtttccrcayggagcacctgacacctgtttttctccgacgtttcccattgccttaagaacgagggactctgaataaatccgtgtgtctctcccagctcttccccatggttgaggagatcatgctgcagccactttgggaatcccgagatcgctacgaggagctgaagcggatagatgacgccatgaaagaggtaaaacacactgagaagagcctgccttccttgcggcaagcaggcacgctgccctccgcactcccgactccagaagcttggacgtgccaagcagggcaccactgaaggccccgtggacaggcacacgtgtaccttccatcagaaagcctggctcagtaaaattagggaatgcgatgagggaaaccaaaactgcattcgccaagaacacgtcaggtctcagtascttcgagggagtttactggccgtgcccttcacaagaatcacaactgtcacccacacctgtggacacccaggtgtctttgggtgtatcagccgccgttagagcatctgggacccctcagagtacagtgcctggcctggccccagggctgacttgttcagaggaggccatggggtagaaaggggccctcccctggcacgggracaaagcgaccacccacctgccagctcccgggcccagaacacacaccggcacctctcaggggccagggagcctggggctggctttaggttgctgctggayagatatcattttggaggaaggggtccaggtcacagcctcagggcccacgcagtctttctacggattccccacggctgtctgctgtcctgctgcccatggtgtggcctctgcccctcccagcctcctgcctcctccctccagcgcccccaggcagctagaacagtcttactactcctgcagggtttgacccctcctggccttggccggtgttgcctctgccacccccgctccccacagtgccactgaagcaccctccaaggcccgtcagtcagggctcccctagttactgtgcccaccaccccgtcttttctgcctgggcgctcctgaagcccatgtggcccacaatgcccttttgagcactgagccattttccaggcgtagccttgggttggtctcatctccctcgactgacggccccgtgctccccrtgcccacacccgcctggagcgccatgccaggcacatggtaggcgctcagcaattgcttaggagtccactgaaaatccagaccagctgccctgacttctccagttgatgtctcctactggaaagtcacagaaaggtctctaaacctctggaaggctgagagcacttatgcagagggacagatgtagcaagaaggcttcccccactccacaaccccgcaagagagctgaaggggcttctgcctctctcgtgggccctccgagagccatagccctgatggccttgagtctctagtcctgagccctgctgcccagtaggggatagtagggttccttaaggcctctgccttcccccctgtcagcccccacaaaaaggagagacacrccaaagaggtgaaaaggccaagcccaagccgcaggctctgcacacaccaccagtccccgcggctgtggtggctgcagctgggtgagctcactgtmcaggccccagatgaggcaccaagggtagcgggacagggtatgcagagctgcctctgaaaagcccatgtcaggagtgcttgggctcagaggggctggggaccacaggctttcacgttgcagcacctccaggcaacagaagctgctgggagagaggcagacactcccctgctgtctcctgctccctgacttggccttctctgtactctgttccagttacagaagaagactgacagcttgacgtctggggccaccgagaagtccagagagagaagcagagatgtgaaaaacagtgaaggtaatgcttgctctgctgaagtggcatctcagcgcatacaatgattctgacaaaggacagaaggaaagaggaaggggagaaaatctgaattttggaatacctttaaatgaatggaactttttttttttttgaaactaagtctcgctcttgttgcccaggttggagtgcgatggcacgatctcagctcactacaacctctgtctcctgagttcaagtgattctcctgcctcagccccctaagtagctgggattacaggcatgagccaccatgcctggctagtttttctatttttagtagagatggggtttcaccatgttggccaggctggtcttgaactcctgacctcaggtgatccacccacctcggcctcccaaagtgctgggattacaggtgtgagattgcgcctgaccaaatgaatggaaattttatttcttgcaactaatcattagaattaggctcttaaggctggtggctcatgcctgcaatcccagcactttgggaggccaaggtgggcggatcacttgaggtcaggagttcaagacccagcttggccaacatggtgaaaccctgtctctactaaaaatacaaaaattagccaggtgttgtggcgtgcacctgtagtcccagctacttgggaggctgaggcaggagagtcacttgaacctgggaggtggaggttgcagtgagcccacattgcgccactgccctccagcctggagaacagtgagactccatctcaaaaaaaaaaaaaaaaaaaagtgaggctcttaaagaaggggaacatgctttagttaatagaaaaacatcaataattagcatatgtatcacttataagagtaagtactttttaaaagtgcaattgaagtactgaaaacttttcacaaatcacgtgtttgctttatatggctttgagcattttcctctgtacttgttgatactagtcattcagctcacggggaatgcagagcagccgtttgttcacctcataataaggtcacactaatggccaggcacggtggctcacgcctgtaatccaagcactttgggaggccaaggcggcggatcacgaggagatcgagaccatcctggctaacacggtgaaaccccgtctctactttaaacacaaaaaattagccgggcgtggtggcgggtgcctgtagtcccagctacttgagaggctgaggcaggagaatggagtgaacccaggaggcggagattgccgtgagccaagatcgcgccactgcachccagcctgggcaacagagcgagacttcgtctcaaaaaataaaaataaataaataagccgggcgcagtggctcatgcctgtagtcccagcactttgggaggccaaggtggacggatcacaaggtcaggagatcgagaccatcctggctaacacggtgaaacccttctctactaaaaatacaaaaaaaattagccgggcgtggtggtgggtgcctgtattcccagctactcgggaggctgaggcggagcttgcagtgagccaagatcgtgccactgcactccagcctgggtgacagagcgagactctgtctcaaaaaaaatataaataaataagtaaataataaataaggtcagactccatctcaaaaaaatataaataaataaataaacaataaataaggtcacactctccatgtctaacagataattcaagagatagtgcatcaagcatgcaaggctcagggcaggacaaacgggacatggctcataagaggagctgcaacaggctttggcatccaacacacctggttttgagtccaggcttgccaattacaagccgagagatgtgcacaagtgtcccagcctctctgaacctcagagccccagtctctaagccagaggcaataataccattgttactgctgttttagtgattaaacagtcaaagtgcttgtctggtcccgatgaagtgctcagtcaatgttgccatttaatttttaagtcagttcatatttttcagtgggtcagaaaagagatcaatattgttttactttgtctaaatgtgttcagcaatatatctgatggcctctttcttttaaaatggtctgtgtgtcggccgggcacggtggttcacacctgtaatcccagaactttgggaggctgaggtgggcagatcacttgaggtcaggagttctaaaccagcctggccaacatggtgaaaccccatctctactaaaaacacaaaaattagccagctgtagtggcgtgcacctgtaatcccagctacttgggagccagaggcaggagaattgcttgaacccaggaggcggaggttgcagtgagccgagatcacgccactgcaccccaacctgggcaacagagcaagactccatctcaaaaaaaaaaaaaaaagtctgtgtataatcctgtaacgtttctgcgactgctggcacttttttttttccttcttttgtgagacggagtctcgctctgttgcccaggctggagtgcagtggtgcratctcggctcactgcaatctccacctcccgggttcaagcaattctcctgtctcagcctcccgagtagctgggattacaggtgtgtgccaccacgcctggctaatttttctatttttagtagagacagggtttcaccatgttggtcagcctggtctcgaactcctgacctcgtgatccacccaccttggtctctcaaagtgctgggattaaaggtgtgagccaccgcgccctaattctaacaaaaacaaatcagtcatcrtttcccttcttccaggagactgtgcctgaggaaagcggggggcgtggctgcagttctggacgggctggccgagctgcgcgggatccttgtgcagggaagagctgccctgggcacctggcaccacaagrccatgttttctaagaaccattttgttcactgatacaaaaaaaaaaaaaggaattcatgatgctgtacagaattttatttttaaactgtcttttaaataatatattcttatacggaaatgggtactgtacttcttctttggtagagttgtgtatgctgcttccggtaagttctctcatggagacgaaggacactgtgcttttcccccagatgtatcttagagcaattgaccagtgtgatgcggtgcgtacgtccctgtaaattcagcattaaatgtcagcacggtgccctgagtgcaaggacrtgcacgggtcctgtgtttctgagcagagggggacgtcagtgccgtgtgtgggacatctggggactgaggcaggttggccagactgtaggtcgtgtgtcggagcaaacgcacccatgaccatggggacaacacacactgggtgctcatgtggaggaaggctggtgacttcacacttaaatcctcagataaggaaaagagacacatgtattcagcacgtctgagggtctctatctcgggaggagagacggccctcccttcctgcctttgttttggtaacaagcacaggggacattctgggtggcactgtgtccacacaggggacccagcccccggcttgttcatggtcaggctcttgttgctgggacagtcgcacccctgagctctcactgagaccgcccgcatgcggtggactcctggagacccgatttataaaaagcaaggaaaaggctgctggctgtgtcccctgggctgtgggctccatctcccctgcgctctagagacagaaccacctcccgaagcgcttcaccctacagagctcacctttaaagccactggcgtggtctgagcttagtaaacatttcatttctgttttgggtcactttccttggggcatttgtttccttttggtgaattccagaatattacttcccaccttcaaataattcattttttacctgtaaaattttccatctcgaatccagccgaatacagataagggaccttgatttctacaccccttcttgtttctgcttttgtttttcatttgaatcctattaaagccaatagatatggcaacgttggcaaaaatagaagcaaaacgtaggcgtgcggatattgatgccctccaccttcctgccagcctctatgggggatgattacctgctctcctcatctgtaacaaggctctttcaacagcaccttcatctgctacattacttggaatgcacatctcactaaacggtgcccctcatcaaactccatacaacacttccttgaattttactatcataaacagaaacaatcacatgcacacacatggacatgtatacactcctacacatcagcacacttcctctggttctaggctatactgcatcctgaaacaattaaatgactgagatccattaggggaggcatctagagagcatctactgttttttttttttttttgagacaggctggagtgcagtggcgcgatctcggctcactgcaagctccgcctcctgggttcacaccattctcctgcctcagcctcccaagtagctgggactacaggcacctgccaccacgcccggctaattttttgtatttttagtagagacggggtttcaccgtgttagccaggatggtctcgatctcctgacctcgtgatccacccgcctcagcctcccaaagtgctgggatcacaggcatgagccactgtacccggcctgacggcatctactgttagtcctggttggtgtgcagccagcctggtctccatgcacgggacccccagaaagcccaccaacccaccctcctgtcacacagagcagtccctgaggccccacggttggaggccacgtccaccctggtcagcctgcacacccagagcctgcccgcaccaggaggcagccacacggatgagctgaatcatgggctgcatgtggcagtggaggctcaggacaagacagatgtgcctacggccccggagagctctgggtccagcagcagaggcgttcccccaggcctgggggcatgcccagcatagggagtgagtgtgcagacacagggtcccacccccatgagcacaacccactgaacaagacgcccctctggggtgagcggcaccatctccacctaggatgatgtgtttccaagtgaactctcacccgacaatcagtattaagtcagcatgaagggtaaagatgtttacagctgagccacatgcacgtcaggagacaggagcagcaatgcctggggctttccacggtgagctcccagcacacagcaagcatgtcgccagaaagaacagaaagttcacaaagggagggccagcctgtgcacagcctagcaccgtcctgggaggccatcatcacctgtgctcctctgagaggacaggaagatgctgttttccacttttttctccccaagaccgtttattagcaattgaaggaacaacgcatgtatcaaagactggatttgagaaattccaacaaatctgccccctcrcagttgggagctggcatcgtgcaatcttcggaatgcagcctctggctctcccatcaaaaggcaacgcagccccctgtgatttcagctttgaccttgtgggtaataaaagaaggaaagaggaatgtctgctactggaatcctggatggggtccccgcggccgaatcccccctcccgtcccctcctgtgtcacctgtcatgtctcagactttgaccgcctcccgcagcttccttttattcgtaatgtctaaagccaacccaagcgtctttgccggctgacgtcttagccaaatcatgtgggaaacccgtgaagcagaactgaccgctgtgagggctgggagtacactgggcatctgaaatacttcagcccaggaaaacgtccatcagtggacaccgtcggttcccaggtggcctctggaacaggaaagcagtcaccccctcgtccgatcccacaggaaacctcattccactctagtggcagtggctggggctagatccccctgagccaggagacgacgggcagtgcccggacaaggctgtactctgtccacagctcctccactgtggctatgagggaggtttaaaaatctcagtccagtggggggggtcagccccctgcccggccagccgccccgtctgggagggaggtgggggggtcagcccccgcccggccagccgccccgtctgggagggaggtgggggggtcagccccccgcccggccagccgccccatccaggaggtgaggggcgcttctgcccggccgcccctactgggaagtgaggagcccctctgcccggccacgaccccgtctgggaggtgtgcccagcggctcattggggatgggccatgatgacaatggcggttttgtggaatagaaaggcgggaagggtggggaaaaaattgagaaatcggatggttgccgggtctgtgtggatagaagtagacatgggagacttttcattttgttctgtactaagaaaaattcttctgccttgggatcctgttgatctgtgaccttacccccaaccctgtgttctctgaaacatgtgctgtgtccactcagggttgaatggattaagggcggtgcaagatgtgctttgttaaacagatgcttgaaggcagcatgcksgttaagagtcatcaccactccctaatctcaagtacccagggacacaaacactgcggaaggccgcagggtcctctgcctaggaaaaccagagacctttgttcacatgtttatctgctgaccttccctccactattgtcctatgaccctgccaaatccccctctgcgagaaacacccaagaatgatcaataaaaaaaaaataaaaaataaataaataaataaataaaataaaaatctcagtccaaaggctttcaccgtagtctgtctaagggacagataacatcgtctctctgaatttgggaggggactgttctctgttggtagccaaaaggggcccagcaaggtgctagggttccagtctccctgagtcctcaggcaggtcttcccagcccccaccctgggactccctgccctgctgcaggggaacgtgagggtcaggggtccccagattcctgggagctggggccggtgccctggcagaaacacggcctcaggcagggtccagggcctgtgggggtgagtcacsttgttatgggctgaattctctccccaaaacttacgtccaagcccaacctggtgcctcccagtaccgtatttggagacagtgcctttaaaaggtggttaagataacatgagctgactggggtgggccctgagccactttgactgagtcttacaagaagaggaggtcggggcacagatgcacatgaagggcgccagggaaggacagaccctgacacacagaggagtggggactcagcagaagccagccctgccaacacttgtctcagactttgagaggtaagtgtctgtcgtttaagccccccgccaagctcacacacacacacacctgtgtgcctcgctagggctgccccagcagactcacacatcacacctccctcaccaccgagtccctgggcagcaacgtgggcccggctcacaagcagtgctggagacagcttgagcttgggttgactgcgccagcatagcatgatctctctctctctctctcgctctctctaaggaaaaaaagaagataagaactagagagtcagaaatgtcatctctttctttcttttcttcctcctttctttcttgcactccagcctgggcaacagagtgagactccatctgaaaaaaaaaaaggaaagaaagaaattgattttattaaccaaaactagtaaaggggaagtggccagatagccatccatggcaaccacttcaattttggggaggaaggcaggggtttaagaaaggaaaacttggccgggcatggtggctcatgcctgtaatcccagcactttgggaggccaaggtgagtggatcacctgaagtcaggagttcatggccagcctggtcaacatggtgaaaccccgtccctaccaaaaaaaaaaaaaattagctgggcatgatggcaggtgcctgtaatcccagctactggggaggcagaggtgggagaatctcttgagcctgggaggcggaggttgcagtgagctgagatcgcaccactgcactccagcctgagcgacagagcaagactctgtctcaaaaagaaagaaaggaaaacgtgataaggaagaaatacgagaattgggtggggtacaatgtctgtgtgtctccagtggctgtcttgggtccccatccacctgggtctcaggctggcatcacctcaacagtggccaggtggtgaactagccaccttgatgtcatctgtggaactttgcagcttgatctccaggcttggtctgtctcaagattagcccctggaacgtctaagaaggtgcataatgagatgcgtgcataatgagatgcrcacatacagttagagaactgtgaagcgggtatagacagtgagaaaggcggggacgtgaagcctactttaaggctaagggaaaaggcttctgcagttcgcttcaaggttatatcttaaaatccaagagaaaggggaaaaaaagttaagatgcattttgaagttaagctgcctggttacaagtgaaaatacataagagtactggtttttttccggttaatcctaacttttctaatatattttgctagcagatatttaaaatctggtggtttagccaaagaatttgggacagcaagactatacaatcttccatccgctgcaaagagatgttcgttttttctcagcgtttctgagaagctggaaaacaaggtgagctgccgccttggacaccctcctcttaattctggttccttcctgctcgacatggggacgggacagtccgacgctccctctcatgggaatgtatttgcagacatcatatcatggaaaatactaaacacaagtgttgcctcagaagctcacgatgagccgggttcacgccggtgtaattctgcgggggccggaccctgaatctcatgcacgcgcggctgcgaaggcgacgcagcttctgcctctgagccgcctccttcgatacatcccgtgggagcgggagccacactgagcgccaggtctgcggccagccgggtgggaaacaggcgctgctgccagcaagctcctcccactctgctcacctgccccgaggttcccagaagttctcaatcagtaccatgtcctttccccttctcgaagaaaaacactgttggcaatggaacagcgcatcccattatcctcctgtcttcaccaggaacaggctccccagacagcagacactgttttccgcgagccggaggcagccagatttgagcccagataccgccatggccactcctgcgaaaccctagaaagccagggacatattcaggggacttctcttgct

SEQ ID NO: 95951 - DNA, 164881 bp, Homo sapiens
  misc_feature (1)...(164881): n = A,T,C or G
gccaattttatacccaataatcttgctgaattttaattagatctaagactttggctgtagatttaaaattatctgcctacataaccatatttatgtctccctttcctctctttatacatgatcaagtgaaataatcaagacacaaaagaatacaacctgtgtgaggtattagctcactgaagcctccaacccctggcctcaagcagtccccctgccttggcctccagagaaacacgcttccgtcttttctctcctgcctcgctgggccttcccgcctcccacactcccttctctctctatgctcacctctaatgctaggctgaggctcttcgggtctggagccaggttcccttctttcctttctccattctctctttaggggatcggtgacgtcttccattttcaagggtttcaagtgtccgtctccagcacggctctcctctccggacatcagtcttttgtacgtagctatcttcccaacacagccactcagacatcctgtaggcatcgcaaacttaacgcacccaaaaggaatgcctggtttcgtccccccatcccccgtgtcatcccagagcaccatcacccgccaatatgtgcaagccaggatcctgggtaagccctgatgcttctcctccccagacccctctagtgactctatcactaagtcctgttgagtctaattccaaaagcctcttaactctttccatttccactgtcaacacctgatgaaggtcttctgcatggaagccgcaggcatgcctgagctctaggcagacaccgccgggtaagtcagagcctccgtcccctcaccggggtgctgatttgggttgtgtttctcccacccccagacagtctatgcacttcgatggcagctgctccacctcccagttccagagctaggccctacttggctaaaccagggattgcctttctctgcaaagggccagatggcaaagatctatggctctaccggccacataagcccactgcatctattcttcataagcccccacccaccccaacactttacatgtttaatgttcattcttagctgttgactggacaccactgggcccaggctcagcctgcccacctctgacttaaccacgcagcacattccctttccctggtctctacagagtgcaaagtggcctgaccaggaggactcttctgaccaatggtggcagaagcctcctctcttctctgacttcatgtgccatggaagtgctttttcctctgccacaggcactcctgctgtcaatgccttctcatcctccaaggctcaatgcagcttcctgcatttttcctctgccacaggcattcccgccgtcagtgccttctcatcctccaaggctcagtgcagcttcctgcagcttgctctgacactcctgagcggtgcagctgcagtgccctggactcctgcaaccgttcacactcctcttcattaggagcctgcatttgtacatcaccactggagcttttccacccatcgtctccctcttctggatgcagaacaggctcagacaggccaaacaacttggccagtgctgcatggcacagccaggtccgcactgactgtcacgcctctgttcctgccctggacggtgtctcaggtaacacactgcactgctccctgacaccatctccccactagaacatgaacgccctgaagcaaagacatcttcctggccacgtgttgacctatgcacgtgacactgcctacggcgctgaaaggccatcagttcgtcctctctctcctgcccctgtgtgtctaccccagttttctctcttcaggctggccagtgatggagaccatcctaattgtgctggatttgaacccttcaggcctaggcacaaagagagactcacgattgtctcaatgctagctctaagcacccagggccatcctgggagtcagaatcccgcctgaggtcctggagtgggttgtgggggggtgtgctgtgtgcctgtcacagagcacagacagactgttcctgctgtgtcactgtgggagttgggagttgtcctagagacagtggcacattgtgagctgggcaggtctcacacatggtatccaccaccatggcagctgctgactgaatggtttggcaacatctggtttttgccactccagtctcatgtcttcttattttatttttaaaatatagggcaaaaaatattatgtctcaaatcacggtatcaccgaatattggtcacctcttattagcagttttatgctcctcctgacgtttgagaaacaaggaaatcaataatccactttaggctacaatctaaaaagtacctgtgagtgtcctttctcaaatagattgggcagaattaaaacaaagcaagattgtttaaagctacatttttagttgcacacaaggactatagtcaaataggcttcaaaagcacaaaggctgtggtcagtcatcagccctaggacaccaggaccaagaccaggccacagtctcagcacagcaggttggcagctcgctctgtaattgatgagacagaaatctgagcacacggattgccctgtgtggctggaaagggaaaggaaggctgtcctggccaccgcggcccagggaggccagcacacccgtgcgcaggtcacgtgacccactgctctgatcccaccgttctagccacagtctgccaggccctgggcatgacaggaagggggttcacagatcagtggcatttacacgggtaagctttgaacactgtcttcaactgaaaggccagtgtgtgaacaggccgggcagctggaccactccgaggctggcgccttcccctcctttcgggcagttcccagaaggctcaagaccacagtttgaaatccacttaatctctcgagtcggcctgggtctatatcctaagaccgtggaaatcattttgtgccaccgtatcctgtaggcattggcaggaccagcgtaatttttagttcttctcgtgggagacagtcacagggtcatgccatttaactgcactgaagggaaaacgtgggaaatggatttttggtgctgtgtagaccacatttcatagcggttggcatctcacatgcttatgcaaagcctaactccgcaccctggggcagacagtgggagcccagctggattcctacactcaagccctccagcatcaggtttattttccaggacaccagagtgattgtttattccataattcccacaaaggagacagtaaacaacagaacagaggtggagcgggcacggaaggccaggaagtggatggtggctgccagcacttctgtggagacccagggcccccctccaggagccccggtgttcaacctccacagtgaacaggggatggatggctgagatgtcctcgaaatttttttggacttcctcaggcgaccacaggattccttctcaaagagcctgatctcagcaggcacccgaatgggcatcctggtgcttcatgctctacaacagctgggaacgccatgtcctggccccaggcgactggaaactgctttcctccccgacatcagcaccaaggggaatgttcccagtgccattcttccaagtcagggagagcgtcacaatagaaaccgtctctgtggagaggatggcacctgaagccatggaataggaagggagcatcagaggctgctggctggtcctgcagagccgcctgagaggcctgtgggagcagcagagggtcccggccttgggcgccatccgctctctgctgctctggagggagaaaaaggacaagttgaaacttgcacaagcagcctccattctggggagttcccttgtattccccacaccaacccgcacctcagcgaaggcctgtggaagacttctgcagtgacagccccgatgaaccatgcttgccgtgcccgtcccctgtgcggtgcctcacgtccactcaggccccggccatctcaccctcctggggagatggagggaagcaccatggggatttgctttttcttgctgccgacggagcccagccaccacgggagggaggcccggccagcctgcggtgggtgggtgacatgtggcccggatctgcccggggcgcctgcctgtaagtgggcccagcagacaccccatggagccgaggcaagccgtcccagctgaaccggcttaagctgcaggcccacagagtcatgagcagtgaagagaggttttcgccctctgaggtttggggtggcctgttacacagaaatacacacaacgtcctcaggcacgtatctctttaagaatgtgtcccgagaaggcgtcccaggagtcttgatttttatttagccgtccacggttgcccctttgggtgcttcgccttcagatggggtgaagggctcacttgttagctggctggccccaaagacaggcttgttttccaccaggcagtgactgaagccggcagcctgctgcataccgcgggccttcccctgacctgtccgggactgcgggctggcggctgacacctgcggagtgcttaccgcataccaggctcccaaacttccatctgtgttcgtcttttaagttttgttgttttccagagtcggagtctcagtgttgcccgggccagagcgcagcggccatttataggcgcggacctcggcctcgcacaccacagctccagctctgagacacaagcgacccgcacccccccaccgcccagccccagcctccagactggctgagatcacagtgtgcgccaccccatccctggcttgcgatggtctcttactccccactttacaagggaggaaagaggccgagggcagagtgggccgcctgaggtttggaggccagggctagtacaacctcaatttgaccctggaacctgccgcttcccccacccaggtgcgggacccacccgcttgtccacacctggctctgcccaccgcccccggctgctcctctgggctcaggtcgccgcggtcaggagctgccaagtttgcctatcaaactttatcttcgtgcagagaactgcagcctggagctggttattccggtcagtgaaaacgttgcatttctacatatgcttatcatcatctgtgtaaacatttcttggtataactgtggaacagtcagtaaatatagataaatcgaagagtaggtctattgcatatgctataaaaaaatgcttttactatcaacctaaaacaaacaaacaaacaaaaaaaatcaaacaaaaccaccatcacctaaacgttggtaactggagcagctgctagtgtcagtgcggactaaacaggagacggcgggaaccgtgtccagccagggtcctgggccgcgacctggttctcccggagtctacagtgaggatgacgggcggggagagggggccggcgggacccgcgtgtcccaggcaactccgggagagggagaagcaggggtggctcggcgggggctcggcgggggctcggcgggggctcggcgggggctcggcgggggctcggcgggggctcggcgggggcagcgcccgctgcagggaggagcgcgggggcccgggagcctgggcagcaccgcgagacgccacctccgcaaaacgcaaacgccaatcgccgggcgcctgcggtcccagctaccagggaggctgaggcggcaggatcgcgtgagctcggaggtccaccgcgctccagtctgggcgacagtgagaccccgtccccaaaacgaaggcgggcagagtctcctcagccgcgctcgggcgggcggcgccgcgacgccaggccggtcccgcgctctcgccccacgctccggagccgcccagccgcggtctctcagctccggccgcgctccagccccaacggccccgcgcccgtccgccgcaggtggtcgtgagggaggtgccacagctccggctgcccacgacagacacgggcgccccagcgcgcgcacgtccggcgtcgctgcgccgcccccgccccctcggcgtgcgcgcgcccggcgggccggcgggggcggggagggggcggagccgccggcggcggggctgaggcgctgaggcggccgtggcggcggcggcggcggcggcggcagcggcggccaagcggccaggttggcggccggggctccgggccgcgcgaggccacggccacgccgcgccgctgcgcacaaccaacgaggcagagcgccgcccggcgcgagactgcggccgaagcgtggggcgcgcgtgcggaggaccaggcgcggcgcggctgcggctgaggtgagggcggcgcggggccgcggcggctcgggcgggcgcgggctccggaccccgcggtggcggcgtttatgtaagcgccgggcagggactggtggtggggccggagctgcgggccgtcccgggagcggagggcgcccgcggagaagcgagggtgccgcggcaccgcctcgcacccaccctcctgggtcgcccgtctgctccggcgctcggctcccggaggaagctgcgcccgggcggccccgcgtcccctcccgagggcgccgagtccgcgtgggatgcgccgcgctgcgccgcggggagggcaggtgcgccgggacgaggctgcgccctggggaccgagactgcgttttggggaggggacggtgtgccctggagatcggaggctgcgctggggacgaggctgcgcccggggaccagaggctgccccgggtacaaggttgcgccggggaacgggaggctgcgttggcaacaaggctgcgcctggggacggtaggctatgtccctggggagacgctscgcccggcatgggacgctgcgccgggggacggcaggctgcgcccgggatgaggctgggcccgggcaggggaggctgccttgggaggggacgctgtgccacgggagtggagactgcgttggggacgagtctgcgccctggacggtcctgcgtgtccttccgagggcgcagtgtccrcgcgggatgctctgcgccgcgggcggcccgggccagggaagttcctgcgggtgccgggcgtctgcagygatcgggagcaatctggggcagttgggggcccgaggtgacttttgacgtgttcacatcagaaggaaaattattgcgtggtggatgggtgcgagggaaggkgtcagattgggctgtggacgctgaaacgtgttggagtcccgatttacacgytggaaaacctaacctaaaacgtgttcctgtccaggtttctatgtcggagatctgcaccgtggtgtttagttcccagttaatatttttggtcagcaggtttgggctgttacttctgatacaggcattttacttccttcttactaaccattattgcattccgttctcgaagtataacgaaaagtggcatgatatcaaacttgtttctttaacgtttaactccataattaagatgatagaaccgtagtttttttaattgagaatacaaatatgtatttaatcctctttgtttcctcttaaattttgccgtatgttttattgcttcgaaaggtgccacccagagctgcattttccaaaacgctaggttgtcttaagagcagttgtttctaggagatagaaaagctaattgtcttttgatgaccatcttttccttggggttgagactgctgtatcctttttgcctgctgagggtttcccagaggggaaagggagaaggaagaaaggatmaaagcttggctgatacagttccttcttggataagagaattaactgtctctcattgcgcggttcctccggaggacagggtccagtatgcatggacagccacaacgggggctcggtaagtatttgatgagacaggctgagctgggtgcctatatcttgcctgtggtgsagaggatgaactcacacagactctgaaaggaatgcattgtctgtgagtgatgccctgttagatgtctgagggttcctaagactgggtatatcccactacatctacatcacatttgaagctgtagttggaaaggaaaaaaggaggccctcctgcagggacaggggcttaaaaataatcgatccagctctgagaaattgatgacacatgtgtctctggtgtgacgtgctcatgcagttgttactgggaggccaagggggaaggattagctatgaagtgataacatcatccacaaaaaacatcttggctcagaggctaatttcacttcctcgtgaatttatgtattgyaaaacatttgaattcttttagatttttggaataagaatttttttaacttctatttgtccagtgaatgcataaaacaaacttaatccatttgacaaatacttgtctgtggcctgttatgtgctaggccttccctgttttaggccctaggagatacagtacttaacaagataggtagagatcaaaaatgcttctggcataaagcagtacatttgtattgatagatttaaaaagataagcaagcacacastacctacagaaaggtaaagcctcattccactccatccctkrgcacttggttcaaaggctgcacccaattgtgtattgtcctagcaggagtcaaagtgtgtattgtatatgttttaatatatgacaaaccttgctatagtgcatattcttacacgtgggtacaagcaaagcctactaattagttattatcaaaatttcttagctgtaagttttacttaagaactgggttttattcccttgaatgctgtgattagctctgtgatcaaacaatataattcaaataggaggtagttaactttggaaagaaatagatgaagttacacatttaccagcctataaaaaagtttagcaaagttatcaagcttagtttgaaaccaaaaagctcagagaggtccaattttattagaaaactcaatggtggccgggcgcggtggctcacgcctgtaatcccagcactttgggaggccgaggcgggtagatcacgaggtcaggagatcgagaccatccttgctaacacggtgaaaacccgtctctactaaaaaaatataaaaaatcagccgggcatggtggtgggcgcctgtagtcccagctacttgggaggctgaggcaggaaaatggcgtgaacccaggaggcggagcttgcaatgagctgagacygtgccattgcactccagcctgggcaacagagcgagacgccgtctaaaaaaaaaaaaagaaaagaaaaagaaaactcagtggttttctgtgtcaactttctaaaataggaatttctaaatctgtaatttggtgtgatggaaatggtgttaaaaaaaaacccatattattttgtatgttcataatatgtgaggtaggaaaagcaaatgggaaaattaaaaattgtccagtgaaatcattaagattccttccttattccttgagtgacttttctttccaagktgacagctttttatctggggtgtggacagggacagcgcagtagcccacagaggtcttcgtggcagggcttaccgcaccttccatttgcagagttttgcttcatccatagcttgacagctgttgggctagggccattaatatcaaattatcacaattttttttttttggtagtttgattagtactgcttgctgcacttttccacctgtatgcctataagatgtcctaggcgtacacaaagaaaagtgactttggttttaggtttaacgtctttgtgatggaacaggaagggggatgaaagtaactctgagataccttgtatttttattggaagtacagtgaaatggaagctctacttgcttctagtttggtgattttggaacctggttccatttcatttgcttgttcatccaacaggcattcacccatgcatcctggcccaggtactgttctaggtattggagattcaggatgagcctgatgaggagagttcctgccctcaagcggttcattttcttgggaaggaggagagcagtaaacaagcatttggtgtcctaactgcttcaaagggcaaatgaggcagggtaggtgagagaaggtcaaataggtggtgaggatggagtgagctgggctgaggtcacggcagcagcagcctctcaggcacagggaactctcgggtgaaagtccctgagcctccttgtagtatggtggtcacctcagggaggccattgctgccagagaggctgggcgagtggtaggaagtgagatgggagtggaggagagctgcatcttggagcacacaggctgtggtaaggaatttagattttaagtttgatgggaagccttaagggagcctttcttccttccttgcgaatgacatgatctgatttatctttaaaaagtaccactctggctgttgggcttacaatatgccaggctgttttaagagctttacatatattaattcatttattcttatgacagtccaaaaagtaggcattattatcattattcccatgttacaggggggaatacctaggcacagagtggttaagtgatttacccaaggtcacacaggaagtggcaatggcaggatgtacccttacctccttactgcagcttgctttttgcacctccactactgcagactggaggaggaatatcagcaaggagatcagttagacttttgtgaaagctgggtgactgtaccggcacctcagaccagggcggaagtggtgagatcagattcagcctactgaatttcagcatttgtaagatgccatcatttttaagttgcatcatcatttcttatgctgctaacaaagggaaaatgtagccaactagrttgtgacacaatgctttcttgttacccagcrttcatttatactcattgaaagagcttagactaagcattgacttttaaaatcatataattcatgcactttcataaaaaaggaaaatacaagtaaaataaagtaattctgaaatttcttcacatctagaatctgattcttccaactcagcttttgacttggcgttggtgccaggtatgagatagggaagtctgggaagagccagtgttgggatttgaacatgtggagcttgtgactggaaggcagcccagctcagcagctccactcaagggccagatctggaggacragggttgggtcattgtgcagctacttcctagatgatcttgagcaagcagtctaatctctgtgcttcagttttctcatctataaattaggaagaataaaagcaacttgtcagggttgttgagttgctaatgtaaagtacctaaaatagtacctgactaacagtatttaatggggcttactttgcttattatttttatgattagttatctgagtagagaaaggtgaatatggatggaaattcaaggtcaggttcaagaagaggttggggccaaatatgtaaatttgggagtcatttgcatattgctgatctatgaggcatacagtatggatacagaggagcaggagatgaggaatggcctgggagcttttggcaagsggtccacattgggagggagggtctagcaacgccattgaaaaggactctgtttgaagaaggaagaaactagtgagagtctagtggcctggaaaccaagacaccgaggggttcttttcttcttattcttcgtgggctggagagtttcctattggctttgataagaggtggttgtgagtgaccttgataggtttggagtggtggggagaggaaacaaatagagtagaggtgggaacatcagtgtagacgactctctagaggagttctgttaaaagggaagagtcatgggatggtggctggaggggacatgggtacaggaagtttttagttgtatttttaaatgagagcgatgatagcatgttatgagctaataggaatgatccagtagagggaaacatttataatatgccaggaaagaggataatgttggagccaagtccttgagaaggtgagagggaggcaggaagagcagggatgctcagctctagaagggaggcgggacttcaggagggaggcaggacttctgcacgtgggagcctggactcagaaatattcctcaagacatgctgcccttttgaaaggaggataggaaataaatcatggttttgtcctcagtcctaaaaagttcggaatctcaccctaggactcaggatccagcttcttaccagcttgtgctgaacatgccatggggcgtacttacggaaagatacatgtggaaatggaattttttatttatttaaaaaattcacttttctctaaaagtattgttacctggaggttggcacctttattcaccaaattcagtactcagaggactagaagactcggtgcctgatttgtgcttgatttgcctagctgggaatttcagttttgcatttaagacgactccctcaccaaccctacccccagaggaaagcaggtattgttgctttgggcctgttgcatgtatatgtttatgttccactgggtcagcagcattcagtgaaacacagttgcctgttaacttggtaaaatatcttaattgcatgagttttgatttgtttttgtgattatttgattttttcaggtttggagtttcagaacacccatcttctcagtagttcagccaatgcgatgaaatgtgaagaagccttccccagcttccttgcattctctccatcatctgtgcagtggagagtagttcccactgctgtggaaacattttccctttgctcttttctctcagggcaggctttcctgagtgcctgctctgtgtgagtcatcgtgggaggatgcggtggagaaggacagggaggaggtctgtgcttctttgaactgacattctggtggagaaactaaacagatcacagaggcagacaccgtgcctcacaactacacacggacccggcttatgatggttccagtaacaatttttgacttgrctgtggtacccatacagtcattctgtttttcacttttggcatagcattcaataaattgcatgcgatattaagtactttrttataaaataggctttgtattagatgattttgttcaattgtaggctaatgtgagtgttctgagcaccttttaggtaggctaggctaagctttgatgtttggtagggtaggtgtattgaatgctttttcaggttaggatgtcttcaasttgcgatgggttcataggatcggaactccaccgtcagtcaaggagcacctgtgctgtctttatyggcatgaccgaggagacasggctgaggtagatggcatcaagagggtggctcctggtggaggtatgatgttctgggaaggcctctctgagtgcgatgtggtaygctgaggcccagagggaaagcatgagctcatgtcaggaggggggacaacagccttctggctagaaggatagcctgccagagagcctgcttattagagtggccaggataggaccagaaccattgtccagtcaggggctaggaggtgaggctgcagagacacaggggccaggtcctgcagactctcaagagtgcaacaggaagaatggaggcctgggttggcactgttgccatgatttagcggggcagaggtggcagaactggagaaaagagagcaggtgtgaattcttggttgtgggcaatagatcaggtcttggagacaagggaagtggagggaccaagaagggctcttggagctctttggatggtgatgatgtgatgatgccacgttccagaggatctcaggttaggagtcttcaactagagacctcattttgtattgggttctgtttgagtctgcaaagcagttgtcatctaatatgtgactagcagaatatttgtttgtatagatayctctcaacttacgatgaggttcataacttraatatattgtcagttgaaaatgcatttaatacacctaaccttcaaaattcaaagtacactttctattaaatatgtatcactttcacaccatcataaagtaaaaaaatcataagtcagactgttgtaagccagcgtctgtctgtaccttcccacggcctacaaaatttgtaatgcattgtttgtaaaacacagacacgtgcatttaaacttttattaggtagaactggctcttcttcagggtccttgtaattaagtcagttattcctctcatgacattcttgtaggaggtctcattacccctatttatcagatcagaaaactgatgctaaggggctcagtgacttcctaggaaagctggataatgtttaacatttattaagctcttaccatgtgtcagacatggtaaagtgagtttaatctagtttaatcctcatgatgatcttaggatgttgctattaagggtcactgtcatcatccctttttactgataacactggcctggcttacctgagtagcctcctaacagatctcttcttccacttctggtctccttcagtctgttcttgaccagcagtcggatctgagcctgtacatggaagacatcacgtcattctcctgctcagagtccccctgcggccttctttcctgctgtcccttcctgccactcagagccctggctccagctgtcttggggcctatagctagccctcacttcagtgttcatgcaccattgtgtgctgcgtgccctgctcactgttctgtttatttctgccatctgtacccaccactaccttcctccccacacagcctgcctggccagaatgaaagcctcaggaaggcagggctattgctctgaatctgtcctgagggctcggagcaatgcctggtagatagacacttgtaagcctttgctgaaggagagaataactttaacttactttttctgttggtagtaagtagtagaacctgcattaagtttatctgcttctgaaaacgtatgcttttgctgcctccctacactgcccccccatcctattgtacttggtgaatcagtcatatatttatgccccatatgtctgtgttatctccagatttccacacttttctatgtagaatagaaacatttataaaacattcaaaattgttataaaaccataaagtttgacatagtaaattatctgttgaaaacagggaggccacatcctggaaaagtagctctgtcctgccagcatcattttaaccccttttggacaagatacagttgaaatgcattctctgaaataatacttataactacatcttgacagaaacaagaatatttcgaataattctgggaggattcaggaaaaggcagccaaataaaatgaaaaaatacatttgattcaactgtggaggcttaaaggaattacacatcttttttgtttttttgcgacagcgtcttgctttgttgctcaggctagagtacagtggtacaatcatagctcactgtagccacaacctcctgggttcaagcgatcctcccgcctcagtctcagcctcccaggtagctggggctacaggtggatgccaccacacccggctaatttttgtattttttgtagagacggggttttaccgtgttgcccaggctggtctcgagctcctggactcaagggatccaattgcctcggcctcccaaaatgctgggattacaggcggagccattgcacctggccaaaaaagcatctcttataagctgtttttggtgaaggagcaaacaggaaagtgtcccagaatttgggagatcaggattgtaatcccagccctgcttctgaacaggatggtgcattctcttcatgsctctgctgcaggctccttggatgtagaatgagggcagttgaattgcttgttgccgaggttctctccatttctggaagactattgtaagtcagagtcaaataatcattcattcagttgtccaataaatactcatcatagaacctatgtgtagtcctgtctaatggtaggtggtgctacgtcacttcctgccatggctgccgaggctcacgcgaggctggcacttggcagagagtcctgtcccttcttttgactcagtaactgtggaaagaggtgaggtataggaagggagggcctaggccttaggggttaagcgggcttaggaggcaggattgagagaggtggaatgatggattcagagtccaagagaaaacgtgaaactccaggggattagaattgatccctttctctgtttcctcagtcttagggggactagactgtgttagttgtcttgaattaaattgagcaggggttgtttttcacttctgtaagtccagagtttatcataagccaccagaggtaattcagtagtagttaatatttcattaaccctcacttctaaaattacaaagttagaagtggaggtctttaacatatatatcagtcaggctggagagtaagttggaaagttgcattttattcctgtgtgtttacttatggcagtgcacataagcccagttttgtttctttttctttgattagtaacagttgggcacaaggtgtccaacccacccagtgttaagtcacttagagtgagttgatttccttgaaaaaaggaatcttttcaagaatgtaaagtggcttctcgtagtcttcgtgaggctctggagtcagacacaatactgggttaccctgggaccatgtgcagtgagcccgggcttctggagtcagacacagtacctggttaccctgggatcatgtgcagtgagcctgggctgccggatgccgctggtgggccctctgccagctgctgcatccccaagccctctcttgtgtcattgttttcccttttcaggaatagtttccactagggacctgctccctcaaatttctrtcatttgagktgaggtttcgtgttggttcatctgactggccgagtgcaccctggctgtgagaacaggaaatagaattctggcttttgtcttagggatatccccaggtagagagaggagattcaaaagatgctggggagctacagacgtgacctctgacctctacatgaagaatggtggaaaacacttactacttagtgttaatctacacatttcacttggtttagacctaagcataaatagtgtgaagtcgatttaaacagaggttacagtttccagaaacttcagcgccgtggctgcagttaaacagcaatgattggactctttacgtctactccattctcgatatgaatgaaagtagtcacatcaaatgcatatttattagtcttggtcattttgaatttgagtcctttacatactatgtatgtatgtacccaggagcagagcagggttaaaagtgacatcttctaacttctactctggaattttttccctctgcactttttgttgtcacgtagtagatgttttcacccacatgcaggtgaatgagtgacatatttatcttgttacatagtgaagctttcaattctttaattttatccctctaatgaaactgtgaggaattgattctgttgacacagaaaaggctggtgtcacatgaacctaaaggacgtcattgagcatgtgcctctcaygcagaactgacatagagcctcccgtgcagctcaccttgaattctccatgcacgaatcagccataggcacgtgttatgtgtggcacaggcaagaagtgcctgatagattttagttctgtttattgctggaagcccttgctgtaggaaaaggaaggttttttcctttcctggacaatgattttgagctacggtgtagamtggaaaaggcaggctttgatttgccagacactgcttgctatgtgtgaagccgggatagggcggtgctgttggacagaagacctgccctgtgtgccttttcacactgcattgagaatttgtctagatgatttcctgggcttattgattgttgaaggaaacaatgcaaattgcaagttatgatcaaataatgctttgagtcttcacctttttagaatgctctgggaaaatacggggagaaaataaaccataggaaaggcattttgaggcggttttgttttgttttaaacagctgccatgaaatgcaccctctctaagaggacaattcagtgattttctgaatgtctgagttgtgcagacatcaccactgtctagttcttgaacactcctgtcacctcaaatgttccctgtgcttgtctgcagttgattcgcgcacccagcccagcctcaggcaaccgctcaggcagcctgcctgctgtttccacatgtgccttgcagatatttcatgggaagcagctcatgtcctgtgtcatcgtttgcatcaggctttcacttaacatgtttttcgggttcatccgtgtgttgtagaacatatcagtartttgttccttttagtcgtattggcgtagcgtgttcgtttattccactccagcgatggactttgggttgtttctgcattctggctattatgaatcacgtgactttgaacattagcaagcatgtctgcgtgtggatgtgtattttcatttgtcataggtagattcctaggagttcgtaggagcttcgaaatggagtttaagacagaagmctttgtttgatactgataatgctagcaagggccatttatttggcttgctcttgaagtctgtctctgtgatgtgcattgtgcttcttgaattgtatgagcctactataggatgaaatatggttataatgtcgagcagaagctattagcatttcttaagctgaccacctgtgttgtgcacactattaggtcctcagcagatgagttcttaccgggtgtttgatgttttccccccacttatcagaagaggaagtcggtgaagtacggttgggcatattaaaaccacattcagcctacaacaccacagaaacacttaccctttgacccagcaattctgcttctaggaatccttccagaagatagacctccaacaatgtgaaaatacattcggaataacctaaatatccatatgcaggagagggttgagtaaactctagtacagccacacaaccacatccactgttgaggatgacctctgtgaattggtttgaggtggtttccagggcacgtggatgtgaatgaggcaagtaccaaagaacatctaaatgctgcccttgatgtgagaagaaggggatgcaggaagacacacgctccctgcacacttgtgcagaggagatacaggagggcagagccagaaacaaaagagatggtgactgcagagggccaggggacggaggaggagtgggtgccaggtcataggtggggtgcagagggcgagggggcagggaagtggagtgggtgccaggtcataggtggggtgcagtgctgctctcagtacaccttttagtgtggcccagctcttgaaaccacagcaatacttcatatactccaaagtaaaatagatggttaatatcagccaggatgtgggggacccaaaatgaaatataagcggaaaacacacatctcactgtagtacaaagcggcagggccacagcaaagggggtggaaaggaaagtgttaaccttatttgggaaaatgataatgttgactggattctgtgaggctgaagagaactgtacaaaatagtagtaaatttttttctcagtgttaatggtgagcaatgtgaaacgactttatgtgtatgtggggattgaacaaataagcagaatcgtagtggataatgagagccaggtttctcactgtcccaggaagaagttacaaatagcaaaaggaagatggcagagggaggccgtgctgttggattgggataggtgtcastgtgactctgtggtctttaatagatgcatgtacagcacaggagtaaacataggtgtacgcgttacatgcatgggttagtgatacacctacatatgcatctcctagccttgtccgttgggaagacctaraagcaatgacctccagcaacagggagcacacctaaatatcagttgctgataaaaataagcagggctccttgcagaagatgagtctggaacctctgatgatgctggaaataaggaagtggccaaaatggatggggtgtgtcagagggcacataagcaacctggaggagccccatggccaaagcgggtcaatttgagcaaggaaatgagtaatgatagtataggtgtataatctataaaacaaagtcagtatcactactgatacttcttatattgatataagaagaaattgaaaaaataaggagaagggacatctcttcctgacagaaacattccaattaattggtgtaggagcagtgagaaaatagaaaatcgccttcaggcggcactatggaaatagttacttcaggtgagttccgcgggaggatgctgattagtgggccagagtttggagagaaacaggatatttgcctagtctcgaagtatctcttcctcaagttatttatttattaaaaagggaaaaatagtaactttagaatggaggaagccagcagacaccacgtcacctgggcgatcaagatcagcatcatctgatgagacaagttgcatcatatgccgccccacaccacatggcatgtgctctgtcagggactcctgccacaaatgcacaatcacagtctagtcatggagaaatgtcagacgctccagtagagggacgtcctgcaaaatacctcacctcatcagtgttcctcagaagtgtccaggtcatgaacactggaaacaccgaggattggtctaagcttagagacctgatgactaactgtggcctgtgattctgggcagaatcctggaacagaagccggtattggtggagaaaccaccgaaattcagatgaggtctgtggtgtagccaattgtattgtgccagtgtttattttctgatttcgatatatccttctcccagctcacaacatacaggtctgtgattgatacatacttctcctcatgctcacaacttacaaatctatgattttagaggaagctgggagaaggacataggggaattatctgtactatttttcagccttcccataagcctaaaatttcaacataaaaagttgaaaaagaaacccatggcagaatatgatgggagaatggcagaaatggcaggaccagcccctgtctctgtttcttcccatgtgaagctgtttacctggtttatcttggtctttggatttggtcgattttttttttctaaaaagaaattttaaatatagtcaaatttatcagtttttttcctttatggcttttgggttttgaatcctaagaatactttccctactacaatactcatatttttctttaatttcttctaatagttttatattttgtttttcacatttagcatattgatctatatgaaatttgtttttgtacagtttgaagttgggatattttttcaattggctaatcatttgcctttgtcattgagtagtctgccctttgcccagttatcagaaatatcacctttatcactactaaatgttttctttcaatgatatttcaaattgcttattattcttgtgtgataaagtgattggtttttgtatgttgtgtccacagcttgtcatttgtgtctcatgttttctagatggaggatccttttgggaacatgcgtcttcctttctaagctttgtacttcccctgtattaattggctaggacttctggtactgtgctgagtgtagtgtttggatcatagtgatggctagcaggctgcatctcrttgttgtctttgacgtgaatgcttccagtatttcatccttaagtgtgacattactctagttgttttgtacataccctttatcttgtctagcatgttaccttctcttcctggtttgtccaaaataatctttatcatgagtggcagtagaattttaccatatgtgcgtctgttgaaatgatcacgtggttttccctccagtctgttaatatagcaaatttcattaatagatttcctgatattaaacattcctgcattctggggaaaatcctgtttttaacacagtgcaaaattaaaattgctatttattttaataccttctattttttcaaaatgagtctctccccagccctacccctagtcttttcatttttttcatgtagtttacatgctgtagtagctacatagtgktataagtgcttaacacctggcttttggtgggaaggaggagtgggagtgtatggaaacccctgatttgtagcatttgccaatttccaagttataaatgtccctaccgtgccctatttcaagctaccratgagctgtcaactggtttacaaaattcctgaaaatgtgacagtcttctctcatgaacaggtataagtataccagtggggcctgagtgtgcagcctggtgactctcatatctgtgtgcactcacacaaccatcactgggatcaacccggaggcttcctggtacctgtgcagctcagcactcctaccctccccaggaggaccccggttctgacctctctccacctttgttctcacttggggattgaataccttgtttattttcacgycatccttgttttctcttctgtgcacatgcagctctacgttttccccccaagaactgccttggccacctcatttgtagatagcgaaatgcagggtttgtaatgatttttattgaaaaattgagcatctgattattattgtggcactggctttattaaacaatgtaggttctgtgataacytttcttaaatgttgggcattgctgccatgttatattcatgaagttcatcarcttcatataaactgacrtttttcattcatgtgtttatgcagtcattgaataaatattttttgagcactttggataccaaaggtttagcagtgaatgaaataactcagtccctttcttcacagagcatatgttctgctatgtctttaagtcacgtgttttttctatttgaccgtccttgccaattttcccctaactcagacatccacttgtctttgcccctggtattatcttaaatcaactctaaatcaatccgatttcttccactgcttcaatgctagttgacgtttggcttaactgcttatataattatttctgcttttattgaattcttatgatgaaaaaacagaagacttgaatctgatgatttttactttagaaaggttaatgatgaaagtgttgtaatactacagtttggtgaaatggcactttttgtgttgtgtgaactgtcatcacttaatgaggagcaggagatsagcttacagttttctgctatagttctggacatcatgagaccttattccccaccagcatgatctctgtctatggctcagagggagagcaatagggatatggggtgctattcacagccttgcctgggtgactgtgtcttctggcagcttagtggctcccaggggcaggatcctggtcaccagcatcctacagcattgccacatgtttgctcatgctctggtgtcctgtggagtagagctccttgttctcctgtggaccacagtccagggagagtgggggtttccctgtaggaggaggagctggaagactccagatcgagtttaaccgtgggctaggctgcgaaatttggatgcaggccagtggacctcagaaatccatctgttcatctttctgctaaactgatttggatttctgcttttttaatcctttgcaaaattaatttgtctttaatatgaaaatcagtgttttatttttagtaagagaaaataattctattttatttatttggaacaatttaaaagaccctagagatcaacatccttcctctttcatttcctagaggagggtgtagaggagcagagtgtgtgacaggcacagtgggactgacctttgcttctgggcctggattaccatgtctggagagtgatgctttggaggaagtatggrtcacttcgctcctgggccgtcggttcagaaggtgcagccttgcccggagctgaggtccagtgctagcagcacattccctttccttgccctgagcctgcatggcagccttcttcatcaactggaatctctgttgaggatggagaaaaatctgtggtccttttgtttactgggtgactttctgacctctctctcttctcmttctctctactgcattacaactgtttgatgagagagattttaaaaatgaacataaacaatttttatggaaatatctgttatctwttttttttatatagttataccattggaatttactcttaccttcaggtaacagttgtgaggaccaaatcttaatcctggtaggtgacctttaaatcttagaatcaggaattcggctttagtcaaaagttaactttttccttattattgtkctcctgttggatttttaaaaatggatacattctatttattggtatttacaagtcacttgactagactgatactaatagtatgacacaggaaaaacaaaaacatctttctgtaaattttgaagtaatgaacaatattagggattattccaaaacagagcagacaaggcagaggaaaaccagtcaagctctttatagcttaaatctaaccctttacctgaataataatttaaaaaactattttataaatcaagyctcccattcctgtaaaataggagtaattcattatcacacatttttgtacctttaatttttttttttcttgatggagcccaagtcttaaagatgtcaaaactagtatcatgttccattttctaaagtcgaggctatctcagtcccatttctatagccaacagggtaatctgttactaggccctgaaacccttctgatgagtctcagcttataccccaccccacccccaaatattcacacaataggcacagtgaaaaccaggaaattagtctctgaaataagcagcctccccaggaaggaagcagcatggccactgcccattctgtgcctggacctcgccccaccggcacttggcttcaggaactggactgatccaggcactttgctggggtgcactttggcttttctcaccagttcccagggcagcctcgggtaggagtctcgggtaggagagtgttggaggccctagatctggggctacagggacttttctcacaactccaggcgagggcacaccgggcttggctcttctaggtctggcgactgctcccattggcaggtktccacaggcctctgcctgacgtccttgacaagaggaagagaggacccggctttctgtgggtgccgagccctctgggccacacagctgctgttctctgacttgtgggtttttctgccgcctcttgcgtttcatgctgtgactctggaactaggtcttaccctgtttggagtgaaggttcggggtgttgggaagttctgtcctcttctctcaggaagaggccctttgactgtgtgcccggaggaggcatgggtgcatcttttctccagggggctcctcaccaggggtatggggagactgtgctgcagcctcaggaatgtcagggtgaagaggccctggaggctgatgcttccggccaagggcttcttctggattttcarataaagtcccagaacagaattactttatgttttaatttcaggcaaatgtctctcatctgcccttttaagtacattaggattgggtttttcgaccctgcacagcacatgggggctcctcagagaagtgtctgawaaaataaaattaaataactcgctttttagcacttcgtttttactggtgatttgttagtcattgattgaggtgattgtgattgatccaattatttgtctgcccatcctgattrtaactttttttatttacaggattttaaaagatagtttcttgatcttaatgttatatttaaygttctctttcataagatggttttttgatgactttgtgtttaaaaagtgagggtcttttgagaaatagaatatatcaaattatttgttcagaaacattcaaaagcattttttccaactctgcaagcagttgtctgttaaagcaattagcgtgtacccaattagagctctgttcaagatccctcactgataacctctgtgaggctgttggtccgtgtctttatcaagcagtagtgtggcttcccaggtactgtcagctcattttggacccaatactagtttattgcctgaaattacctttaaactggaaaatcttcaagtaaaatttttgagagtttttgattaatcccctaggatacttttgaatgataggttttggggagatacatttggttgttttggcaccactaccatcagcctcactcacktgctgccaggcgccccgccagatcagggaacatcctctgtacatggaagcagccccgagcactatgtctgcttgtgtttctgctctcaaggtttctacggccctgcacgtgggccctgctgaggccccagactgcttcctcacacagctgacctggtgggcttcctgtccacacagctgcccttcctgtcctcccatccaacctctcgcatcatgttgaggggagagaggggggcaaatgagacatggtccttgctttcatggaaatttctagtgatgcagatgtctgtatatcaagtactcacacaagcagatgtaaagtcataactgtgatgaaggaagaccaattgaggacctccatcagccgaggggcctggacgctcactgagaggygaggtttgcactcagtctccttgcccaaagctggcagcctcattctgctgcccatgtgctgggcaccttctccactatcacgacttccttgacatttcagtctgttctgttcaagttttggccttccatccctytgaaatgggtcttgctagtcactaatgatctgtctcttgttaaggtcagtggcctgtatttcgtcctggtctcaatcagtgtctcaacaggactgtacagaactagccaacctcttggattcygtgggcagtgccaccctggcatccttctggctcagtcttctgtgcaggtcccccagtcaccaggagccctgcaggtgcagcctacctgcccccagcccaggctgcgctccctgcttgctctgcgtgtgatgctccggcctttgccgtgagctctgacacagtgcagcacagacctgcttgagctctggatcccctccccaggctcctgtccatcctgccccctttcagcttcctgcagtgaccattgcctggaactcaacccagtgttttttctctgccccctttttctgttagctcttcccccagtggtgtggggctgggacaggggcctcacattgtcgtccaygtttcccgaggcttctgtctctccatcccgctgtttcagggttctgcatccygctgtttcagggttctgcatcccgctgtttcagggttctgcatccygctgtttcagggtgcacrwttccttctcgggcttggctccttgggtcatgtctccagcctgacgttccagctgagaggtggtgaggcaggaaggggtgtctctgcatcaggaaagcgataaggagttcaggaaacccagtgtctctcattggctggaagagtattacacggctacctctggttgcccagatgcctggggcagggtctgtgctcgagaaaataaggctctgtgagtaagggtctcccacagccagatcaacaaggagctgtaggctgtaagtcctggttcctgactgagggaggcctaaaaagtggggctgttggggctttatatttagcacccactttttaccctctcaaattccagaccagttgagagagccgcacacactgtagataggcaagtggagatcagatacaggctctgttttagataaaagcaactggagaaagtggctgactggccaagcgggtttgctaatcctttatcccaaattagacaaacttcccacctagtaacgagcatggctgggggcaagccccttccacgtggcaggagaagaaaccctagcactttggtgtgggtgcgcctagcccaagaggagaggaggaccggctgggctaagcagcccatttcctccttctagatgcctccttctgcaggaaagagtgcgtgagttggattctgtccacagggaacagaagcgcaagggacaagtgccccctctgctctgaggaagggttttgcatatctcctgttggaagtctggaagctgggcagtctcgctccctgcaccagctgtgccggccctgcctgtcttcctgcaggtctgggctggctgctgtgggcctgtgtcctcaacactgccctgccctgaggctgttggagggacagccccagtgctcccccttcatcatccactctcctttccctttagtgtttctatctctggatttgtttctggtgagccttccctccagaaggaactgctcttgtccccatgtacttcctcgaggcctccctggtcgttcctaggggcgatcatactatagaaagaacccatcattgtcacccagaagtgctcctgagagatgagggaacctctggggaagccagcttgggcttcgggaggaattttctcctctctttatttttattttatttttttgagacagagtctgtctctgtcgcccaggcggtgcagtggcactgccagctctgcctcccgggttcacaccattctcctgcctcagcctcctgagtagctggaaccacaggcgcctgccaccacgcccggctaattttttgtatttttagtagagacggggtttcaccgtgttagtcaggatggtctcgatctcctgaccttgtgatccacccaccttggcctcccaaagtgctaggattacaggtgtgagccactgcgcccagcctttctcctctttttaaatgttctcaagtagcttcctcttcaagtccggtttctttttcttgttttctgctgggaactagatgtagttcccctccttcctcagcagcaccmtttaggtacgagaygggtggggttggccctttccattctttaaggagagtattttccactgtgagatggtcacataccttctctttggtaacaggacaaaagagcaaatgctggaaaaactaagcttatgagctttggggaagcctgrtgtgcaaatgagggaggctaacatgattttcgggctactggattggtgctcactcccaatttgaaaactagtcaggagataccgaggccctgtgtgatgtggtacaaagtataaggcgttggccatggtagagaatcatgatttttttttttttttctggaggtgggaagccattgtggttgggggcatgaactcagagttgtgccgtggaagggtccctgtggcaggagaacaggtggagagcagacgccgaggggccgctgtccaggcaggagtgatggagcatggctggtggggacttcagacacatgtgcaaggttctgaggatgcctgggtgctggccatgtggcaaggtggaaggcagtgcctatgactggacagctgggagggagcccactgtggtgatggggagggtagactagcaggtctgtttgggtatgctgacttgggggcactcaaggggagctgtcagggaggccattgggtggaagcaattccagagacaaaccgctgctccctaaaggaaaaggagagtgcctttgcctttcaacctgagctccatgtggtcctctggcccagcctgctaggcagcctcgccctgctccccactgatgtcacacaggtgtcacaaaatgaacatctgaaaccagagcttcattttcctaaatttcctagcctttctccttacagtgaacgtcaccaacacccacccagctgctggaaacctggcagtcatcctagccacctcgctttccctcaccgtcacacccagtcccctcaaacatttgtgcctgctgtccctgcgttcgcttcccacccgggtgcttgcctttccacgtctccctgctgtccagcagctggcaagtcattcctgccctgtgcttgcaggctccacggacccaccagggcatctggaatacaactgtgacttcctcctcaccccacggctgtgcttgacccggctcccatctgtctccagatcccttggagcactctcccaggtctgctgcaggcccatggcctcctcccttggaccactctccccgtctctgtctaggggctgctcacagcttcctagaaktttcttgcctgggctttgcttattcccagctggtggctttccatctgtgctcttcctctgctgacggccccttctgccccagctcattatatgaccgttgtctcccatcccgtccygacctgcctgtttatggaggcatcstctaggttctcagtggagggtgcctggcccctggaacaaaactgttgagtttgaatcatccccaccctgcctcttcctagctgcagtgctgggcctcagtttccctatgtgcaaaatggggacactcaaacctgcctcattcccgtgaggattacatgattaggtaaagtgttcgtggcagtgtgggggatggcgagtgctaggcaggagctggaggctgttctctttgggctatttgcacacatatgctcttagcctcctttcgagcactttcctcagccttcaatcttgtgtatatttgtgtgtgtttctcttttaggagagagacttctctggcattgactggacaactgtcagagcttatccttgacctgagctcactgcctctgcctcagaattgggggtcaggttattcttagtattctaggtttataaggccagacagagtccttcttccctgtagagcagaaatgacccctaatataggagcatattgttttccctcagcagagcaaatgcttcagtagtagtgttaccagcagacagatggcgctttagaggtgacatgtgatagatgcttgggactgaaatttagccgtggatcatarcctgaatgggattttcacgcatgtcttccctctcaggatttctcttaagggttgttgattccacatttctccttgaggagggggtggtggtagggctggtgaccggggaactgtaatttcctgtgggagagcagcaatttcattattcctttaatgaagctatagttgatcatccttcagtgcctagtatacagcctgttaaattagggtcttcggattgctctgcaagcctttttaaaaaaataatttacaggctgggcgcggtgggtggctcacgcctgtaatcccagcgctttgggaggccgaggcgggtggatcacttgaggtcaggagtttgagaccagcctggccaacatggtgaaaccctatctctactaaaagtacaaaaaaaaattagctgggtgtggtggcgcacacctgtgatcccagcgagcaggaggctgatacatgagaatcacttgaaccttgggaggggaccactccagcctgggtgacagagcgagactctgtctcaaaaaaataaaaaataaaaatttacaatttatgttaaaatatgtcattttaagttatgtaaatccaagcataattactgaacacaaggctcaatccaaaacatgcacagtaagcccgtgtgaagtgttcacatgctgttctgaggctggctggatctggagtttctgggagtgctctcttgggctggcacgtcttgggctgtgggggccctgaagccctcctagatgctggacattggtgtgtgtgcaacttggtggtggtgttggggttactttccagaagctactcaaggcttagtctcagtttctatctaaagatatttatatgggaagtattccaaatgtggatttataaagataacacatggatagaaatagtgtaaaacttgtgtgaactgaaccagccaagcttctagtcttccctttccaaaactttcctttttctccccccgtgttaaagatttaaaaatatatgtttaaaaaggtcacttttaacttgtaaaaattattcaacatatacagaaatttaaaaagcagcattgcaggttatgtgagattatgtatgtctgctctttggaactaggttgaaatgatagctacaaggttctttggaagaatggggatgtgtgggtgagagtggagtagacaggctgggcttactaactaggcttgcactggcccccgtcagtcactgttcccaagtcaaatactgcattgcactgaacaccagagcagcagtgcatttcctagagaactctgcaaggctacaggtggcagacttagggagcgcttgccatccctgcccttcccagctctacccagaacaaggaggcctcgcacactacctggtcatattttgacttcatgcmtttaatgaaccaaactaaaggkaaatattttmttttgattcccaaggcagacttgtgggtacccaagttcctcagcccatctttaactcagtaggatgtggcatctccattgaggctcttcatggaatccctggaggtgaaacctcggtgtccggttgctccaaaccagtgctggtgggattcagttttctggacccatttctgggtgaagtcaaggaatggaggcgggcggctgtcaagcgtctctgttgctcaatggggcaggccagtcccagcggcgacttagaggtggctggctgggcgtccctacaggagaatgggccacagggccagcggggccagcaggatgagcaggcctggtttggggtatgggccgcaggcgtggagctcgatgctgggcaggggcctgctcactgacgagttgccacccgggattggggtaggggtgggcgcggtggtctcgggctctgagcggctctgcaccggcaggagcaggactggcagcagcagcagcagcgccagtgcggatcgggccgccatggccaagcgctccggctcgtcccgtagcagtgccgcggcggcggccgctgccgggagtgtctgttccgcggttacgcggggtcctctccggtcctgtccagtgaggtcctgacagctgtaccctggcccaacccctgcccacggctgttaacgatcagcctcggggagcaggtgtgccgccacgcgcgccgtagcgctccggagctggctctgcgctcacgtgctcgctgtgccctgcgcgcgggcgggccgtgtccccgcagccccgcgcctggcgctgccaagctgcccagcgggctttagcaggtgctgaaatgcccgctgccagtcgccgagtgctgggtgcagaggatctctccagacacctaggctcccttctttcgcggcacgtgggaaaaactcctgaagtgcgtgcacagagtttttgttttagaggctttgacgttatgattaagtatacctgtgatgtaacgaaaaccttttttaatgcttctcaaaagatttgctagcgtttaacatttacctcctgtactggagtttaaaggaagcgttgcttcttaagtaatcagtgatccttttgcttttggaaattgtaatgaacttcaccatcgtagagctttaatatttctttcctgaagcagaaagcatgtgaaattttctggatagtgtatacttaatacrcaagcttttggagtttttgaatgctgggtatgttagcacaccagtcttgctgactattacgtgggagatgagtgctgcttaaaattgtgtaaggggtcagtagttacagtggtggacatacttttgccagacatggtttattttaaagtgaacatattttgtgcttatttatttatttgggacagggtctcactctgttactcaggctggagtgcagtggtaatcatggttcactgcagcctcaacttccaggctcaagtgatcctcccacctcagcctcctgagtagctgggactgtggggctacaggcrcactaccacacccagctaactttttttattttttgtagagacggagtcttgctgtgttgcccaggctagacttgaactcctggcgtcaagcgatcctccctcttcggcctcccaagttgctgggattacagatgtgagccaccatgcctggccaatgtgcttattttaattctaaatcagaatttctataattatcttccttaccttggtgtctgtctgttatcagcacaagggtttaaaataatttttgatttcttggaagtaattacgcaggcagttcaatgggagaaggcactttcctcagcacatttggggtgctgttgtcagaaagaaggggatggattcaagtcagcaaaaccagctgtaaccacaactatattttttaaacatgtagctgcatgttccataaaacagcatataaaaaatagagtgagcattctttattggagaaatagctgattctaggactgggcaggaaataacacaagtgccaggaatgccaaggaaatggcaaggaaatgccgagaaacaaacataaccacacccacatcaatgggtggtgtcaaagggacccaggagccaactgaaagagctcccagtggccaaagctggaacagtttctacaacaaaacaaagtagtattggattatagcccagagataaataaatatccatgagtccagactgacataaataaatgactgataaatgaggagaaaagacaaagctccttttccagcacaattccagatcatctctgcatctgctgtatctgctgtgtcttccaggaggtggagcacaacccttaccccaaggcaagggctgtgcagagcaacttccttccagagaggacagcatggaagtggggcggggggctcaacccagcaggggccaggtcagcctcacagtggtcagtcacggtgacagggtgtgcctgatacagtggagtgacagtgggccttcacctctgggggcttcatccccaaactcagtcccttcctgtaccatgagaaaaacatcagacagatcccagctgagggacagcttcctcaacagtcaaaaaccaagaagagtctgagaaactcacagccaagaggggcctagggagccatgacatctcaatgtcacgtgggatcctggacgactgaatctgacgaaagtgtggatttcagttaataacaatgtgttaattaatactggtccgttaaaccagcagtcctcaacctttttggcaccagggactggtgacaatttttccatgggccgaggtgggggctgggagaatggtttggggatgattccagcgcrttacatttattgtgcattttctttccatgattacattgtaatatataatgaaataatcatacaactcagcatcatgtagaatcagtgggagccctgagcttgttttcctgcaactagatggtcccatcgggggtaaggggagacagtggcagatcatcagacattggattcttataaggaatgtgcaacctagacccctcacatgcgcagttcacaatagggttccagtcctgtgagaatctaatgctgccactgatctgacagaatcagtgcaagaactgattctctgaagcccagttcctaacaggtcatggactgttacttgtccatggcccaggggttgggactcctgtattaaaccrtgctcatgtaagatcttaataatagaaaatgggtgtggggtctgtggggcctttctgtcacatctgctcaatttttcttcaaatctaaaattgttctaaaaataacgtttactttaaaaataagtgttttttcaaaaacacttttttgtgtccttatcttctgctccaaataaataattatcctgacttttgtgtaagtggttccactagttttctttgatttcttaactctgtctgttacccttacacagtatatcctttggttttgaaaaccgagtagtcagggcacacttatcgaaccaggccccaggggtcagtgacggttgatctccaaggggttcacttttggggaggggggtccctcctggagcagtgcgttcagctagctcgtatactttttcacaagtgtgttctgttcccttcagcggggtaggcctgctaccctctccttccacttgggcttcccctttcttgtctgtctccttgtgcctggcagccttgggtatctgtgatrtggctgtggttagttttggtgcagtgggatatatttatgtgctgcagtcacttctgtgaagagttaggtgctgtccgggtgctgtcagcttggattccggagttgtcctgtgcagtggaggctgtaaaggagcattgtcagggaagagaggctgttgctactgtacccatttgactggggactcctgggatagagtgagttccaagaaagagcagggaagaattgggtcagtggagacacagtgggggtcagggcatggacaggccgtgctgcagcttggagatacaaagaatgagggacgaacccagaactggaggtgtttctcaagaacagaatcttcaaaggttgagatgaaactcccatcatacttactagcaataacctctagcaaagttgaggtggtctgttttggctaaataaaatggacatagcattgctgggcccctgtgaagggctggaagcagggaaatgtcagcagtggcaagcgtgccctctggggagtagggaatttccctggcgctggcaggcagcccatgctgccgtagatgtttcctgctgtcctgggtggcctcacacagagcagctccacacctgctctttgaagttttcttggggtgcctgctggctacaaggggtctagatgtttatgacactgatataaagtctctgtgcttcccttggggaaatgctcccaagtatgaagcacccaggttctgagaacagagttggataaaaaggttgagttggagaaacttacctaacagggttaaagtggagacaaggatggcatgtgaagctttggctttacttcccaggtgatttttctgttacgcttagcatgcatcrttgctgcttcgttgttttgttttgttttgttttgttttgtttttttagatggagtctggcactgtcacccaggctggagagcagtggcatgatcttggctcaccaaaacctcyacctcctggggtcaagcaattctcctgcctcagcctcccaagtagctgggattacaggtgcccgccaccacacctggctaatttttgtatttttagtagagatgaggtttcaccatgttggctaggctggtcttgaactccagaccctcagatgatctgcctgccttggcctcttaaagtgctgggattataggcatgagccactgcacccggcctgcttctttgtattttaatatttgtgtattttatgattttctagagaagcattggtttcattttggcctaagtatgatacaagaggtggaaggctggtttctctgtttccttcagctgctcctgactggtcctcatctgttccttctcagatcacarttaactgaatatattttaaaagagaaaactcgtaagtgccctaaggaaataaggaattattttgaacactaaagctaaaagcattctaacattgtgttgcttttatgttctttactaaatttgcttcatgcacacacacacatatatgagtgtatttctcagtatgcagatgatttcaaggactggcttccttcgtgaaaacgtattgttggttgcaagaagataggggactggaaacatgattcgtctgtctgtagaggtgaagttccaagaagctcaccactgtccagtctttatgcttatgaacttgttgagtgagttctttttttatagtgtacccatgtctaggaattttggctgaaatcagcttctttgcttttttaggctttttgctagtgatagtgttgtctttgttctgtaaaacaactgtaaaggaataccaacaatctagtgcagaaattsttytgtaagaacaagctaccctgatgtcatgtcgtgttttaggactgtttgcttctcaacctgatgaagttgttcttagctgtttgctttgttttctcatccacagcagtattcctttctttgcctttatgcttgacttgcaggcttgttaaatcccgtgggaggcttttttttttttataggtcctttctctacttggctatgttgcctgctgagtttaaagcctttttatgatatttaacaaagccctctgtgttcagcgtgggttgtggttgtgtttaatgtttcaacctagactcgtgtattaagtacagatatcatctgtcacttaacttagccttgctctcagtgtgtttatcatcatgtctctaaggccatcctaaatacgtgacctggagagagagggggtggctaggccaaatgctgggatgcctgcactccgtttcttagccgtgagtctgtgcttggaaacccacgagaactctggggagccacaggccttggggcttttagctgtcccccttttctcttactctccggatgagtgacttgggaacttccgagcaacttaaaatatttagctcactttactttaataaaccatttttagtgctatctatgatagggtccttccagtgggaggtacacaaatttaacttaactatagttaaacaagagccagaaaggtaaagaaggtattgttgagaacaaatacrgctggatgcacttttgrggtgcaaatttgtctcttctctgtgtcagttgtatctccccaaagcaaggaataagtgctggagttgagtgcgtcagagcagggcttgtggcaaggcaggaagaggctgcacaaagcacagatgtgcagtttcattagtcaatatggaggaatcctgaggtacccactggctatgttgagtaaaggaaagaaaaaacaaaggcataccatgtggaaaagaagaaataaaactacctcttttgggagtatctggaaaaccctagagcagtcctgtccagtagaaatacaaaattaatatgcaaacgtcaatgttattcatatatacaaaaataatcagaagatattatggaagagacaaccccattaacaatagcaacaacgagaaaatatttaggaataaatgtaatgagaactgttcaaaagctaagtgaagaaaacaataagttgagaaagacacagaagtcgccttgagcaggtgaagacaccttgttctcggttaagatggcttggctcattaagatgtcagttgtcaggtaattttcaaatttaatgtgatgctaatatttgaaagcaaaaagactcagcttttttttcttgggctggacatgtcgattctaaaattgaaatagcatgaatacctagaaaacttagaaaagaaagagccaagaaaaggagaatagctctactagatattaaaacatactacaaaggctatatggaaaatagtgtggcaaggttgcatgaagaaccagacagaccaatggaggaaataagcccatatatagatggaaatctagtatatgataaagatagtatctcagattgttgggtcaaagatagattgttagagtcaacgttcttgggacaattggactccattttgtaaaatacatcattaggatttatagcttacaccacatgcaaaaataggctgcaagtgggtcagagaactcagtgtgaaaaaggcaactgttccartgttagacacaaacatggttgaatattacctatgtgttgggaaaggcttttttaaaggcgtaactcaaaattcagcttcaacaaagaaaagatggatgaatttgactgcattccaaaatactgcgaccagcctgggcaacatggcaaaacctatttttacaaaaaatacaaaaataatttgggtgtggtggcacacacctgtagtcccagctacttgggaggctgaggtgggaggatcacttgagcccaggaggttaaggttgcaatgagccatgatggtgccactccagcctcggtgacagagcgagaccctgtctcaaaaaaaaagtaacaactttgcctgaccaaaaacaaaacagaaaaacacaataaggtcaaaagacaaaaataccaattgtgtgaaaacctttgtagcatatcataaatgttttaaaagttgagggagaagaaacccgaaattctaggaaaatgggaaaaaggtatgaacagacacatatgcacatatacacgtacataaacatggcccatacactttaccaagataccatttcttacagatgtgcaaataatcaaaagtctcacttgatagctatttctaataatgttgctatttctcatgtacgtgcttaattggaaatggtgtattaaataaaggtgaagaggcagttgccttttcagcttaaaagagcattaaagtttatgattgttaacttctaaatttattctcagtgtgctttgaaatagactttataacaaaagcagcactaactctccctagatttcctaggaagcaggtaccaaattcttatgcacctgcatgcacaggctgccaggatgcccccgctctactgtggattattctaggctgtttctccttccttccaaccaccacacccacatccctaaacctagggktttaaatttaggtaacacacctagggcttgttaaatttaggtagtttccacacttcgaccttttttcttaggatggctctgtattcattatggatttcataagtcacatggctggaaggtacctgatacagattaaacacagaatttagttaggatagcattctgtctttgaaggctgtgtgattgcagcccaggccaagccaggcagaagttgggtcacttgagcagggccctgcaaacacacctgaaggaggtggcattgctaggactctacttttggggctgaatcagcagaggcaaaaggactgagtaagtccttgctgaggatggcacagctctcagctacagagctaggaccagaccaggctctggggttcatgcgggaatcaccagtctgcgctgctgcctcctcctgtatgcgtgtgtgtgtgcgcgcgtgtgcgtatatgtgtgtgcgcgcgtgtgygtatatgtgtgtgcrcgtgtttgcgcgcgtgtgtgcgcgcttgtgtgtatatgtgtgtgcgcgcgtgtgcgtatgtgtgtgcactgtgcgcgcgtgtgcgcgcttgtgcrtatatgtgtgtgcacgtgtgtgcgcgcktgtgcgtatatgtgtgtgcacgtgtgtgtccccatgagtcctgtggcaccaccgasttgtcatgaatgctttcgtttaacgagtcaggagcagtttcccattttgtaggctgtttttctgtgacctggattttaatggcttggtcaacaggtggaaaagtatccacctttccttatcagtctggaggctggttggttttttctgcgtcgcctgcgtcaccacttcctgatgtcagcgcacggggctctgcgcccccccaggactggaggctccgtgtagatggagacttttgtttttgtcccatcctcctggcatgtagaaggccctcaaatacttgttgaagaataaatggacgggctttggtattttataacctagcaatgcaccttttggttgtttccaggtttactattaaaaccaacgtcttgatgcccctctttctggatgcttttggtgatagagaagccaaatcacgctggttttaagcaaaaatcatgtatttgctcctgaaattttcctttgaaaactttctgtrtgcggttgtacgtcagtatgtggttttcagccacactgggaggcgcctttctctctctttttgtcgctatagacattagtggaaagccacaagtagcgtgggggctgcctctagtcacgcttcagctgcaagtgcggtgtgagcatctatttttacctcacagtcctcgctctgaaaaattctgaccacttttatttttaacattctgctctattagctgggtgcagggaggaaggaagctcaaattagtcagtttactttgtatttatttttacttgaccttttcacttccacattttgagaagaaaatgtgagactctttcctctgcataattttcttccttgaggagaaaccattttcagtcatgcttggaaagaggtggagataacctcagggtagcatgtttagcgttttccattcacgaaacaaaccttaaaatgttcatctgtttattctatgaaataattagtttcttatttcccacgaatttgaaaaccagtacatttctgtgccaagtaatggctgtgttttcttgaccatccggcaagtctctacctgggtgtggtgacttggggaccgcgttgtcaaagagccagtgaggcgggggtgtggagaatttgtttgccctttgtttttcacttacctttttctgcaggaattgaactaaacaattgctactgacaatgatgtattttaattcctaggaggttaaactcctcacctagaacagtttgattaataaacctaatctatttaagcatgtgtcaatccttttggaaattgtaatattcaaggacttgctagcatttatggctctttaaatatttctagttatagttgctgtcaggattcatttattttgattgggtaattagttttttaccattattttaaaaactaataaacattttaatcagatctcatggacagaaagccaagattcttgtgctgcttcctaaatgcagtgggcgcatctctgtcagtttttacctgctggaaggtactcctgagtgctgtgctgagctctgcccatctgtccatcctcttgggacactcatccctttcccattctctgctctgtgaggggatggtgctagtgagagctcaggtcgagagggctggggtgctccttcgtctctcagctcatcagcagtgacttggaagacaatcaggrtctacctgtgttgttgagaagcgttacgcaagcaggaaagcgcacaagaggaaggcgcagctgagtgaagcattgcagagcccgccaggctgtgccttccacccaggccagcacacggagcgctgcagtccctgaaggcttcctcaggctcctcctgttggcgtgggtgcctgccactgacctctgtgggtgacaggtttgtcactkgagcttgtatcctgcaacctgtttgtttgggcgtgcctgtttgtttgtttttaacgttttaataaactttattttttagagcagttttatatttacagcaaaattgagggacaggtacaaagatttcccgtatgccccctgcccccacacaggcacagcctcccccattatcaacatccgtatccggagccgtgtatttgttacagttgatgaccccatgttgacacctcattacccagagttcatggtttccatgagggtgcactcttagtgttggacgttctatgggtttgtacacatttatgacgatatggatccatccttacagtatgcagaattgtttcattgcccttaaagtcctatgcttagcctattttttaactatataaatgcagtcaaaggatgtgtttttgtgtgttttcttttgttcagtattacatgtgtgatgagacttgcctgtgttgttgcctgttcgtttttactgctgtacatagtactctgctgtttgaccatatcatatattcattctgctgacgatggatagttagacggtttccagtttggggccattataagcaaaactgytctgaccatactgatacatgtgttttggtaaagaagcacaggtgttgctggggtggatgggctggctgtgagcacacgcacttcagcgtgagtgggtgatgctggcatggtgcctggttgggcactcaactgcctgctttcaccacactccccatgtggcatcaactgctttggaagtttctgtcttcttaatttttaccattctgggcaggtgtgtgtggtatttttctgtagttttgattctcatggacctgcttactagtgagattgagcttttgttacatttcatggaattctggactctctgagatgcctcccaaagtgcccagctacagcctctgtcatcagggaaggagcaggtatgggaatggtgtctctgcacacctcatgtcttgcctacatccttcttcaagaaaatactggttttccccctgaaaatgatagaaattgactcatcatttttgagtctagctcaggtgtcttttctggaattgccttttttattcggtgtaaagaggcacagggacttcatatctgctatagatgagtgaaggttgcctagacatgcacacraggcccttggtggacttcccctatccctggggctcctcataacccttccctcttctcttccctggactttctgggctggggccagggcttggggtcgggggtgagccttcctctcggtgtgtatctctgtgtagagttgcatggtgagattcggcttctgttctaaatgcagttgggtggaaataaagcagggatggtcctgagtcacccacattcctcttggtcagtctgccctggtgtgaggagctggcagcctctgcagacctttggtcccacttcccatttgggggatgtaggcttgtgttataaaataggtgaacatgtgatttactgatttactgcttgaacagggacacttttgagagtgaaagggcctgcaattattaatgaccccaagatgacatgtgataacgaggaagttctggggagatcaggtcatgatccccagagttatgatctcaaagatggagagtgtcatagggaggatgcccctctgtgagttgtgaggggccacgtgtgtcctgtgtacacaggccctaaggggtgctggggccatgtgggtagtcataggaagatggctggagttgggaggcagaatgtttaagtatttcactcattgactaaacttagttgagttttatttgtctgtgaaaagggaaatctacttgccttgcttgcacgcctytcctagggatattttggggactaaaatgtgatagtgaattttaaaatattggttgaaatggccaggctcggtggctcacgcctgtaattccagcactttgggaggccgaggtgggtggatcacaaggtcaggagttcgagaccagcctggccaacatggtgaaaccccatctctactaataatacaaaaattagccaggcgtggtgttgcacacctgtagtcccagctactcgggaggctgaggcaggagaattgcttgaacacaggaggtggaggttgcagtgagctragatcgtgccactgtactccagcctgggcgacagagcaagactctgtctcaaaaacaaaacaaaacaaaactatatatatatatgtgtgtgtgtgtatatatatatatgtgtgtgtgtgtatatatgtgtgtgtgtgtgtgtgtgtgtgtatatatatatatatgttgacatgtgagtttttcagtttactctgaactctctccttgtctgttttttaaagcatcctgaaagggagtgtctgtacagcgtcacctgttaacagccactaggaagctgccctgagagttggacctggccgagctctctgatacttgagcagccctgcccagaggagcctgtgcagcacatgagggttcttcagtattggtcggtgtttcgggagcccttacaatgaatgaacacagctgcagcccagtgacccctcttggacaagtgcggagatcagttttagctcagctgctttctgaatgtttcagatatttcaaactggaagtcacaagtagcttttacttttgcaagcagtctgctgttatgaatagcacgtataagaaaatttataattcagttagttaaaaatatgtttgagcacctgttaaagcaccagaattcttttataaattgaggaaagccatgccatctaacacatatgyggcattaagtgttcttttaataaatattatgcttagtagacatactctacataccaatcagaggttgccatcctaaaccaaaactacatatccagcacattctgatattaggcggtggcttacaccagggaaggcttggaggttgttttggctcctaccctttaaaaggcttaccagcttttagatggagtcatagataagacatggatagtaacagaaaggaagcatggcttatcagctgtgtcaagtcmggacacatgtatccccattcacattgctgaactcaggaagatatccaagcaccattgtgacatacttgtccacagagaccgcagataaccccagcaccctctcagagtggtgccttggtgtttttgttcataaagccttgatgctcaggcccatccgtcatcccgggcaggtgcgtagcctgtgtggtggatgccagggtcaggggagggctttgcttttgcagagtctcgaggcttaggctgaatgtgtttttaaaggtccgactatactgaaacaaacattaaaaaatattcaacatcacttaatttttattgcttaagagcttatctggctctcccattggctcagtaatttggttgctattaataacgttgttgaggttgtcatcgtcaccttaacattgtcatcatcacctccagtaatagctaacatttattgagttcttcctccatgcaggaactgtgctgagttctttttctgcattattttattcagcctttgctgcagccatctgcagcaggcactgttactaaccttctcctgccagagggaacgcttgagatgctgcagggtgacagtagcctcagagccagggggctgcattgctggatcttcaagcaggcaaactgccaactctgtgttcataatcctggtcatgggctcgcactgacctgtagagagctggatatggggaatggattggagagcttttatttgaaacaacagcaaagtggcatgatcttttgggaatacactttttcaagtcatgtatccactcacagacaggctttgtgagcctcttgctttgttaagggcccagggaagattttaaggcgaccaaacttccagtgacaaacaatatttgaaattagtctattcctttaccccagaaatgcagaaatacatggttttggatgtttgacctcattggttggtgggcatgaggaggtggtctgctttggtgccartgaccgtctgtgagtcacagagtgagtgaatgctgagccgctgtgatgggaaagctctctgctgagttggttcagtctgggtcacagagtgagtgaatgctgggcygctgtgatgggaaagctgtctgctgaattggttcagcagtgcacctgcttcctcacggggcattagccggtcrgggcgatgtctctggatcactcaacttgtccctgacagagcaaggaataagaaacccagttagattgtctgtatcatcagatgccatttacatcccagtcaaattagcagccagatcactgatttcttataggtatacatcttttgacttcagcataatctcttcccctttttctgcatcyttgggttttaaaggatgtttactatgtaaatgtttaacatgtttactatttaaacttaatagttgaggtagcttttaaaatttgtgtccattaaacccaaggactcttgcagaagtcgtatggtttttcttctttcatctataatgcatgtaaggaattattcacttgctctaaagttcaaatgtgtgagtttctggtgctgttacataacacgtggtattgtgggtcaaggggagttagtgtctcacctaaaatctggggccatgatgtcaccacattaaatagtagggatgyttgctcatcttttaagggtatttyttccccctgcaaagcaaaatgctgaagagatacatatttgttaattaactgatttcaccctcgtcatccatcctctttccataaggaactgtatgttgcattcttgctgagtgcagactaagtcctttgtgcaaggttgggtcatcctggggtgaaaaggtaagtgctttcggggatgctgattaaggtggtatctgctgtgcctctctcagtgtccccagggcgaaattcctcaggttacagtggcaggaacagctgcttgagctcatttttgtcttctgaacaggatcagtcttggaattggccttttctccatcttcagccccagggtggggctggcctgggtagggcctgcgcctgtgcttgctgcgcagcagcacccctgcgtgccttcccttgcctcggctgctaagtctttggagaaaactctacattgccaagcttcttctgaaagatttaattttttatttagaaacagtatgcttattacagactgtgcagactttgcagaaatgcaaaactaggaagagacatattagtccctttgcatagaagcaacttttgttattattttgtatgtttcctttgtatctgtattagtgtgttctcatactgctaataaagacataccaaagactgggtgatttatgaaggaaaaaggtttaacagactcacagttcagcatgactgagaaggcctcaggaaacttacaatcatggtggaaggggaagcaaacacatcattcttcacatggcaacagcaaggagaagtgtccagcaaaatggggaaaagccccttacaaagccgtcagatcccgtgagaactcactcactatcacgaaaacagcatgagggtaactgcccccatgatacaattacctcccactgggtccctcccacagcacgtggggattatgggaactacaattgaagatgagatttgagtggggacatggccaaacaatatctgtgtcttttttcatgtatatgttttttttttcttttctcagcataattgatatactgtggttactctacctatttgtgtaggcctctcaggtcattgaaacaagatgttgtacaaattagcagatgacactggcgcatggaggaatggtttgtattttaattttcactgtataacattttagtaaagcttttactggaaatgttttctacccatatcctcaggaaaccatgtgaagtagacagccttgcatttcctggattgctccctcgaaggatgaagggagcagttctatcagatgctcttcccagcctccttctccagggagacctagccgctgctgttttgagtttcctgggaggacatcccccaaggactctctggcttgtccttgtgaagttggtttgctttttgtgccagctttttaggcttacaaaatgttgtgtgtgtgtacataggaaaaatatggaagggtacgtacccactagtttgtgtcagcactggattctggcatatataatagatgaggagtttctgttatgtatatgggatttctgagatacacaggggttttctgtgcacatctctctataacgcagctgtcccgtcacatcctgcatgtcagtacaggtagtgccgttctcttcgtaggactgtgacactttatctttgttctttcacagttaaaaaaaaaaamgcttctttaaaattctgactttatataactaacgcaatgctcatgctacttcacttgttacaagaacatattattctgtcctatagatgtactgcagttatttaatggatcagctattgataagggggcccttttaatgtaactattttaaaaaatggaagtaataccagcacatggtaaaaaacacattgcagctcatgaatgggtataaattaagttggagatttcctctttctccctccccaccccatgccccgtttccagaggtaaacaatgtacagtttgtgttttcttctcttaagttcttcttgtagtcaccattatagctttaacttttctgtttgtgagttcatgtggaagtcaacagtgccttcacactctgagttttgatgagatttatattgacaaggcttaaaacatttgtagtgtttcccatctatcattaggctccctgtgcttttcctgcaagtgtagtctaaacattttaatataagaaaagtaacatttatagtattatgatagtatattttgccatagaaccaagtggtatgaaatgtaattctgcctcaccaaacctttgccaataaaaggagaatattcagatggaactcccagtttctctttaggtgtccgctgtttctagctgcctcagttgccatggtttctcctatcccatggtgttggtttcttggattctatttttgttttgctggagcacctccttaatccacttccttatagaatggatggctgacagacttcttaattcacttccttatagaatggatggctgacagacttcttaattcacttccttatagaatggatggctgacagacttcttgggtttttgcacgtaatgttcaaacatgcaattactttgttctcatacttattgataatttggtagggtctagaattctaggatcgtataattttccttttgaaatcagaaaatattctctattattttccagagtctagtgttgktaatgagaagttggatatccgtttgatccttgttctactgcaggtaaacatcttctactctctccttctctccctccctgggcttcatgtcctgacggtttgatttttcgttaccctaaacccggatctgcttctcttccagcccgcgtgcccatattgggatcaccccttagaaaacctcaggctttctttggagagcgattctcaggtttcagcccaggaataaaagcgttccctatggctcctgcttcttgggaagacccctcacctctgttgtcttgctctgcagtttcctctgctctctcgcatcaacctgctttcgtctgccttatgccctaaaagccctggcaggctttcttgtgttctgctaaatccctctgtaaatttttagcaccgtgcactattatggttcattcaccaccaaaaagtaccttttctgacattttaacagagctctgggaagaatggagagaagatatggtgtactttatcaccatttttaattaaaagcccttttaattaattaatttagaggcagggtctcgctctgtcacccagggtgaagtgcagtagtgtgatcgtggctcactgcagcctccaccttctgggctcaagcaatactcctgttatcagcctcttgagtagcttggaccacagtcacgtgccacaytgactgattaatttttaaattttttgtagaggtggggtcttgccgtgttgcccagactggtctcgaactcctaggctcaagccatcctcccaccttggcctcccaaagtgctgagcacaccactgtgcctagcctaaaagcctttttagatcactctcagtggcaaaattagtgccttggtcacctttaccagtagctgttcttgctctscagtggaaatatcactcaacattatcaaagaatcgggatgaaattaaatgaaccagtttaggtacttttgatacagaagttcttatgagacgtgttgttctttactatgtaagagtgtggccataaacttaaaaatagctgggtaactttgttacacttgccttgatggtgtgttgcaagttagttaaatttcatatactcttaatcagcacatcaccaacaaataaaatgttactgctgcatcagaatttagaggaggttctatacatctgtttcgaaataaagacggagatgacttagggtacttataagttgttgaaaaatcatggctcctgaaactatgaattgtcatcrtggtatatacccagacagcccacattaaactgctgtgaacatgagaaaayggacatcgaaatgataaaagcaagagtgttggtaattgaaatccattataaataaagctgtcattggtaacgcacgaaatgctgtttctgaggatgaggactttgtggcccccacgtgggcgcattaccaagctttgcagctctgcacaggagcctcccttcttgatactgaactagacctctataaagcctagtaacacctcaggtttaggttataaatcttaaattttagtgccccgtaataattcacttcgtaggttaccatggactagcccttagttgcactgagaaaagaaaggctatgaaattttgttggtgaagtgccaaagaaaggattgggttttgggtcatctcacagcccatggtgagggctgtctttggcctctaccgcacggacaagtttgcatgtcagatgttggcacacttgtggggtattgggttcttttgaatatctgattaaatccatttacattttcgttagaaaaattcatctgtgcatatgaacgcatcatttcatatatgatttcacacttctcattgtcttcctgaagcccattcgtgaactgtcgattgaatgcctgctctggagaggagtgtgaagctgcacttcttccgtctcctcctggcactcgctcaggatcctcacaggtgtggaaaacactctaaggaagcctgcgaaggccagatgtctcccttttgccttctttggttctgttcatgatggccttatcacggacacactaggaccctctgaggacaccacccctgccaccgcattgctctgggggcaacttccgagcttattgtcttcctccagcaagggcaggaatgtggagaagctgtgtgtgctgggcctttactttcattattggcgacaatgtttgttttcattttatcagctttctttatcctccatttttttatcttccacaggtagtgtatattttgagaacagcgtgaggtttattctactaatggaaatttacaaaaataccagtttgaatgattgagaaatctaagttaaagaacccttgaatagaaatgtcgctgttcagtgcgttgatcgattctcacatctgaagccagctgtgtattcttggtatgtgtgtattcaactcaggtgtgacctactgtcttttatatgtccctggatttaaatatgctaattttgttatgatttttgtgtctacatttgtaaaagccgctgatagttcatgtctggcacattcttgacagattttactaccgagattatactgggctcgtaaaacgagtgggggatgttccctgtttttttgttcgctggaacggtatgtgtaagctttgtgcttttcctttattcagccagtgctttcacatgctgcttccttttatagccactcttttttgctacatattctttctctacaagagcacagttcttctggaatgtgtcccttaggattaactatctcaggtgtgatttgtgtgaaaacatctttattcttattgtggaaagactgttgttaggtggggagtttactttcccgtctgcacattgaagatctcatcctgctccactactggtctcttccctgggccctgggcatccgctctcagcctgactgtccccctgtgctcccgcatcatttctctgtgctgtgtctgggttcatgcttatttgtatttattctgctgcgggttagttggccgaatctgtttctgtgagagctcccatgcttttggtactttctgtctctcgtgtgtctctgcactgctttctgggttattgcttcggttctactgcccagtttggccattttctctttaactgtgtctaatatgctgctaaaacctgtccactgagcttttagcgttagtcattatagctattatttctggagggtctctctgcttccctgtcctgccaagtccaattggtcattcttagtttacctgtttactaactgtttgtatctcctttagccgttgttttctgtacgtatatggtgtgtttgacttttccagcatgttcaaggctgttttcccagctgtatcccctcctctcgggccatcaactttttgttccccattgttgctactaattcttaggactaataaagcacttcaaatggcagctactgtcaaaaattaggaagaaggcttctttgcygtagcagcctccagttgattactttctcttgacctgtactttacttgccacgagcatatcatgcctctgtacttgctgcagtaattactgtctcgaaacagtgaaatctcatcagttgcccatatgtgtttaactgcacacgcgtgcatagtcttggctttatgcgaggtagaaaatgagagtacttagtttttggcagagcagagcctcaatttccacagtctaattaaattataatgataaatatcactttaaaaggaaacagttgcttcgtttaatcaatatgattattactggcacagcaaatccatcaagtgctgtgaatgataaatgtgttttaatacaacttgcagtgtacttgctgttggtacaaggcatgttaaatcctcagtggtccctcttttcatagcattgctgtggcactggcatttccctttgttaggagayagtggggtataaacccattgtggaaaccccttcagcttgacaaatttggagtcatgctattttcagaagaggatttcctgcgactaggagcagtcacccagagaaagctctggaaaggtggtggtgctggggttgaagatgagctgctggcccctggcatgtcagtgggmggaggtgggagacgtgcagagctgcctatcccacagtacttccctttccccatccaccctttcaggtggctcactccccaccagtttcgcaggatggctcaaggcaaatggagaaaacggcacagrttgaaactcttggccgtagcttgcgagcttgcctcttagcacctccaaccacgatctccttgaatgtagtctcctcagtctctcttttttgtgtgaggaatataaagtttctagttgccttttcgcataatctcatagctcttctgcacctgtggttccttagctcttatctgagaccgtggcaggcagacagctggttgcagtggttggttagttgtttcatatggttgatcatacagcagctacttggtcccattgttattgatagtattgtataaaatcagttgtcattgctggcatttttttttgttctgttgcctgattatttgttttctaatacatttttattgtgagatacctttcttgaacatggacacatatataagagaataattttaattgcatgtccatgtaactctcacccaggttaaatagacactgtgtacctcacagtttccttcatgctcctccctgatgataactccccctcatccatatgacacatctaatatatactacgtgtgtgtgtgtgtgtgtgtgtataattaattataattattattattttgagacaatgttttgctctgtggcccaggccagaatgcagtggtgtgatcacagttctctgcagtctcaacttcctaggcataggtgatcctcccactgcagcttccagagcagttgggattacagacatgagccaccactcckggctaattttgtttactttttatagagatggtgtctccctgtgttgcccaggctgttcttgaactcttgggctcaagcgatccttccgcctctgtctcccaaagtgctgggcttacaggtgtgagccatcgtgctggcctttttgtttgtttttgagacagtgtctcactctgtcactcaggctggagtgcagtggcaggattatggctcactgyagccttgaactcccaggttcaaacagtcctcccgccttagcctgctgagcagctgacaccacaggtgcacaccagcatgcctcgctgagtttttaattttttgtagagatggggtttccatgtgttgcctaggctgatcttgaactcctggcctcacgtgatcctcctgccttggtctcccagagtgctgggcttataagtgtgagccactgtgtttggtaatatcctatattttgaaataatactgtccttttctttttaattttaccatgtaagaatgcatccccaatcaatgtagttcagttttgcctgtgatggaactttatccaaggggagtcatcagtatattcttttgtgtttctcttgatttattaatgaagtggattacataaatcgattttcatacattaaatcatgtttgcattcccatcataaattcatcttaatcatgtttgatcgctttaaaaaatattattggattgagtgtgatcacattttgtatacgatgtttacactgtatttgtaagattgacttactgcttccttttcatcttcacagaagtgtcttgttgaatgttggattcactttctagagaagccatctagtcatggagtgttctttccaggatgatttttgtttactgactataatccatccctccctccctgcattccttccttccttcccttttcttctcttttctttttcttgagacaaggtctcactctgtctcccaggctctagagtgtgatggtgcaatttcggctcactgcagcctctgcctcctgggctcagacgatcctcctgcctcagccttctgagtagctgtgactacaggtgcacgccaccacacctggctaattttctttattttttttgtagagacaaggtctcactatgttgccaggactgatcttgaattcctgggctcaagcagtctgcctgcctcggcctcccaaagtgctgggattccatgcatgagctactgcatctggcttctaattctttaatgtttgtagttttgtcagattttctgtttcctcctgagttagtgttaataagttgtatttcttttctttttaaatggtgatrtgtgtgtgtgtgtgtrwgtgtgtgtgtgtgtgtgtgtgtgtgtgtgacagggtctcactctggttgcctaggccggagtgcagtggtgcaatctcagctcactgcagcctcgaccattcaggctcaggtgatttctcacacctcagcctccgaagtagctgggatgacaggcgtgtgttactacgcctggctaatttttgtatttttagtacagatggttttgctatgttgctcaggcttgtcttgaactcctgggctcaagtgatccacctgcctcagcctcccagagtgctgggatgacagacgtgagctaccgcacccagcctaataagttgtatttctcttggagtttcttcatttaacctaagcttacaagctttttggaataaagtttataaagcctcttactatatttttagtgttgtcagagtttaagtgataattccattttggtttctcttgccgcctgatgacccattcccaacttagtgacataaacaacaatcactttattaatgctcagccaggtagcctgagtgtctggagctctgcttctggctgtcagctgtggctttcttggttcttctcagtgtcctgtatgagaaggcttcttcagtgaggtggctggctcccgcctggggctgactagacatccttctctgcatgtagcccctgtgatctcttcagagcatctgagttggctccccagagacagtgttcccagaaataggaggtggaatctggcttcctcttcaggtgctggtctggacctggcagtaccacgcctgctgcgttcaatgggccagagcagtcacccgcctgctgggactcattgggggaagtaagatcttcccacacaaggacaggagagtcacattgtggccatcaggccttcctgccctccaattcaattccaaggctggttaatttgggctttttctcttgtgttccctttctgtgtttccatgagtcttgccagagatcactggttcactgcattgtcttttcaaagaaccaatgtttatctttgtgtacctgccgttatatgtaattaatacaggttgaatttcttactagttccctttttctgttttctttgagcttactttgttcttctctccctgacttgttcaggtaggcactctttaatttttttactcctattctagcttgagcaccgagctataaaggtccctctgatgtactgctttatctgtgtgccacacaattctgtacataatcttttctagttttaagttctaagtgttttctgttttctcctgtgattattttcttttgtctatggattatttagaagtgtattgctgaactctcagacatatgggactttctrgttatacttggcttgttaatttctaggctcatggtattacgatcagaggrtgagctctgtctgatttcagccacmtgaaatatgttgagattttctttacggctgggatatggtctatttttagaagtggctcwtgtgtccttgaggagctgatgtgtgatgcactgttaggagcagcgtcttgcatgtgaccrccatgcagcttgttaattgtgttgtgcagatcttccatctctccactgttttgttttttcagccgctgtctgctgtctctgtcacctgctcctctccactccctccatgacaaaaagactccggtgtttttgaccatcttttattgcgcccctactgtgatcttagtcacggggccaagcactctacatctgttcctccatttaatcctcacggcaccatctgcggcgggtgttccttgtgtcctcgtcctgtcctcataggagcaagcctggaaggggctgagtcactgttcaagtcacacgactgcaaggctgaggtctagggtggtggcctggacccctctttcctggaagccatgcttttcctgaaaccccttgcaatactcctggcaagtatggcagttttacctcagttggtatgagtgtactcaaatgggaggcaaccattctcacacttgatgtttagactttgcagcttccaaaacccactctgcatatcacctgctccctcctcaaagtggctgggcttcccatgcagtttcccatcctgcagacggcccagggaggtcagatttcttggccaggcttgcagagttggtgggacatgatgtgggcactagaacccagttctgtaaatcttggtttcatgtcctttctgctgtgtttttctttctctgtttaggcggtggactttttggtgtgtaaagcttctagaatggattttacttctttgtggctctttggattgagggaggggctaggtgccatctccagagaagcttgttcagctcatgctcactcggggcccttgctctctgcccactggggasgggctgtggtggagctggattcggactgagtggaggcaacgctgaaggtcagaggccaacgtccttgcacttcttgacactctccacccaggcgtggtgattgggaccgctggggagggtgatttgggagcttgaatctggtgtggggatgatgggggtcattgatagtggggacagttctggacatgtggccctcattctctgtgctggacaagatgactctgtgacctgtaattccaggctgatagagcattttcagtgacagcccatttgacttgatggtgctagtgcaggacacaggtgagcttgtctctgtgtcttaggtctgtcccagcagacgagctgacgtgtgttgtagatgaatgtcagctggtcacaggtgggaggtttggaaggtagcctccaatctcctctgaggactgcagcagcgaccggggcagcaggaacgcattgtgatggcctggccaagtctgcatagcgagagtcgagccactttcacgcgcaccttatcccacacttcacctccttcctccaggttcccactcagaaacccgctcacccctggacacacctcccagagacttctctttggaactctgcaatggagaaacccattgcagacttccccttcttttggatatcagtttgcttttcaggaagaaaattttaatactccatattgaggttttataattatattagcatgttgaaacattttctctaatggcttgctggttgaaaacgctttcacacagagcagaaactagatggagatactgtttcacaacctctgcttcagaagcagaggtggcctgtagcttccaaacccgggcagagcacgtgcagggatggtgcgtctctgtatctggactcacattcacatgtgtgcatgtgtaggggtgtgtgcatattgaattgtaaaaaagatgagtacgtgtgagattctgcctgagactccagtcctcagtgtgtggcctggtgccgctgatgccgagatgttgggctggcagcgatctgcctccgtctgtcacaggtgcctctacctgctgcaggcagacggacggagacrtgatggattgcgcatatcccctttacagattcggaagagtacatttaaaataacttaaatttgtatttagaagacttttcatggagagtatttattgttatagagttcacttctgaaatggtgacaaagcttttgatactgaatcaaacaagtgtgaagttaccgaatctctctgttacacagagtggagcctttcaggctggcatggagagcttaaggggcaactgaaggagacacactggccaagcgcggagttctgcttacttcagtcctgctgagatactctctcagtccgctcgcaccgaaggaagctgccttgggatcagagcagacataaagctagaaaaatttcaaggtgagtaaaaacctgtaaagatctgatcaaatctgactggtagaaatgcctttttcttgatataaaccgcttaattaagccttttggcttgcctttgaaagatgctttattgaatacttcccrgcacagatgatctgttactgttggttgatttctaatcttactgcagccttagctcacccatgagtccctcctgcttgttctggggtggtgcctgcygccctccagtggcatgtgtggcacctgctgccctccagtggcatgtgtggcacttgctgccctctttggggtcagttcaccatttattgagtcagtgcttcatgccgggcactagacttggtgaaagccttttaccatcaattattattttcttaggagtaattaaaagaaaattttcctgtaatcccagcacattgggaggctgaggcaggcagattacttgaggccaggagtttgagaccagcctggccaacgtgacgaaaccccatctctaccaaaaatacaaaaattagccaggtgtgatggtgcacgcttgtagtcccagcctcgggagactgaggcaggagaatcgcttgaacccgggaggcagaggctgcagtgagctgagatcatgccgttgcattccagcctgggtgacagagcaagactctttctcaaaaaaaaaaagaagaacatttctttagtacttatttttggcgactatctcatgattcagcgtctgcttttgagagaagttgtgacaaatactaaaatcccagtaaaattagtatggtgtcagattaatttacttatgagcagctgagtgactaactcaggaagtccagttgtacatttccagggaagctttttcatgggttcagatgagatgaggggaaagagaaggtgtcagagggctgctgctggctggaggaacgcaggtgtgctcctgtgtccatttgctctgtggatactgacgagcgcccactgggcctcagatgccctctgggcatggcagggaccaggcgctcgcttggcagctctcatgtgagccgctcactggacacagccgtgctcccgcctgggagttcgggatggcatgcagagctgtggggagggagcggtcaccagggcgtgagtgtggacagatgggagtggctggtgcagagccataggtagggggcggtcaccagggcgtgagcgtggatggatgagagtggctgggagcctaggggggacgccgtctttggggagtagagacacacccatgtctgactactgggttttgagtttgtgccagcaaaggtcctgcttgccatttctgtctgtaaatgtcaggaatttcaggtaactggttccctagcgagacctttaaaggaggctttatcttcaaccgatgctttttttgggggggtacacaggcagtccaagtatgggaaggtcaaaatcaggtcacctttatcatggcttgtgctgtgggatgggattttattttcagccacagcgcttcttctagcttaattagtgataggaaatcagcttctctgtaaccagaggttattgaaagaatgaggatcccagagttggaatgagtctgaaagagacgttgtggtttaatattgctaagttaagtgtcratttgtgactacctatttttaacatgccacagaagtaaaacattgcattaattatgccatatatgtgaaatagcaagtatttttatataatataactgtgcattggagaaatgaattatttataatcctttgcaccaataaattgttcttaaaagcatagaaaaaataatcaggccagaaggagatatctaaagcatgtgctgagaaagcaaaactgaagagctggaaattataaaatattacgacatgatgagtcatatctcctcctcctgattctgtgttactaaatgytagctgcgaatagaaatcgtgtatttcctttctttcataaaataagagctaatttcggcagcaaacagtttggcgtgttattcttttccyttttcagggtggtttaaataaaaataaataaacatgaaagattttggctggaacatctttggaagcacggccgtcctcagcctcactgcactgtctggtttccctctgagcctccctcccgggtcctgccttagtgctgtctgtgccgtgtagccacaggtcgcactgcagggctgtggggagttatttttagtttcaggcagactcactgtttttgcctttctttttgcttgaaaagmctgaagttatttcttgtgtttttatacatgagattatcttctgaggctggaacatcttggggggatacaatagatagaattcctatagtaattcccctgcgcaagaggaattgctgaggagggcttcgggaaaccttgactcttgttgaagcctggaaagctttctcagtctttctcattgccaccccacaccacatcttctttttgtaacaaatatttattaactcatctttttattttaaaatgaagttcacagaagatattaccttatataattatagccatataatgttaaaaagcagtgtcatgctgaaatgtaatataaagagaaactgaagatacataataaaatagttttctatgccactgtatggacatttaggcactgctgctttcactcggatcactgagtggtgtgggcctgtcagtgcaggcagatgtggggtaggtactgagctggtgacctgaaaaccataagcaatagagctgagtggcattactttctgaaatggtcaaacctgaaggaagcagtgttcagtcttccctgtctctaggtagtctctgtatttctggaacattgagtgtatgttaaaagtatagaaaaatgcattgtgtcaatccaaaactcagctgggctrggcttagagaattatgagcagcctttccacctgcatggaagtccttttgtgcaggacagttcyttgtttccggggtggccctgctccctccaggaggtttaggagtgcccatgtcaccatgatgcctacgccacttctcatgttgctacctgttgctaccaccgggcatcgctgccgcctcctgctctgtgcacagtgtggtgtggccgcctgaccgactggtcaggaactaaagttctctcgaagccttgactgaaaggagaagtgaggaggggcatggagcccagtgccaagaggcagctgcgtctttaggggctggcacttttcagaggggctcttgggrccagaaggaaagagccgtcattcaaggcttacacagcgtggaggtgccctccctggggtgtcctgtgtgctgacctctgtcctggtgcctggcggtgtcctggcgcagagctccgcaagcctctgcggggctcttctctgtgtggaggttctcgagatgggcagtccgggtggatggtcaggccaatgagggccttcgaatgaagcacattattgtaaggatgctaattctggatcctcagatattgtgacaaaaacttgacatttttcttccttcaaagtaatttattgactaaaataaccaactgagcaaaggtgatgttttagtatctaaatattccaaaagattactgaaattttaaagtaaaaatttggccaagaacragaagtctctgaatgtgcttttctggcatgacccctgtcaccaggaagctgtcagtgtggtgttgggcctgattgattcgcatcagctcaggtggcgtcctattggaaggtcggcagtgggagagcagctggccaggtcagaggattcatttctgtctgaagctttgtgaggaactaagatggcttttccagtagcctctgtcattccagagagttttaagattgcttttatttgttcttctaccctggaactaggaagccagacccaagaaatgtatccacaccaggttttgcccatagtttttaaaaatgttgaatttctttaacttgaggcyctcacaattttctgggcccccataagttatagaacagggaccaggcctgctaccttgtgggggctgggtgggcactggctccccagggcacagatccttcctgtgggtgggcttaggggatgtgagggattcactttcagatgtgacactccagatgtggggttggtggcacattttttttgtccggttacatccaagtaaaaaggaggacaaattcttactgaacctatgcagtaaactccattgtcaggaagagtaaagtgtcttagcatgagtgttcctgaattctgaaagttcaggagagtaagatgttacctagagagtgttttatttcagctttgaaagcagagtctactggatttagggctagagatagacgaagaagaaagagaaggggcttctttgagcgcacattagaaaatacaccataaaagaaaataccgacaatcttccaaagccacagtcagcgtttccctgccagctcctccagtcttccttccttcctgtctgctgggtggcggctcatctgtcaagttttcacagtcatgtgcttctgggcgcaaagccctggtgagccyggctcgtttccctggtggaatcggacagttgtcgaaggggtgtcagcctctgttcagaagcctgagcccctgattctgttccttgaagtgtcaggagttaaggtgcctgtattgagcaggggctgccgttgcttctgactgagggtcctcttcaggcccactggctcttggcagagctcagttccttgtgaccataggcctgtggcgcttggctcctggagactgcccatagcccctgccctgtggccctcttcccagcatggcagtttgcctctcaaggcgtataggcagggtctcccctcttcctttcctctctgacttctctcatccttcaggggtttacctgatcaggccaggcccacccaggaaaatctcccttttgatgaactcagtcagctgatgagatgccttaattgcatctgtaaaatcccttcacctttgccttatgtaacactatatcccatcatgttcacagttcctcccgcctgcaaggcaggggagtgtacaaggtgtgtaccccaggggcaggatgctaacactgcactgactgagaaaagaatttgtcttacctgtacctgacaggtgtgtacctgaaagaggtgtgtgcccgacggtgtgtgcgaccgatgggtgtatgctcracagtggtgtgtgcgcccaccgggtgtgtgcccgacggtgtgtgcgcccgaygggtgtgtgtgcccgacagtggtgtgtgcgcccgatgggtgtgtgtgcccgacagtggtgtgtgcgcccgccgggtgtgcgcccgacgggggtgtgtgcccgacagtggtgtgtgcgcccgacgggggtgtgtgcccgacagtggtgtgtgcgcccgacgggggtgtgtgcccgacagtggtgtgtgcgcccgacgggggtgtgtgcccgactggtgtgtgcgcccgacgggtgtgtgtgcccgacagtggtgtgtgcgcccgatgggtgtgtgtgcccgacagtggtgtgtgcgcccgacgggtgtgtgcgcctgacaggagtgtgtctgacatgggtgtgtgagcgcccggcaggggtacgtacactcggggtgtgtgtgcctgacgtgtgtgtgtgtctgacatgggtgtgtgcacctggcagaggtgtgtgcgcccagcagaggcatatgcctgacagaggcgtggcttagtgttcagggtccatagtacatgaagaatcctacagatccctatggacaaggcagtacagtagaatttggggcaaaagacttgcacagatttttttttttttttttttacacaagatgaaattgaaatggccaatgagcacaccctcattcatccagcgagcattgaggaccccctagaggccaggcccatgagtgatgaagatcccgaggatgaagacgccttgccagccaggtcagtgggtgatggcatttgtggtcaggggcacccagcaccacacccctggctgccgttgacagctgggtgagtcccctgctgcctgggcagagccacctctgcagatgcccaggtgggtctcctggggcagggactggcaggctgtagcctgtgagcagattctgggacctgaaagctaaggatggtttttacatttttaaggagttataaaacaaacagaaaaggaagaatctgcaacagagaccataagtggtctgcaaagccaaaggtttatagaaatgggcagacctgctctaaggggcctgcttgctgatggggccttgtctggattgccagttctactaattctggaattggaagttctcatggaggactgtgtgctgggtaggatttccagatcccaagatgctttggctgcattcaaacccacagggcagagagagccctccgccctgttccttggcagaggcctccacactccgtgtgctgaccggcctgccagaatgacaacaactgtcagctgtctgcatcctcctggcaccccttagtgtggctgcatactgaggggagttaaaaccataaacaggtggagaatatctccttccagggaatctcagaggactcagtgatttaagaggaaaagaccaaactgctgctttcagcaggaccactgtgtgctgcctgcctgtcagtgcatacagatacggggtcctgagttggtgacctcaaaaccgtgagcggtagatagacagagtagcccctaatgaagcagaaagactagaagagacaggacctaatttaggtcgaaaagcaaagtgaggcctcagaagatgaaggcagagtgcgagaaaggctttctggaactgacaagtctgccatccacatttcgaaatgtattagaaaaattggaaaaaaaacataygaagtgtagaatgtcagcagaaaggtgtggccacagtcaasagggccctctgtgggtcctgtggtcctggactgcaggtgggcccagtggagactgtgctgcccctcaccctccccggtgggtcctctgtgatgggggtgggtgaagctgagtgctgtcctgaaaatctgaccatgcacagcccctttccaaagacccttctaattttagaggccgccagcagccacgggactaggcagcatcagagcagggacacaatgtgagtcatatgcgcctgtgttcatcctgtggtgtccctgggcccatgggggtgggagggatcagagggatcggagggaggggagtaaaaccaggggaaggagtggaggaccacgaactccctccccttcttggtggccagctgctgtgaggactcgctctcttaggacaggtccactgtctctgagctctggttctggcctcctgtcaggtgccctcgtgcgggaatgagtgagggacagcagggcaggctttccaggcttccagcaagctctacatgatgggyggggagaccctgctcttaaaaacatgtggacccttagcattcttcttcctcagacctggggcctcagcctaagctgagatgacagggaagaactacagatacaccagatttagggaaaataacgtcaagtggtgcagacaagtggaactgctgcttgtgaagtgggctgtggagtcgtgatgtttgctacgcccggcaccatgtttcagaacctgtagcagcgctcaagagagaatcattcctttaacaacaaacatgtactgagcccctgtggggaggcactgaccgaggcctggggacaaatgtggggacagaccagtcctgtggggacagctggcgggggtagaaaacagtagagctgccccaccagccagcggctgctgggagagcaggggtgtycccgcacccagaggaggcaccctgccgctctcccccaggttgcttggtgtgtgcgctgcagggagaatcccgcccccagctggtgtccacaggggccagggacactggtaggtaggtgtggaacaagggagtttgtgacttgggattgttttctacttaaaaaataatctgagtaaagcttggtttaarcagcatcaagttaaaaaaattcctaagaagtggttggattcccagtttatatgtggctttaaggttctgaagaagtacacaattaaccacagaagtatgacttgaatagataagaatttaacaaaatacacactgttgggtgtaaaatcataaatatctgaagttcttagaaattggtaattttcttttagctttgctgtgctctgagcatgactaaactaaaagtaatgaatccagaccttgaagactggtgtgtgtgtaaaaggcaagaagtgagaagattcacgtgtagatccaggacaatctgaatttacttctgttcagtagttcccaaaggctttttctacatggaggsactcggagtgacacagcagctccctcttgtgggcagattccccygtgtaaggtgctggaggctgaggttccagcctgcagccgcttgtgatcctgatatgtsgagagttctggaagactgatgactgctgacccccttcttaacctacgccatcgccatgctggtggtggggatggggctcttggccattcctgccccttggctgcccttccttggtctgagggtacgtgggtggcccttcgggtgtgccaggagctttgtgctttagtgaccaacagtcccctgatgtgtgaaggcccatcaatccgatttaaaataaaacatttgaagtctcttcagaggacggtgtgaggatgtctgcgttcagtgatggagcttggcctctgccttgcccctgattgaggctctgagggttcagatacagtctctgcccactgcatgtgaacagcctggtgggtgtggaggggaggaagcctgtgatgatggtggcactgtgaggaaagtggggatggaaggaggtgtgcccaggaggcagggcaggagagttcatggatgtagggttgcagcaagtctggaaagctgggtttgttttccagggagatggcatgggaggtgggcaccccaggcaggaggggctctggatatgactccagaagcctggtgggctggaggggagggagaggctgggcctgctgggggcaggaaaagggcagacctgtgcttaatttcaatttctatgggagtgatgccctcaaacttagaagggcttttgatgagaagcgatagagtatagctcttgccctcctcagtggcatcactgattttttaaaatgcattttagatatttgtatttctatattaattagtattaggattggctataagtgacagagatgcaacataataggagcttaaccaagagaaagggctgcatcctgcacttgctattgtttgatttatgaactttagacattaactgtgcactgttagttcacatggaggaggatttagctccgtgacgtttctccaaccttcttttcctgtatcatttaggattgattctgggtgaaggtcacagcatgactcacagtatcttacacaccttggatgtatatacgcacttcttatgtcgtaagtaatccagagggaggagtttgctagagctagtccagagttcagccatcttagggctctgggtgagtatcgctgcagtacagcagcagcagctttagacaccacttctgtgtttaaggcaggaacaactgagaaggagcaggccgtggagctcttgtctattccttttgtcagagacattgtggaagccctcagcatattttcacctgtctttcaccagaactgtgtctttctccttggcaagaagtgtgttttgtggccagctttagtcacaaaagagacagaaaatgagcctttcatttttgtggcacccttggtagaggggtaggggaaagggcttcaggacgagcactggatcagcttaccaagcctgaaaccacgccccctgctggtcatcctagagactgagtggcccatgtgctcgtggcctgtgggccctgggcggcctctcagtttcctgcatggaaggcagcagaagcacttatcyggccctcagctcctcggtggtgtcagtttgtctgacctctgtcagtttgttgtcttcttttttttttttttttaagacagagtctcgctctgttgcctaggctggagtgcagtggcacaatcttggctcactgcaagctccgcctctcgggttcaagcgattcacctgccacagcctcctgagtagctgagactacaggcgcatgccaccatgcctggctaatttttgtagtttttgtagagacggggttttgctgtgttgcccaggctggtcttgaactcctgggctcaggtgatccacccatctcagcctcccactgtgctgggattacaggcgtgagtcactgctcccagccttgtttgtcttctgtgttaccaaagtagaaaacttcttctgttctgtaaccttggttcaatcaaagttccaaattcataaatggcacttatattattatgacgattgctgaaagtcatgccacagtttaatttgctttawacttggatttggtatacttgattttttggttctgttttctctttttcctgatttccttgatttttttggttccgttttctctttctcctggtttccttgattttttggctccgttttctctttttcccatattcttgcctggcatggagtggtagagcagagtggggaatggagttgagtttggatccagcggtcgagcaagtgtctcaactcccatgctcagcttcctcctctgtcacgtggggcagggaaggtgcctgtcgggcgcagcgagcgtggtgagtggtagtgtggggccgcgtgcgcccgtgggccctgagcatcagcacttctgcctctccgtgttctcttgttgagagggaccactgcctttcttatgctatcgccagccttttccagcttattcattctgtttcttggaacccatttaattcattcttcttgaaatatgtgtattttctattttatttcaaattgagacttacctttcttatagaatttgttttcttctgggatctcttgatttttttaaaattggatttactgaggtaaaatgtacagacaataaaactcytttttttttttttttttttttttttttgacacagagtttcgctcttgtcacccaggctggagtgcaatggcatgatctctactcactgcaacctctgccttccaggctcaagcgattctcctgcctcagcctccctagtagctgggattacaggcgcccgccaccatgcccggctaattttgtatttttagtagagatggggtgttgccatgttggccaggctagtctcaaactcctgacctcgggtgatccacccacctcaacccagccaaaaatcattcttctaaagtgtgcactctaatatattctgacaaatgtatgccagtgccacaccaccaagcagctgaggtagagaatattcttaccccaaaaagtttcctcttaccccgtgcagatgtcctacccatcagggcccagggcgaccttgtctgatgttgatgtcccatcagatggtttgtattcagcagagcacctagaccaggctgtgaggtacaggtccgcccctggcagcccatgccttgtagcttctgggtggctcctggcttggttgctgtggtgtggagcgttgagtgacctctgcagaacagcagatggtgctgtagggccgcttctaagactcagtggaggaggctcagtggcgttctgagcggtggccaccaggacaaacctcttgtctttacaccatctgtgtgtgtgtgcgtgagtgtatgtgtgtgtgcattccagtgtgcgtccagaagccagtttccttcagaaagctttctgttccctggcttcatttttrccatttagaggacctgtgaagcaatgagatggaatacttatagctggtttaattcagtgagtgatctgaattgtaaataaaattttatcaagtaatttataaatttgatataataaattaagtctgcggaaggggctgattgtgttatggaatgagaagttttgtacatcttttgcaattctaaaaattgtggccaggtgtggtgctcaagcctataatcctagaactttgggaggctgagacaggaggattgcttaagcccaggagtttgagaccagtctgggtaacatggtgaacccctgtctgtacaaaaaataaaagtaaaaataaattagccaggcatggtggcacatgcctgtagtcccagctactcgagaggctgaggtgggagaattgcttgatcccaggagacgggtggcaatgagccaagattgtgccaatgcactccagcctgggcgacagagcgagaccctgtctyaaaaaaaaaagttgtgactttgctgtgtagtctttgtgtaacataattttatgattctattgttttaagcttaatattccaaataggtaataattatgttaaaatgcaaaaaattagcctatactctcatgatctaaatatgtagtagtggttttacagaatatatttcaaaggattgccattctgttttatttttagtagccagttatagaaagcattatttttaaataatgcctaagaatctttaaagaaatacctgtcaatgtatgttccagtttagtatcaaatttatattcagagctcataagaatttaaaaagtttcccagagtctgtaaatggggatggagctgtccttcaagggtgatagtccccctaggtttgagttgtcctctgctgctagcatagtaccacctgagctacctgtgggccaccttcaccacccgtgggtccctccagccaccccagggacaccttagcctccctgggtcgccttagccacccctgggccatgttagccaccacaggatcaccttagcatccctgggtcaccttagccaccccagggtcaccttagcatccctgggtcgccttagccacgcctgggccatgttaactaccacaggatcaccttagcatccctgggtcgccttagccaccccagggtctccttagccatcccagggccaccttagccacctgtgggttacctcagccaccagtgagtcaccttagctaccccaggatcaccttagccatttgtgggtcaccttacccaccctttcaccttagtcactcatggtcagcttagctgtttgtgggtcacttagccacccctgggccactgtagccacctctgggtgtccttagccacccccgggccaccttggccactctgggtcaccttgtctacccytgggttacctgagccacccttggtcactgtctgtgggtgcttgcttgctttaagccacattatgctactgcagctaattaaggtcgctcaattcaagtgtctcctttttttgggctcctgccttctttttgtttttcaaatcgaacacccgctatactcatttgagaagtgtagactttgatttttaaccctaagttgcatggtaaagtcacctttaaagccaatggaaaaagcttaattgaattcatttgtttgaagaagtagaggaatgttgcaagtagactgaaagttatacttagtctgttctgtttgaaaccattctcattcagaaaacagaaatgtgtttatgtaaagaaatatgttacttgacttaatattgtaaggaatcttaattgagaaaataagtagttgtgttttttctttaactgggcagcattgtagcggggtggagtgtgggtccccaggttggagagctctggatttggagtggatcctagcacatggccaccatgtgaccttgggcagtgactcagcccagctggctgccaggctgctccccatgaggtggtgggagccgtgtgggatctgcctactgggtgtgcagctgctgcggcctaagcggcgtccttgcttggtccccccatgaactcaggggtgtggcctggctccgtcatgtgttttgcagggggatctgaggggcccagaaggtaagaaattgcctacggcccttggctaatagaagagggagcagggctttgaccagggggaccagctagtgactctgtgctggttactactttaccaacaccatggccatgctgcacagctgtgcagcctccacccacaaaggccaaagctccaatggcatctgcgatgcttgtaaaacaagtagcagccgtgtccagcctgctgctctgaaacctcagtctcctttactgagatttgatgatgtttaaatgagcaaatgcatgtgtagtgattggcaggtgrccatcgctcagccgacttttcctgtgccctctgcttcggcaggtgcccttcctggctccctgcttcttcctctcctaacctcctggcactgtgctcctcactcaggaattgcacccagcatcacctctgcaggtgagtcccacaccttccccctgctctccaaactcagaccccaagtccagcagcatcttctctcaggcatctatagacctccacaacttaagacatccaaattctcattcccttgccttgccataatcttcccatctcagcagctccttccttccaggctctcaggctgaaggtggcctatcctttcttttctatcccacatggcagccaggaggcctgtgggcggtgccttcaggacatgcctcttgtgcccctgtcccctactctggcctgagtgttccttttaaaactaggtcagaactagattaaagcccgtgtccaagatgctgccacagtctcttgccaccatatgactgccatgtcctcactgtggcccaggaggtcccatgtgcagagccgctggacctccgtctcctctcactctctgttaactgtgctgctgtcagactggctgcctggctgttcctgggcggtttcaggtgctgcggctacctagaaccttccatcttcctttcttcactcttcccagaagagaacactcttcccagctgtcttayggccagcttcctcaccacctcgctgcagtcttttccgcaatggcatcgccactactgccctcccacatccagccatcatcctagaataacagccactgttgtcccctgacacttgacggcagttcatcttttatgacccccattgtccccattgtcagttgtctttttttttccttattagaacataagctccaggaaagcagatgttaacgtctttgttcactgatgtatctcaggcatttaggacagtactggtacatagtagatgctcagtaaatagttagatgaatgaatatttgctacttttcttattgacagacatttctgaggtactttaatattacgttaagtaatgttacaatttcccatgygttgattttatgtaaataatgagtaaattactctcatagagattttagaattctaataaactcatatttccccttcttawaagagtagaaaaatgcttttaagagttttcctaaattaatattctgggaacattaaattttagaactttactctgagggcatagataaaaataaaattaattagataccaggaatgtcagatgctaaatggtgtatggctatttgtgacattctcctagaattaaacagttattaacttgcaaagacatggcagctgaagtcagaaattgatgaacttttaaagttgggaaaaaaagagctttaaggtatcttattaaaattgtaaactgtcagtttaatcatcatagaaaccatacctgatacagtaaatcgttgctattctgctttgaatttctggattctcatgaatcagacattctatttttatgtttctcttcaataatcctaaaggtggaagaaagaaatgggaagaaaaaggaagagaaccatagctacgttgtgagggcattgcttcaactctggtaacttcatgtgaaatgactacaaaatgaattaatatgcagtaagagagccagtgccccaccagggcacctttccacttgctggcacacagatttaccacaattaggatactgcttgtcctgtcatgccgggagagtctaaattactctgactttcaagaaaccaaaaatatgcatttttgatgttaggaagatttactgtgcattgggctgtgtcatttgatgaggaaaaaaccaaatgatctctttatgaaaatgaaggtaaaatatatgtaaatgccattttaatctaactttttatatgaatgtagaacaaatatcaaacaggattatacagtgtgatagtcaggaaagtagcatgcttttgtgttttatagactagtctaaaaggagccccagtagacttggtattgttaaaccaaggagatcttgagaactgttctgtctcccttgtgcccatagaattgtagcctgtggaggtgaccaaggaaccagatcccaagaggcctctgccactgaaaggagatttttattacttgcgtttcctagacgggggggcactcgcgccaagcaggcccacrgggcacactggtgtcagtcaaggggcagaaaggagccacaggaaagcccaggacagagcctgagtggggtttctgtgggaaaggcagggcagggcacccgtgtaggaatggctagtgtgaacagttccagtgggccctgggctgtaggagagatcactagctgcctgctaccaggccctggggtgatttcgggcaggcgggcagttagataagggaggtgggtagagccgaccacctgcctggaaccctgtgctggctataagccctgggagggccagtctctccctgtgtctgtaaggcccacaaatgccaaagcattaggaataagaaaatggacgtaatagaattgatcctgtgaggactggatgcctaactgccacatacagaatgtgagaaagcacagaacaactgccttcattgacaagatggtgcccagagctcaagacaggcacacagcaggaggatgccggcaggatccctcaacaagcttaccgtggtatctttcacaatgttaactgtcatcccagatgaacttttaatgacagtgtatctctgaagattgtgcttttagcgtattttcacttaaagtcatatctcatttagtagacctgccagattcctgaaaagttacacacaagccagctgacatgacctttgccagtcatgttgaccacgttctcaccgagctgtggactcctcactaggagcctttacctacggccagatggctgttgtcactgcctgtggtggggttacggtttcggactyacctgatccgttctgccgggattacctacggccagatggctgttgtcactgcctgtggtggggttatggtttcggacgcacctgatccgttctgccgggattttaaagtatgggagtttaggcatactttgcaagttgtttcttgaatatacttttctgaattatggcttgctatacaagttttggtcttttaaggtaagagttacaatggagatggggaaattatacttttctcatttcaaggaaagcaacagtcatgagttatgcatcagttgggaaacgggatgataggaagttgcaaggcaacctggtttcagccggaccgggactctcccggggctgcgtcctgctagagctggcaggacacagaataccactagcagcctccctgggagtggcttggcgtcttggccacctctttccacggatgtggtggatgtgggggtaaactagagagactaaagcccactattgggctcagcttccygtagaaatcaaatcagatgaaaaccctgacccagagggagaaggcagagagttggacttttgaaaacgtgagtgtgtccagcaaccaggcagcaacagtccttgtttttatcgaacttctataagcactttatttctccagaataatttcatcataaagaatccagagctcagacagctctttaccatctgtcttttccttttttcttaccctgtgtttggcttgatctggactgcacttaaccatgacaatgttaagtgctttcttctgggtaaaaattctggcttcttctccagaaattctggctccacttctcaaattgtttctgtccctgttaggagacccctggggcctcggctggagagacagtgcagctagtcccagcagccactgtgcttgggcctggccagcccctcctcaggggtcacggcactgctcacctggtgactaggtcttctcagccagatcagttcatgtgctctggtgtttttgagcttctggctagtcctcagtttctcagacctggttaatcacagtgtggagtcatttttcataactgtgcacctcacttgtttgatgcatggcaagggaataattaaattaataaacctacagatattcccccttacagttttcaaatacagtaagtgaatttctactataaaataggtccaaagaggttttattgtttcttatttgaaataattaaagaacatttatgtttcccttttgtggtttcttggttctaatcctgtgggttgcttttgacgtcctctgttggggatacactgtgcatccgtatttaacaggagatcccgaactcccagcagggagctaagcacagatgtgtgcacagatgcgtgcttaggtaaggattttgtgcaaggtgacttgtaatatgaaactgtaaaacgtgctaccttagactggagagagaagggggtggtctgatgttttccacacgcctcttttaccaaaatgggtcatcttatctgtctcaggccaggcccccgggggtgcacaggaacagcacagctgcagtgaaggaggggctcctgcagccgggctggccccagagctgtgggtcgtgcccygcgtgttgctcagcgcgttctgcagttgccctggccttagtcccccatctcgctgtgatagccatgcaggtcagcaactgtgagccttcctggctcccacgctgcccccggcacctctctctgtttctgctcccagcatcctctcagcttctcttctgagccccacgcagcggttcctgctttaccagcaccacttctcctctgtcaccgagagagagcaagaggctgccgcgcctgtgccaactgcctggtgaggctccgtcgagtgatgtgcagggccttgcggtacagccctctcgaactcaccccaccagaggcctgtcggcatcactgtcagaaacaggcgttctcccctcccagcccccgtcacaagctaagcatctgtgagaacggaggctctgcttccccgaggatcctgccccagacgtgggggcagcctttgcagacagcttctgtcccactcacctcctccttggttttcactcctttatgccctcacggacctgcccaccagttcccaagccctcagggccatggcagcctccgtgagggtgtgagctgggtaaaaggaattaaggtggagtcacagctaccagtggctgattgcccgtgggtgtcaggctggccctaggtgccccattgctagttcactgtcctgggacggccccagtattgtcagcattgaaggaaagaatccggacaggcagcagaggctcccacctgatgacactgaggctcctgccttagcaccagggcctgggctcccctttgctgtaatgtcgtaaagtatgtcaggaaggtttgcccatgacctggtggagagagaagagatgtgacaaggcgactctggcttgtgtatcccgcccacaggggaagcttggaggagtcggtttgtgaaaaatcagggctctgagggcactggagctggtgctgagttctgcagcagtcaagaagtagagcagagctgaaatcctggctgctcatgggcatcacagatgcattcgccagcagctgggctcggctttgctctaacatccgcccctcctctgggagcgttgtttctctactcctggctgcccagcccagctccctggcctggcgagatctctgcatcatttcttctccccagcttctctctccacccatgccgccatgggagagtttaggctgtctcgtccctgactggcctgaggtagggctgtgactgtctccttttccctctctcctgtcttcctcacctatgcccacataatcagtccaccttccttactgctggatgcaaacctgctgagtctctatggctttcaggatggagttcaaagacatcacctcagcgtgaaaggccctttcaggtctggcccggcacaaccctgacacccgcatgttcctgggtgcaacaacatggggccccagggcagcttcccatgatgcatcagcctctgctggctcctgatgtggcctctgttcctgtcttaggcccctattcctctcggcaggctccacacttgccttactctatctcagaagctcatcctgacaccagctctgtcctctgtactgggaacatggagcagaaatccatcacggctgctgatccatgcatgctgatgagttgcyggctgcctccttgtgcacagcatctgggggcactcaggtggccctgctgtctctgggcctgtccctgacactggcaggggttggggcaccagagttcaaatgggggccgcatatcttgtctaaatcttccagagttttaagtcaagccagtgcactattgatacaatatgttgtgtcttcttctttgacaactacatcttcaaaatggaaaaaatatgtggggacctatggtttttatatgaattaatgttggcaaaatatcaaagaccactgaatttaactgttaatttaactgttatctaggtgttctgttcagaggccactcatgtttgaatgagtaacaggatcaagacatgatttatcaataagtgcatatatctcccataacattgattattttgtttttatttctgcaaatgactaatcatgttttatattaagcattttcggataatgcttgttctgttggtgctcacggcctaatgcggggctagcgcacagcggcctacatcctgttttttgtgcagtgtttacagtttttaaagagttgttaaaaaataaaatagtgcaacagagacatggccacgaagtctaaagtacttactctttgcccctttacagaaaatgtttgctaccacttgatctaaaggattaaaaaataaaacatgtcattgggccagatgcggtggctcacgcctgtagtcccagcattttgggaggccaaggagggcggttcacctgaggtcgggagttcgagaccagcctgaccaacatggtgaaaccccgtctctactaaaaatacaaaagaaattagccagacgtggtggcgcacgctacttgggaggccaaggcaggagaatcgcttgaatccaggaggtggaggttgcagtgagctgagatcctgccgctgcattccagcctgggcaacagagcaaaactctgtctcagacaaacaaacaaacaaaaatgtcattgaatttgaagtatacaaaatttgaatatctttctatcaaaaatttgaattttaaggaaataacaaagcaaaaattataattttttgtgttttcaaaaaattattttttctaaattattaagttataagatataaagtagttaatgtgaaatgtttaaatcaaaattgtttaaagctgagttttaaatttaatactttgaaaatttagttaaatcatattaataattttataagaaataaaactattgataattctgatgtctgacatctgtctgattgctgacatggatcctgagtcttacagtgttttgagggcctccagctacattggggttccagtgccagagtggctggcagccccaccctaacgagaagtgaaggggctgggcatgctgtttccagtgctttcatgagatgctgctttgcctggcggtcgggcctgatgtctcgttgttccacctgtgaccaaggggtccctctggaaatgtgtgtgtactgacacatgccctggtggctcttgtctgatccatgtccaggttattcctgcctgaccgtcactcgtgccaggagcccaacacaaattcaggcacaaattcagtacaccacacaatgggggaaacatgttcaaagatttttacttacaggtcctgagcagggagggtgccatgagtcaggagggcmgtcctctgtccctgggtcatgcaagcaggaacaaagggtcaggcagagagagagagcactgcagccaaccagcagaacaaataagggagtagggtggggtcacttgaagtgtgtgggcaggtgcctgagtgaaagatgcctctaggttctcatctctggtactggcttgagccactgggtgtggtgtagaactacaaagtgtcaggggtggctgaactctgccgctactaggagaaagtgcagctcatattccagatagatgctgaggcaatagaaaatgaaaagaattcactatgcttacgcagagtgtgtctggacacacacaaatttaagagtaataagaattgcttaatatggcataatttccttaggtgccatgtgcagttgtcacaagcattgcactaattggaataatgaattagaaagtggatgttggtcattattaggaaaaggtactttgttacacgagacagtaattgcattgtggcaagagaaagaatctgactaattaatttgtcttttttttcttttgcctatgagtgcttcttctgcttgactcctccccataatcggactccttccaagacagcctaatcttcagggcatttggatgcagctgccttttgttccagagacacaggccatctcaggggaggtatctccctggggcctgaacagcgtttttctagacaagaggaggctgagggctgtgggttctgctttgccagccctgaatgctggatcccgagtggcagaggcaccaagtgctgtatgatgtgtgtatgtgatgtgtgtgcatgtacatgtgtgtgatgtgtgtccctgctcgccccaggctggccatggtactgtgctagtcacagactggctgtgctgatcaagccaggcacagtggaaaatgggaagatgttggcgtttgcccctcccttggctgtgtgtcattcacctggggcatgagctgtgcccctgctctgcagtaatgaacaaggcagstcagcattggtccgagacacgtgagttaagagaggaggaagagcactctctgggggcggggsgatccatttgtcagtggcctgcagtttcctgtcccagggatttcactggtgacatcctgaccactcacctgcactttatatggagctgttttcatcagctggcgtctgctgagcctctgcattgtgttgtgtggtagcctgttactttttgcagttttattttctaaactgtactcttttattgatagattttttgtattaggatttccatttaaacaggactttggtacgtctgctgtgggagatttgtttccctagaagattcacggctgtcgttctctcccctctgctcgtggtgttttactgtgactgcgctgaacggttagctgtcacatgtcattctctgggtggtgtgctctgaagtcattgtggtgtgtgggccccttcagcctagttctgcctaactgcggcatgatgaatgggcccgaggcagaggaggaggctccctcgtcggtaggggctgctgttgtcgcagctgccggcacacggaagtgagtcggtgtgctgctgccccgagtgactgagggacagaatgaggctggggccggccrgactggcattggcgtgtctgcatggcgtcgtccaccactgggcctttgcacatggggacctttttcagcrtcatggggcgtcggtataaaaggaggcgcaagaagcgctctgagaggaaaggtaattcatttagtttttattcttcagtgtgaagcatttgtctttaatgcaatacagaagtgttttctgggatagacggctttgtgaattaatcttgctgatgccagttacttcctattttccctttttgagtgccttttttgttgttggcattttatagaattttagataggggcacttaaaaaggaagattcaaaaacatgtctgtaaacatgaatagaaatcatttagcttcagagtctggagtatgtctttggaaagatatttataaaactttaaagtttgtagctttgagctacagaaaaggtttttctcccagagacagatgcttatatgagatttcctttgccgcactcttcattaatgacttttctacattaaaactgttcttcatgctgcagaaagcaaggctgagcaaccattgtgaaaatatttcccctttaaaagaatggagagcaaattccttacattctgcactccaggttaataccagtttttaattcaacttaatgttttaagtcattaaaatctagattttttttctcaaaaccagattcaaaagttgtccatgactatacacatcacaagctactggtttttggacctaaattgctgctttaaaagctgttgatgttttttttttctctttgtataatatgaaataattaatagaaaatgccttagtgaaaagatgtgtctagcccggagaacagctgaacacaggcgtgatcagtgcctctgcctctgtgtcttctgggcgcccccttagtgtcccccacccgacaggactggagtacagcgcttcaccaccacagggcccttgggacatgctgtggcaggagatggctgtttcttcaggaagtaaaattaacctcggttttttggtgtggcttcctaagaagaagaacagatgaatctcaaagtcagcaatcttgtaatagtaccttgtaatataacaaaggtgacagcacctaatggaagtctgtgtctgggagtggggaacccctgaccctgggccctctgtgcaccgtgctgccaggtgcttgtgtccagggctggggatgccacaccctcgatgctttcctggactgacgggcrgtctcaggacagccartctgtgcggccccctctgccctcacctcaagaggtcacagcattggcctgtttttgtttcctcagttaagctttggaaattgagatgtcactaagacaggyaatagggagyaaaacaaaggcacaggcaaaaactaaaggacatttttaccaaataccctcaatttagaattaccaccacttttcccatggacactcatcactaattatttaagttgggaaaaatattgagaagtacaagaataattctgtcatcattcttttggaatttactgtgattcaagcttaaaatgtctttttcatgcattccataatctcattctgcagtgggaaaaccactctcaaatatgttgcattttcagaccaaggttataagaaattgagagggttataagatgtaacaatgaggcccacatattaaatggcttgtgttccttggtcattcctatgtgagtaagttcattgtgagtgttactaaacagtatcatgttatgtgttagttctcgctgttggtattttgtaataagcattatctttgaaactaataaaaatacctttgaaattatcgatattattaagattggccatcacatttataccaaactggcaaagttttataagatgtaaaatagtcttttatactgtatatttctaaggtactgtaaatcatgtgtattgcatggttttttccctaagactgatacaatgtacgccttttaaaatgtaattctttgatgaaaacaatgtagtagcaagttacgggttttagttggcttcagtggcaatataatttcagtgatttttttcatcactcctgrattatacttgcagttactsccttccacagggcaaataattgactgttgactgtgtgtgagcctcagatgggttagcttaatcatcaggaaaatagggctaaagaataatgtaccatttaaatactggccagagtccccatcaagcagacactgccaccctggcagatgctgccagcacgagacctgggagaggtctgggagccacagggcaggattctgagtagcagttagtgcccatatatggagcgcttcctgcacccagccagtgctcagtggctgctgctgtagcctcattcactcacagcactgctgctaagttcatgaccagtgggaggggagagagatgggaacaaagaggcagtccttcagtccccaccctcctgctgtctgaatagcatcctgtatttccagatgtatttctcactgagtgttttgtttgtcccctatgtgataacatccttatctgtgcttagtcgtgtatgcacatgtgaagaccactgtcctctggcagcagttctgaactgtgttttagtctgaggctgggctcccccatgtttccaggatagaggtgaacagggtgtggggacctctgtggagctggaggtccaaacgtagagaggcctgctccccctgagtacttctggaggagaagccctggaactcctgaccttcacccttcacagagtgagcagagccagttggccaaggggaggaagcaggcggctgtcgtaccagcctccttctctggtgccagccatgactctcaccttacaaagagagcaaccctttgtgagatgcagagcatggtagcacctggaggtataggacgggatggcatttatccacccatccatataccagtccatctactcattgtagtccatccatctgtccgtcaacctatcatccatctgttcactcatttacccatctacccacccatccatcatccatcyactcacccatccatccacccatctacccayscatccatcatccatctctccatgcatccatcatccatctctccatctagtcatccatctatctgcgcatctacccatcacccatctattcatccatccacccacccacccacccatcatcacctatcatccatcatcyattcatccatccatccacccacccacccacccatcatcacccattacccattatccatcatccatccatccatccacccacccacccatcatccattcatccaaccattcatccacccacccaccctcaymacccattacccatcatccatcatccacccacccacccatcatcccccatcatccatcatccagccatccacccacccacccaccatcacccattacccatcatccatcatccactcacccacccaccatcacccatcatccacccacccaaccacccaccatcacccatcatccattcatccatccatctacccacccacccatcatccaytcatccatccatccatccacccatcatcacctatcatccatcatccattcatccatccatccatccayctacccatcatcacccatcatctgtcatccatccatccatccacccacccacccatcatcacccatcacccatcatctatccagccatccatccacccacccatcatcacccatcacccatcatccatccatccatccacccacccatcatcacccatcacccatcatccatctatccatccacccacccatcatcacccatcacccatcatccatccatccatccatccacccacccatcatcacccatcatccatcatccattcgtccatccatccacccacccatcatcacccatcatccatcatccattcatccatccacccacgcacccacccacccacccatcatcacccatcacccatcatccattcatccatccatccacccatgcacccactcatcatcatccatcatctgtcttccatccatccacccacccactcacccatcacccatcagccatcatctgtcatccattcatccatccacccccccacgcacccacttctctacattgttccgttcatccaacaagtactcattacacccttctctgcatgctggcaccaggggtttgaacatgcttagggaagatgggggtaatgggatggcagtggcagggggcagccacagctttcaggcttgaggtttgttctggaatgggccacctgaaatcccactaggtgcatgaagaggatggatttatgtgatttgtcactgctgcactgtatgtgtagtagtggggagggatattctccagtatctggtgagaaaggaagacaccattctctagcagtgtctgccaggagaggggcccaagtaaggaaagttgaacccccagtggacagcagcgttatggatagaaggcccagatctcctagaacccgttgtaatggctatgtgtgtacctttcactgcatctgtgctgatgggcctcgcagcacaagaaagactctgctgcctgggcaggagctcctctcagctacagggtgcatttcaagcacaggtgcatacactctaggttaacagttgaaattctaaagtaagcatgtagaagtagatttgtgaaattgcacttgaaataccatggaaattggatccaaagcagattgaacagtgccaattcttagtgcagttataagtgttaatattgaaaataaagtttacatcgttgtcttttttttccctttgattccagaaaattaactacaattttcaaataagcaggaacttacttaggttgtgttaagtagagcaaagtggacagtctttcaaatgcattgctgctgcgtttgcactgtgaaggacggagcaacttcacgaaggcagggccctgtgaaggtttgtgctctcgtgtgccggctctgacctgtgattttgttgctggatgtctccttcagcagttcatgtggctttctaaagcttgccattgcttaggcatgcctgactgaggcgggaaacaagcgtgtggatcagtgtggctctgtatgtgtgaacatgtatggacatatgtgcatagggtgggggtaacgagggagagggacaagaagggccagggcttgtgaccacatcagaagcaagggtgatgctctgtggcacagctggccctcgaagtcactcagggacctaggtttcttccatccttaagctctgttctctaacagaagtcaccctggcagttgcttctagtccagcaatagaaaggtgagaaagaatacagagaagcacgcaggaagctgtgtgagttggcccagatgcagtggcacacaccacaaattgcacagcacccccacaggaggcgagcctgtgtccttgcccatcacctctttccagctggtgtccagacctcggggtgatcactgattgttgtttcgttggtctggctgtggctcttcttgggccagcagcctgggagccacacagggacagggtaactgcgataaaatacaattatgcaggagaggagkcggaagggcccagcctggccctgtctggccagcttcctgcaccctgcacagcagggagcatcctcattctccagaccctgattcttctcgggttggggcgggagkggggaactcccttgtccattgttctctcagccactggcctcatcctttgggggttctttctgatcatcgcctccagagtcccatctgaagagggtatcagtgtagaacacagtgaggcagaatgtggaagcaaacgggaccatctggaagttttgctctaggccttataaaacacataatttgttaggtgtaaaatatatagtatgttgtagtagtgataataggatggaataaatgccttagatttgcaaaattgggtcagagagtttagggatctttggtcctgtaccagtgacatcattttgtggctcttggggatttggggagggacctccccgaggccactgtgcagcagcctcatgcccagggctcacaggtcccatatgtgtttcctccaccaaagcaccctgagctgtcctaccttcctcacatccccacaccccgcgggtgtccctctgcttagcagctatttattctgcctgtatttgggccaactgcacaggctgtctgagacctgacagtatgctagaatgtacagggcatacaatattttgtgtaatatcatggaaaagtgtgccgttctttcggttgacggtggttgcagataagactgcagagacagcttgtggtgggttggagtgtgactcagtctcccgtgggtctgctccccttccagactgcatgtggaattctgtatagagtaaggcatattcgtgtatgtgggagggaggcttagaataaaatttattttttttcttatggaagcagtacatgttcattgtaagaattmggaaacatagatacaaaataaactttatgaaaaagcaaaggtgatcatctgcattagtctgttttcacactgctaataaagactgaataatttataaagtaaggtttaattgactcaccgttccacatgactgcagaggcctctcaatcatgacggaagatgaaggaggaacaaagggacgtcttatatggcagccagcaaagagagaaatgagaaccaagcgaaaggggaaactccttttaaaaagtcagatctcatgagacttcttcactaccacgagaacagtatgggggaaactgcacctgtgattcaattatctcccactgggtccctcccacactcgtgggaattatgggagctacaattcaagacgagatttgggtggggacacagccaaactatatcatcatccttgaagctaaatctttgaatgggagcaaaaccataataattttcttccaattcgtagtactagaattagatttagaagtgtttaaggctttatatttttgtcttactatgaccaggggctcagtaatgccttacttctgccttggaggatgatgtgagcatacaagaggggtggccgcatccctccagcttcattcctggtgtccaatgggaggcgaataggcccctttgcacctcttaaccaccatagtcctctcccattgccagcctcttctgacttttgggattgttttaccctctggacagcagtgtgaacaaggtatgtcaggccaagggggctgctccccatgggaggcctggccgtgttggcttccaagaggccagatgggtgctgctcaccatagaaagtgacccttttccctgttcctgagccaacctgtcacttccatgcgctgtgtgtcactttgaaaactatctttgctttctgcaaaatgaaaggaaactttcaaaagtcaacgtattaaagcctgtttgcatttattcttttatgaattttgctcacattttttaattgggtgtttgtctaaagacaattatcgatcatagtaggctgctggaaggttgaccacagaaacctggttctctttcagggaggtcaccatgtctgcctccaggcccatcgggtaggggctgccttctgtcaaggcacatgctccaggtcccttagatggaaggaaaacacatggtctttatccagtggactcagggtgcaggtaactgaaggaattaacctccatcattttcacagatcctcgtagagctggaccgaaggaggtgggagatccctgccgggagccgctgcagtgggagggcttacagacgttcgcatagtctctttctgtttggttgttttaactcccattaaaaggagtggctttcagccttcttgcttactgtcttgtgatgtatgtgtgttcacatgttccatgcacatttgtaacgctyaccatgctctctgattcagctttgttcccttagagttgccccagcactgctttgccatgatgattgtgktttttaaaatacttccagttgcttacttctgtttagttatctcagtgctaaatattgttaattaattaaatataagcagcatgttctagattttatgtgtctggaattcttactaaaaatcttcctggatatgacttccagtcataacgttatggattttattgtaaacaaggtagaattttatttgccttttaatcatttcattatggtgwgtgtcctccttacagagcgtgtactgaatttgggttttactccttttttgttcatttccacaagttgaactctgtgttattatcctattttctgttagggtcattgtgttgttaagtaatcgacttayatagaaggtgtgcacctagaaggttaacagaaaacaagttgaaacatgactgaaaatatatttctgtaagaattactgtaattcttctgagagtataaatagccagggttttaaagatctgctttataggatttatactgcaaataacttggcaggattaattggcctgcatttgcttgctgtagtcagtaccatctagtgttttagtcaatatcagtttttgtagtgtggatgaggctggtgatggcagctgcagcctgtctggarttgctgctgccgtggtgtcagctgcagcgggggaggctagggctctgtgctccgcaagttggtgggaaccgggaacaggtggaagccccacccccttccaagttggaggggcaggagcccygccatcctgggcacagctgcagccgtccattagaagctgtggacccaggcatccctgcactcaccrgggcccaggaagcccccctgccccgacaggctgagaagtgcctgctcccactgcttggtctstccccactcccagcacctgctccagtttcagatcaaagttgtggccgagctgggacactgtcacaacctggctgggtgtgtgtttgctcagggcagtgctgacatgccagcaccctgctgcctcggcacccccagactttgggtgctgacaagcatgagagggaggccaacgcggggctgagggaagcacagcgcaggccttgcagccgcccctcggcaggaacactctggatgccatgcacactgtggatggcaggataatggtggccggaggcagacaagctcctgggaagaaaggggagggtccctggtgaaactccaccttcagcttacagaggrcttaaggcctggggcccaggctgtcagttccacagaccggagtgagaacttacggtgcttttccagggctcacccrtgactgcccatgcaccaatcagcacacactttcctctgaagcccataaaaacccccggactcagccagacttgggcagaagacaggaygacctgcttatggagaatagctgcccactgtgggtctctctgagctgttctgtcactcaatgaagcacctcttcacattgctcaccttccacttgtccacgcacctcattcttcctggacatgggagaagaactcaggacctgctgaatggcaggtctgaaagagctgtaacacaaacagggctgaaacacacccattgtttgccacattgcaggcaatgaggagaggaggagagaaggagagaagagctgcagcccttcaaggagcccagacctaggagctccctgagccagggcagtgaygccccctttggggccctgcggttcctggtgtttccaagcttctgggcactaccgtattccctggtttcagccatggaagctgtgtgtggtatgcctggttcagctgcagccttgcagggagccagtgtccatgccagtgcctaggtctgcccgtctcrcctgcctggctgtacacaatggctggaccccacgcccactcactcacacaccccttgccactccacacctggctcccccttggcaggcatgggatccaggctggaagtgtgagccgagcgcagcctgccaggctgtgtgggcagaatgagcccagcaggcccaagcaaaactcgggtaaaggcgccaccagtgatggaggtttctggccagaaaaatgataccctgaggatcctatgacactgggttctgatttaccaaaaagagccacacctgactagggacatggggaagcaggggcatgcagrtctgtccatgaaagccccactccttgctttagggacagtagctgatgcccatgagcgctccttcatgcaggtgctgtgctagcactgaatcaccagggcttgctccgcctatagaaccacaaccaagaagatgggagagactctcagctcacagcaccagacacttcagacccaggttggagagctcaaaggcctgaaacaggctccaagaagatgtgagtctgaattcacagcaccagacacttcagacccagatgtgaatcttaactcacagcaccagacacttcagacccaggtcggagagctcgagggcctgaaacaggctcagtcccagactctcacccagtgctcccttgcccrctcggccaactgtcgttttgcagacggcaggctggtcagaggcttcccatccagagtgacccatgaggtgtttctgttccttagaagaggaygctaatagctgcctgggaaaacagttgttaatgaggattgtactaagtagatccctttcacatcaatagtaaccagtttaaagccttttcatttacaaatatttctgatttaaggacttagaggtcagttcgtatacagtcaagtttagatgtgttttggagaaagtggatacagcccacaaggtcccaaaaggcaacagggcacaggtaacattccctggctgtgattagttggttgaggacatcacaattggaagcatccacgttcttcctcacaggaagcacttggctgagagctgtggacactgaggatgaggcttgagtctgtcctagcagagctcagggcctggtgggaaaagcagggtggtcaggccagcgggggagtgagcrgggaggggcaaccagctttgcacaaggagccaggaatctcccccccacctccaccctgcaccaggggcgctgactctgggccctcaaggccccccactggggacgctgactctgggccctcaaggccagtggcatccacasctccatccacagcagcgagccttgtgcagtttcaccacaatrgtagcacatgtgtgacctcctgggggctgctggggcctatgggagtcgggtgtggacggtgtgctccctgggcctgctcggggatgctgagtaccaggcagcagtgagtggggtgactgaagggaaactcgagggacatctggccctctgctctgccacgcttgtccccatgcttgctgtgtttggtttggggccattggccctgctcctgtagactcagagtagctgtctgtcccacgttgccatagctgagttcactcggcacagtcaccttgggctgtgtgctttttttgctgatcccttaactggtgagaactagtgtacatttgaacacttgccatccagttgacacctttcaataaaaattgcagattaataataaatgatagaagttcatgctttttccttctggtgaagaccaacacatggccctgttttraagagcagaaagctgcagagccactgccacgtcgcaggcaccatcsaggatgtgtaggcgtctcagggatgttacggcactcagaggattggtttatttttaggaaacaactgtagcagccaagtgaagactctggacaggggaggacagctgttgaatgtgtccacagggcctgaagtaggccacgaaagccccaagtttgcccctgcgttggcacaagtactggggctgccaaggaaaaggcgggggtggaggaactcagtgtacagcatgcctgtgggggcaggcatggcgcccggggtggaggggtggaggagaccgagcctgccccagccatgtgggcctcgcagcccactgggagaggcaggccacaaacagggagacaaattgtggattgcactgtgcgtggagggagagggagsggggcggtggggtgggttggtgccgtgtgagctgggacttgagcagtaaggtggggtctgatgaagccttgcgcgaggacatggcagggagggaacagggaagcaccccaggaagttggagaggctctggtgggcatagcgaagggctgacgatgagcacatgggcatgtgttagagcacgttttttatttataaggacataaccctggctgctgcgaggagaggggctctcagggtcaagagaaggcagagaggctcctgcacaagctgagtggtaacagcagcgcagaagcagacaggctgatgtgtttagcccaactttgggagaaragctggtgacatggggtgtggggtgagaggggagagagaaccaggtagtctccaggtgtctggcctgatggctgcagcgaggtgacaggatttacacatgtgcattggtacacctgctgcccgggatggccaggtgaacaaggagttggcctttgtcaaagctgaaaacaccttacttgaggccccctggagcgcccaggcctcaccaggcccacccccgcccagccaccctagagttgccttgctgggccagtctactactgtctgtgcgactggcatgtggttctcccgtgatgcatcccttttagtgaggaaggaactagagccacagtttgatgaagttgctgactggaccactgaggtgttagtgccctgtgcaaggtgccctaactgacacctctgcatgtttctttctgtcatttgtccttgctagaatttcctcttctgtttcagtagattcctattctcatcaatatttcccacttaatatgatgaatattgtacattattattcttattttaattatctccttttgcattgcactagaaaaaatgtgtktgctgaaaattaggcacaaatcttgcttgctctgtgtacaagatctataaagattcacttagcagcttgcagggacggtttcctagaaggtaaaatatttcactgaaaatattatcaattgaatattttggaacacttyagtgatattgtttggtttagataatactgaaagcaaaatataaattatgaggtgaagtgtatctctaaacatgcatgattcgcttgttgagtttcagattgttttcgttcaaatgatgtaagaggtttatacttcagttgcttttgttaaataagcaaatcatctttcaatttttttgctacaaagttaatctagctttggaatgctgcttgatgtatagtaaagaatgaacacgaataatctccactttaataccgtttctttttttttttttagtttgcagttcaaagctattaaatatggaacccatagcagtcataaagaatatgtaaaagttttctcaaagctatccatttttgaggggaaaatggatttaatccagtaatatatgttagtaattttaatcaagttcaccagttgtcttaaacagtttttaatctataaacttttagtggactcctaaagatgacattttttaccagcacaatagaaactattcaagttctgatgcatctttaatgtaaataagtcatgtttttaatattttattccaggatatgttttttcattaagggaaggggagaaaaagggtaggtatgctcattgtccaaagttgataagaacattatatttatatatattgtttatacttgtggttgcaatgtatctataaaaaggtataaagaataatataacaatcatttacctacccccagtacaaaacgtataacattgtcaatttgaccatgttagctgaaatcaaaagcgagctcatgaagaaatgatcaggacacggtgagggaacggccttgtttgatccagcttgatcttcttccatgtcggcacccagtgtctggtcctgtttattaaaaataaaaagcatgttcatatgtccctgatttaaaatgccacctttaccaaatattctgtgtctggatgtgttgtgtctgattctgggtttttcttccatcacattgaccctctttgtccgtgagccacgctgtgttgcgttaggcactgaggctctttatttctaataggaaggactaagccacctgctcctttggttcagagttttcctgagtatttgagtctgtttatccttttcacgtaaatgttagaatcagcttgtctagttccattaaaacaagttggatttgtacctggaaccaagtgaaactgaagtctcaggtcttctgcagtcaagttcaatgttcttccacactcaccacctcccagctctgtcttcttactgcattaggaggcattctgagaaatgaagaggttgttttgaatattgctatcaaataagtcttttttttttaattgaccattcttggaattttgttccataggggatatttgatagggttttaattcttatttgtttgtagttcaggtcataagaggttcttttaaaaagggaagaaaaaatagctctgtgaaatgtgctaaagtgcttgcatgtgctgttttgctttgttttataacctttggtacaagarttggcattcgtcaaaactgaaaacgttggcttctgytctgcaagagatttgtagctcccattcttaatgtgggcggtacctgcaggtactcacctgccaccacactcggcatgactattttctactgcgagacattttccatgtccttttaaaagaattttaatatgtaagggcaggaaaacaaagtgaactgtatgaattaggtgaactacatgagctgggctcactcctgtgcctctgcacttttattgttgttgtaaagtttgtttttcctggtcccagaaatctgagagaagtcagccttctcaggcaaaccaattattgattaattatgtataagaattaaattagccatttgtgtgtcttctgcctattattaataaactttttattttgaaggctgggtgcggtgactcatgcctgtaatcccagcactttggaggtcaaggcaggcagatcacctgaggtcaggagttcaagaccagcctggccaacatggtgaaaccccatctctactaaaaatacaaaaattagccaggcatggtggcacrtccctgtaatcccagctactcgggaggctgaggcaggcagcttgaacctgggaggtagaggttgcagtsagccgagatagcgccactgcactccagcctgggtgagcgagattctcaaaaataaaaaataaaaaatactttttattttgagataatatagattcacatgtagttgtaagaagtaatacttatatgaacgtaagccttcatttctctgggataaatgcccaggagtacaattgctgagtcatgtggtagttgcatattttatttttaagaaactgccaaactactttctagagtagctatcccattttacatttctgccagcagtctatgagagatcccttttctccacagcctcatttcacctggggctgtcactatctttaaagcaacactatgttgaatagcccttctcggaggtgtgcagcggagttatctcacggtagttctcagctgcatttccctagtgactcgtgatcctgagcatcttttcatgagtttattttccatctgtagatcctcttcgtgtcctttgcccattttctaattggactatttgtwtattttactgttgagctttgagaatttcttatatattctatttgttggatatatatttttcaaatattttctcccagtctgtagcttgttttttcatctttttaacagggacgtttgcagagaaaaagtttttaacttccagtttatcagttgtttcttttgtggattgtgcttttggtgtgaagtctaaaaactctttgcctagccctagatcctgaggattttctcctgtaactttctaaaagttttatagttttatgttttgcatgtaagcccataatctattttgagttaagttttgaataaggtaggagacctgaattgaggttcatttttttggawctctagttgccccaataaggctgtgcctcttcacgaaattgcttttgcacctttgtccaaaatcagttggacatatttgtgtggtgtattcggggttctctgtgctatcctcttgtgatctgctcgtctgccccttgccaacactgtaccgtaccgatgactgtagctttgtartaaatgctgagatcagctagactgattgctcccactttattttttttttatggtggttacattaaagtctttctaagagaattctaacacctgtgtcatctccgtgttggcatctgttcattgtcttttttcatttagtttgatatcttctgtttctcgatgtgacaagtgattttttattggaacctgattatatgatattatgagactctaaatcttactgaagccttctgttttagctgactttctcatacaccacggtgtcagaggaagcggggatgctgtctcattactgctggatgggggataagtccaagttccccactggggctcccggatagctccctgttgtgagagggcctcatcactgctccatctggagccttcactggcagcaccggctagcgtcgtttctaccaggtggaaagagagcccagcttccccacatagtctctcatgactctgcactgtggcgtgggaagggaaggggttgttagagcctggtggaaatgaagattgtggcttgtcactcagccttgtctgacaccacccaacaaggggactctggggttgtccttacagyctggcacgggtggggcgtggttgaggttttttgtttggtgtttggctggaataaagcaattcttgtctaagaagttttctgtcttgctgggctacctctttcctggtcctttggccagagagagcagcttttgttgcagctttttgtgtgttttgtttctgccaatgcctgctgatgtttctggcttcctcagctctatgttgagaaaatgaagcaaaaggaaaatgcagggtcgcttctcaggtcctgaggccccctggcttgtcagctttctctacatctctcagtctttttatgtgtgttttatgtataatatccaggatttttagttgtatttaatgggaggaaaaaggagaagaactctgtcttcccactgaggaagttcctttgcctatttaaaaccagtttcagccaataagaacagagctatttggacaggcttattcgttgttcctccagtttatagtttgggcttctgagaagcgccttgccatcactttgcctgcataacctcagtgccctcacacaagccacctgttttcccgtcttcgtgatatgctcagccagaccccttgtctgaagctcagtttgacgagcatgtcctcattttttggcctgatccctccagccaggaggctcctgggagcacccacagcctactgagggcatctgccctgactgcaggggtcttgccctctgtgcctacatctcacctcccattctagaccttaacccaattactttttatcrgtccttccataatggaaatattaaaacatatacaaatatacaattgtatcaagaactctgcatgcccgtcagccacatcagtaattaccaaccagggcccatttgttggttttgtctacactcatctatgtttttctcaccacactgaattattttgaagtaaatcctagatattgtcctttcatttgtaaatacttcagtatatgtcactaaaagagaactgccatttctacacctaaaataatttatcataattccttaatataatcagctgttcaggcagtatttacatttaagtttctcagaatctgatttaggttcttgtatctagcacaagtgctttgcacgtaatagattctcagaaaatatatcttgaaatagttaatgactataaaataataatgcttttaaaactatctggaaaactttgttgaataaaggattctaaagagaaactcatttaactttyagcaacacatttgcctgaaatatagtgagattgaaagttattaacatgatttcatgaaaaactatatatataaaatatmtatttttagatatatgatatttgatatagatatataagatatatgcatgttttagtacattttagtcaccattttctaagagcaatgaatttgccttttagtgatttataagttttatttgtacacaaagtaacgtgtgattataaaatttgcaaatcttctttttcctcaattgcaatttgatgatattatttattatagaacatgtattaatacagtctgacaaagtataactaaaatatttaagaagaggaaactcttaaatttgttagtaactagaaattgtaatacctgttctttgaggatttcctgtggtttctcctgccaacaaaataatacttatatgtaactaagaaattagattgaattttagcagtcwtgtgcactttagttttgtctgcataaggagctattcaaggtgagagagaagtagctaagtgagaagctgtaggttctggttctgctgtgtggctttagtttacagctggaagccaaaagtctacccagagtaaagatagatggcaagtatgtgagcgcccttctgaggtctgtcgccatctgtcatggcgtgttgtgtccttagtccatcctgcagcaggcgtctttccagagtgcaaatgccagtgcctttgtccctagttcagcgctcttcatggccctccattgcctggaatcaaacccaccctcctcagagtggtrtgaggtccctgggcactggccctgaacctcccttgctgggacctggtcccaccctcatcatccctccatgtgggagaatccacrygagacgtcctttgctgtgctggaatccacgygagaagtctttkgctggactggaatgtgccaaggaggagtattttgtaccagatggcagatctgacttctctaacaagacctagttcttattttatgatttttttcctttaatttgtaataatgttgtaattatttccttagagtagacttacttcatattactcctgtcataggcacactaaatgctattttcttactgtctttcagacagaaacagtctccgccagtcaagaaaccctcaaaagtattttgccatggatatagaagatgaagaaaacatgagtaagatctaggcctatcaygtagtatcagatagctaattttatgttaacattttggtgtttttgcaaatgtatttcatgagaccagtgtggggattgtgttttttccmgtaacatcttctactgacagtggcatgtttttaatttttggtgtgttctctgcaacaggtgtcagaatttgctgcagacgtttttccttcctcgttatcgtcgtggggcatcactgtgccccgtggaatgggcttctgggtatatctcatgaagccccactgtttcatgtggagtcctgtcacggcatgcctctcagaataatgctcygagtattcacacatacaaatcgaagataacgtctgagattgatttaaatacccaggcctttgcaataataggacagaaatatttcccttcaaaatgcaggttctcgctgcattttgaaggaaggggattcacacgtgtctgttgatctaaagttcgcaaaggtgctaatgagagctgggactggtgtgggcctcctccttccgtgctgttctctctggtgccggggtggtggaaggccgctggggtacgttggtgtttcggtgaaggtacttatctcttctagttcatcttcagtcccagaaaacaggtttagatgcttccacggaagttgggagagtttagtagagaaattacaacaaaggcatcattgctctaactaatataaatatctgtatttaccttcttacttgtctgaaggaataacatgcagctgtcaatgatgagtgacatgtcactgggagtgattattgagcattagaacttagcactttccctttgactttacgcacaaccgatgatctggggtcttggagtcactcttgcgtaccatgtagaacccaaaccatgacccagtgaagcatttctgcatggtattgatttctgcatggtattgatttctgcrtggtattgctgccccatgggtgtgctgtggaggcggctgggcctctgctctatggactgtgtgctaagtgttggctttggttgaagtcagccatctggggtgtgagggtgagaccacctcctgcagtgctacccaggaaccacgggaccagcgtgctcacctcacttccgctgttgtgtgcgcagcccgtgcctgcctgctggtgattgtttttttcaggtttttatcctcatcaatcctgctcttgagatcttttaaaaacccagcttcatgtttttactgggcagttctactcactgtttccaagtttgtgacaagttttaagagagaggttacgtccatactcctcatttgagaaaatgtgacctgtgcttggcccgtgcagtagcccaccaacggagcatgtgcaggggtcctcagggcctctgtgtcaggactgtggcctacagcctacagctgcagtcacctcgcatagacagaggctttgtgatcgtgtaggttctggaactatccccaaactgatcctgtgatcacttgacatgataaagaatcctcccacatttttctgtgaagagaagccgatgttgtagtgctaaaacgtggacattctggtcctgtatttgtatcattttgaaagcaatgcaaagccctgtcatgatcagtatttacatttatgaagtgtagtagcatgatacagaaagagaaggcayctgttgaagaaaagctgtgaaagtggcatctttctctagttttagtattttcctttatgatagtagcattttcagtgacagtgagagtagtatttcagtgtgcccctgaggtgaataagaatttagaatgtatggaatctgtatcacagaaagtgtattcttctcaagattatttgtcaatccaatagtaattatttttatttctgaaaggaaagcatttggttatttcagaggttataaatatttggttaaatgcatgtccaaatacatttataatgatttgatttttgatattgataattgtttagcaacaaagtcaaaatgtaagcagtaatctagtatgtcatgttcttgctcagtttattaatctctgaattccatcttggctctattttttttaaccttttgttccctttgagcaccgaaaggagtaacctatcgagcttttgctggaggatgttataaatgaaaatttagtgtccattccatcagctttgtcaactgggagaagtggtgtgtgtgtgaggattattttggagaaataatgtctgtagagaaagttttaaatctcttagcctctaccacagtgtggcatcagttttcccatggattgtgtctaaaccaggtttatgctctgctgtcttggccgaatgatgacagccctggaattagagatctttaacctcaaagattggcagccaagggcgaggacttggtccctttaaacattcccatggatgaagctgatgaatattttcacaacttttcagtttgcttaacgtaatgagaatctaccattttacacatgtagtagaaatagaccctaaagccaccatatggggcactcgtaaattggtttacaattttagtaatattttggttactttaaaaaatacagatttttgaaatctagtggtagatgtctttaactttcattcacattacaaccttgcagggcactgtagccctcacccttgggctccatgtgacagctgcctagccatgatggaaaggaattatttcttcttctcctttttaaaaagcttgatgaacactttatactcctctttttaaaataaaaaattagggctgggcacggtggctcacacctgtaatcccagcactttgggaggccaaggcaggcggatcacctgaggtcaggagttccagaccagcctgaccaatgtgatgaaaccccgtctctactaaaaatacaaaaattagccgggcatggtagcccacgcctgtagtcccagctactcgggaggctgaggcaggagaatcacttgaacccgggaggtggaggttgcagtgagccgagatcgcgccactgcaccccagtctcaaaaatacatacatacatacatacatacatacatacatacatacahgtataaatccataaataaataaaatttaaaaattatgtttattttgccatgtaattttacaattctaaaattgtctgtattaattcaaaatctgaaatacctttaaaagttaggataaacaaattattctggaaattcatcaaataattgttttaaaaaagacaaaatcaccagaaagtgtatttatgaagttaggaagttgtaacctgcctacagcttcagttttgtgtcttgttcttacacacttttcctatcatggaacgatattaaggattcagacttagtcagcccccatatataatattctcatttttaaatagatactagaaataaaaccataccctcctaaacacaacaactaaaaagccataatactttacacaattacataagcagcttttaaagattggttcataaactaaatcaaataattgcatttattgattgaatattttaaacctgaaaaactaattatcttgtgaatgcatgtttttaaatagttttctcttctgagagacgctgcaatttaaaacccttagatagcatgagggtaaacaacagtgaaaggaagatgctaaaataaatatatatttatccatatattgatattaaattgtcatttcattagacttattaatgtaaggtctttctggattaatttatcatcccacattttgataaggttgaaaaagtctaggtacttcagaatattctcagaagaaaaaaaattatttaaagattttactttttaaagcaaaagcagttggtgacactaaatagaaatggtattagtcactaagcaaagtgtcagattacttgtttagttgaggctgatagttctttaactaaatgtataactcttcatgtatacatcaaggaataaaatttataagcacacatcacttaaccagttacaaagagagctaaaggaatctataaattttgcatttacaagatcctgcaacgaaggcattgtaagttactctttctgggcaccacaggttccagcagcactgatgtgaaggaaaaccgcaatctggacaacgtgtcccccaaggatggcagcacacctgggcctggcgagggctctcagctctccaatgggggtggtggtggccccggcagaaagcggcccctggaggagggcagcaatggccactccaagtaccgcctgaagaaaaggaggaaaacaccagggccygtcctccccaagaacgccctgatgcagctgaatgagatcaagcctggtttgcagtacacactcctgtcccagactgggcccgtgcacgcgcctttgtttgtcatgtctgtggaggtgaatggccaggtttttgagggctctggtcccacaaagaaaaaggcaaaactccatgctgctgagaaggccttgaggtctttcgttcagtttcctaatgcctctgaggcccacctggccatggggaggaccctgtctgtcaacacggacttcacatctgaccaggccgacttccctgacacgctcttcaatggttttgaaactcctgacaaggcggagcctcccttttaygtgggctccaatggggatgactccttcagttccagcggggacctcagcttgtctgcttccccggtgcctgccagcctagcccagcctcctctccctgtcttaccaccattcccacccccgagtgggaagaatcccgtgatgatcttgaacgaactgcgcccaggactcaagtatgacttcctctccgagagcggggagagccatgccaagagcttcgtcatgtctgtggtcgtggatggtcagttctttgaaggctcggggagaaacaaraagcttgccaaggcccgggctgcgcagtctgccctggccgccatttttaacttgcacttggatcagacgccatctcgccagcctattcccagtgagggtcttcagctgcatttaccgcaggtgaggaactatgctgctgctttaaaacacggggtcattgctcttggtaatgcttctagrcagcattttagtttcaggattactgttgactttccaccttgacatcactctgtccccaccaggaggagttactggtaagtctggctgcttgatttccatggccatgtggccactgagaagccgtctgcatcctagtgcatgctgggtctgtcgcaatgcaaggcagggacacctgagaccccgtccaccagagcagtgtttacaacactatccataactcccttcccgttaggcaaccccccccatgaccctcatcccacagcaagcctttagcaggagagacggaagaagagcccagtctttgaaaccttgcccccagttcagcaccattttccttyaaaggtctcatccaagaatctcacattcaagataagtgacaccagcccgtcagcagctgaaaacccaagtctgggtcaagatggcagcctctgggctcccacatgactggctggtggctgtttgctgttcctaagccgaggagcccatcaaagcagcgaatgagccagcacagcagtgagcacctatcagagcgcagggagggaggggcctccaacaactgttctagggcctgccagttgcctgggagtctctactttgaatttcctacatgggctgtatgaggacttccccgcatgcccaggctggaggtggacagccacccttccatttgacctccccagcgcagtgaaatcaggatgaaggaaggggaagttccagggtgggcttagattggcttacgtgaaagagaaaaagtaaaggagaaaatcacctttagttctcatctctaaatcctaaaactctctgattatgtattccttcttttcttggaaatccaaagttcttctggtctattgcaaaagttatttttttgaccctctattcatttattactttgtatcagagtcttcttcactttgaagataacatgtatactacccttgaccacaagacttgaaggtggcttgtgttcccctggaagaatccaagtgtcttatagtttcttttttgctgttggctacaattagaacaacctctgtgcagttgtagtctgagatgaccaggagttctgttttaaaggaaggaaatgtattttattttgcctaaaggaatcaaatgcaacatcagtataaaataatatattcaaggtatttcactgatttttttaacgaaccaaatacttgcttcccttattaacctstcgtcaacattgtttataaggattattagtccatttgtactttaacaaatcagtgctactagatcccatgtgattttttattttcaggattactctttgctaaaatattaaagcctgagttcaaaatattgtctgatgtgacttgtcttsccttaatattgacagagtggcatataagaccattgaaatgacatcaaatgccgtggatcccagatgtctgaaccttcagtgtgtaggctaggagcaccttaggcggacgcagatcgaagtgccagtagagatrtcacccctgcctccctggcttggctgtgcgcctgcagtgacttctgtgtggagcatgaccagagcccctggcttgggaaggctggagggacatctgttgggctccagcctggggaggggtgcaggtgggcagggctgcctcagccccctgacgccacgttcctctgggctctgtaggtgctgaacaccaggctctaggcctcatgtccagaaccactagggcatgagggsatggagctgcacttcgagtctctgccggagtggaacctgccaccttgtgtctttggagcccccaggatagccccggaatgtgacgtgttccttgtaggacccgggtggccctcccagaagcagtccttagggctttgttggtgggctctattgtcyttcaacaggaaatttccaaatgtgcattctaggatgggtggaaaaccctcactctttttctagagtaacccttgaaggacgtaggtcagtcatccctgcgtgtcactgcaggtaaatggtgctgcctgggactgtgtggcatgggtttaactcttaagagcattttttttgttcttatatctgtcccccaaattaagagggaagtccttcattaaccatacaggttaatgagaccagtaatcccctcaacggggtgctgagccctggccatgtgcctcagatgtctgcgttaacaagcatcagccccagcaccagaccttcagagtgaggctctcggaactcactctgaagttaaagttcttcgcctctctttgaaagtttggagattcgcctaatcttayatgaaatggaaacttttatttcctctggcttatccctaatcttcttatgactttttcttctctgtaaactcgaatgaatcgccctttccctctggcaccctggccaattggaatgcgtcgccccttccctctggcaccctggccacgtcctgtgtttctgtcacagcctcagttcctcgcgtccgctcacccctgcattgcagatgccgctgcctgcgggtgcatggatccctgccaccaaagcctctgtccattctccacatgacttgtcttgaacactgtcctctggggctcactgatacttgctggtgcaatgataagagaaaaacatcctgacaactatcttttctactcatttcagaaatattttattaaggaccaacctggggatgctgggttttcctagtagtcatttgattttccagacaagtgtgaaattggtgggacatgagttgaaactggctcttaacacccacctcccagcagacatcatttcccaaaatgccatgggctcattatatccaagataaatcataagccataagaccatgtccaaaatccaacaaatacatctgttctcagaagcactttaatacagatgtctgtctgacctgagcatatacctgtgcaggtgttccgaacgtctaagcgctttccctccccgtgctgttctctggtacatgattctatcgtaccgtctgggcgagtgagcggagtcagagtgcatttgtgtggagaggctggaatgactgagaagcctctcggtggcgcctttgagggaggtgctgtgcacagcttgtggcttcyttcactggatcgcatctccaagctgcccctttctcttgcctktgattttgcacatcatcctgggctgtgctcccagctgtgtgtggccctggagctgactgagccacaccgtgtgtgcatgtgagagagggcaagrggggtgggagggccatactaggtgggcgtaggcgtgggcaggtggccctgagcaggcagctttgcctgtttgcctcggtttcctcctgagggccgggctggcctgcggtgaggattggagggatgctcatgtgtggtgcccacactccacactggccccacgcgggtggcgaaggactcagccagagcctggcaggatcctggggtgtctrtttccaaggaatgttctggaagaaacatacacacatacttgtttgccagatttacctgtgtggtyttccagatgagaagcagcctgtgtcactccataagggagagtgcgtgcagcattgagagagtgarccctgctcccagctgcatctggcccctaacctgcatctgtgcttcccacacaggttttagctgacgctgtctcacgcctggtcctgggtaagtttggtgacctgaccgacaacttctcctcccctcacgctcgcagaaaagtgctggctggagtcgtcatgacaacaggtaaccatcttggtgttgtatgtaaccctgcctgttttcatgtctgacaaatgtgaaatgttctcaatcgacaaaaaccactgtgccacaccgacgggagatggttacttcttttcttcttcaaaatgtctgccatatgcaagtttacgaactgcacttacaagcttttttcccaaaatgttcatctttttaacctaagtttgttttatctggagaaagcacactatattaatatttgattcctgtcatcttcatcctgtgaatggcctcaatctgctctggaagatggcaaggggcttactaattcttcctttatttgaaagtagagcctatctattgtatcagttaatgttaaygatgccagataagtttcagtgtgacttcctttgaggagggagagagctctagcaagagtagaaaatccgtggggaaaaaaagcacaatttagaacgatagaagaaaccctattaaattagtctagaagttcccagtagcaaaaggaacccccgagtcctctccccacatcccgcgagtgagaacacgcagcagcatctctgtgggtagctcctgggaagggaagccacatccttggccagtgtctggcaccccagggtggagcaagactcagggagaggacccctgtcatgtggggccgtctctgtacccagcatctgctcagcccagcctggacagccagatgcaggaagcagaccctagaggtcagggaggaagctggggacagtttctctgtctacatccaccagcccaggagaaacccccagttctcggtatgtgactttcttgttctttccccctgmggggtcacctctatcagactctgcagccctcttcactgacccacctcttgctgccctaggaaacctggctgctctgctcatgaccattgtttccttgccgtgccgtgtccagggaggaggaagcacccgaacagcagcttctattctaatgttttgtacctgtatcttctcccccttttacctctctccttactgctatcttttacattaatcaaaggtgaacaccacaacgactgaatagaatagttccctaggtaagactccctgcctcttccagcagcatgggtgagtgagctggtcatgttctttcatcgttttgttgttgttgttgttttgtttttgttgttgttgtttttaacgaccttagaagaggccgatcaccttctgggaacaccttacatcttagtgtgtatttcacctgagaccacttgctcagagccatagtttacatctgaagccaggacgctggagcacttggcactccagacagctggttcagggggctcccgctggttgagtggmcttgggcaggttacaaggcctctgtgcctcagttccctcatctatacagtggagacattagtagcatgagcctcagaggacatcgtgggaatgcagtgaggacaatttacctaacagacctggtgcttacctgccacatggtgtgcacaccrttggttcagctgcagtggatgcgagtttcccggcaggtgacttccagggtcctggcatcacacctctggtcagtggtttatctcacaaagttgagacggagtgatctgtctgtgggagttcaccactgcttgtgatttcactccgagtgtggttaatggtgacagtttactaatgaaaacatcacaagttaattctgttttccttcttattcctctgggtgccgttaacccctccttcctaatctcttcagtactttgatatttgatgtcaagattaattaccagaccagttagtccacctttccatagtgttgcccagctgtgttctagttgtgggcattcaagaaaagatgctattgcataccagaggaaatgacttccttgagtttagtgtctggacactaagcaatgacgatggttggctttccagaaatgtcacaaagtgagtcctcaataggaggttgtttgcgtgtatacatttgcccacttaaaaaataggtggtaagaatatgcatgaagatgagcttgaaaagtctgttggcccctgaaaagttaagtcactgagaataagagtcagacttcaggagcacagttaggcaaacattactgtgaattacagaaaatagtgtctctttttttttttttcaggcacagatgttaaagatgccaaggtgataagtgtttctacaggaacaaaatgtattaatggtgaatacatgagtgatcgtggccttgcattaaatgactgccatgcagaaataatatctcggagatccttgctcagatttctttatacacaacttgagctttacttaaagtaagtttagtaaacaaataaggacaggaagctctttttaaaaaatattcctctattagaaaacattgcaaaacctttcattgtttctgtaatcatggaaaatctctcaaaatcataactttaattagtaacaataaggctgcatcccattcttccacaatgctyaacacacatatgcacacatacatacaataacataacatggtcataaatttcaagtctgtgtttaagaccatgtgattttgttgtatgctgtataaatagaagttcccaaactgccaggtaaagatggtaatttttattctagtcaccgtttctagaaagagctagtcatgtatccaaactccttttctttacaaagccattttttgtatgtggtctttctgttctgaagtcataaattggaagaaggaaaggttactcacatcctgatgacatatccattattgagtgacaagaactgtattaattaccctaaacatgtaaaataaatattccagttcaaacttatctttcccttgtggaaaatactagcctctgaaaatgatagactaaaatttaactatatacagctttaaatgttacttttgcaacttttttcctttcagtaacaaagatgatcaaaaaagatccatctttcagaaatcagagcgaggggggtttaggctgaaggagaatgtccagtttcatctgtacatcagcacctctccctgtggagatgccagaatcttctcaccacatgagccaatcctggaaggtatgagacgagattcttcaacaagccagtttctcaagaaaatgttaacagataaaaactaacctgtgttaatatcccttttcctktttttctttttatttttagacttggatgtggatctgataagagtctctataaaagcatggatttttttctttccaattaacttaattagaaaactttaatgaatgaaaaatgctgattgtaattaaccaagtaattagaatggagtgagaatattggattaaaattgtatcagtatttaaatttgggtaataaatatctctaaatcagaggtgtrtgtgatcctccatatttctgaggaattctaatttgctaaatgtgtaattaaagtatttatttgcctgatatttcagaagcagataaacactagtgaaaagtgaaaccactattgtgatcatatttttttccatccttctttacatttgaggttagcacttttgttttttagtgttttgtatctacatcccttctcccaagcccttaggcattgtttattccaaatagaacgttttattacattactttccttgtttataaaagcaacaggcatactcactgtggaaaattgctaactatttttaaaatataagaacattaaaatcatccgtattcctgtaacccagaaatactcactatggatgttttaccatactttccatgggtttatttctgcatctgtctagatttattttggaaattttaaaaatatagaggaaaataacatggcaaacacccaagtatccatcacccagaattagcaaatgttagcattttgtcctatttgcttcagtgcatttttaatgatagaaataaatcatttcagttaaagtgaaaaccccatttccccaactcccttggagaccacttttgtgaattttgtttgtgttatgtccttcctactcaatttcatataatttttttttttttttttgagacagggtctcgctcttacacccaggctggagtgcagtggtgcaatcatggctcactgcagcctcgacctcctgggctcttaagcgatccttccacctcaaccttccaaggagctgggactacaggcatgtaccactatacctggctaatttttatattttttatagagatggggtttcaccatgttgcccaggctggtcttaaactcctgggctcaagcgatccacctgcctcagcctcccaaagtgctgagattacaggtgtgagccaccatacccagcctctcagcttcacatacttattttgtatgtgtattttgtatgtatggcataaacatatgcatttatatgcacagactgtattttaaatttataagctattgttagatgtgcttttcaataaatcaaatagatggtttactacctgtggggttttaactctttttctctcttagaaccagcagatagacacccaaatcgtaaagcaagaggacagctacggaccaaaatagagtctggtgaggggacgattccagtgcgctccaatgcgagcatccaaacgtgggacggggtgctgcaaggggagcggctgctcaccatgtcctgcagtgacaagattgcacggtaaggggygggggctccctgtggccacctccctgcacacaggattcatccatactgtttgccaacctcccttttccacaaccatttgaattttggccccatttcccactcaggtgttccacagtattctttgaaggactgaggttctaaacaggtgctgctgggacccccgtgaggggcagcagcaggacctagacacaggaggctccacgcttctaacattcctatccaagcgtctcagagtttaccacttatttttaacgtgggcttctgggttaaactgatgtttttaatgggctacaggccatgacatcttaaaactactggcttctcctcattagtagtagatgcaacttcagtggtcactttcatcattcagttaacattttaggtagttgatatgtgcattttaaaagtaatgcaaaccctgtcacaggcattgtgttctaagcacagagagcatccccagccattctgtgcctgggtgtgggttaggcttagaggagggctctgcaagcacacttctgtagtcagcaggcacctgggagatattcatctttcagaggcctgtatccagagcagattatagaaaacccatttcttcagatggtatcagttccagtagttctttgttttcatttttaaactaatgtttatttggaaaaaaaaagtaacataagcagatggyaaaaagcatacaatgataaagtttaaaacctccctcttcagagccctcctgtggcacccacagtgagtgggttttgactgtccatccagaagctgtcaaaattgatgcatacgcatgtgcacgtgcacatcttttcattgtttgtgtgccctttatgttgatttccttcagtgggtcttgtcaggcaacctcaagtacagggagctggattaatcacacattttgggccattgcccacagcccaggtgaccactgtgatgtgtttatttattatttgtccttccagtccacctccacacgtgcatatgtcaactttgtgtgtgtgtgatgtgggggaggggggtgtactcttgaaaaatacacaatagaattatttggagtatttgttgctaatttacagaaatgatactatgctgtaaatcctatctgattcttacattttcattcaacctatatttttggagctatttctgttgctctaaccaacagccagttcactactgacttttgcaaatcttccttcatagtcatgggccatttccttcatgatgggacacccatatttcttctaactcccttatacatgtagtcctgtatatccttcaacttatgcaaactccatcacaatattatagactttgctagagtttcttggggcatatattcaggagttatgcacatatataacttcacagaataatatcagattgcatcccagggcagtcacactagttgacacttacaccaatagtgcattaagttagcttctcccacattctgtaaactgatatcttcatagtttcaatttttatttctctttatcactaggaatgttgggcatctcttcaattacatattaactgttcatcttacaccttctttgagttgtctgttaatatcatttgttcatttgtcttttgaatctcatgcctttttcctcttgattttcagagttccttttacagttgatattgtaatccttagccctttgagaagatgcagtgtcttttgcaagtcctttcccctttgagtagtcttgcactctgttgaagatgatttgaacatatacacaagggtttattactgtgctgtctgttctattccatatgtctattctttatgccagtgtcatgctgttttgattactgtagctttgtaatatgttttgaaatgaggaagtttgaatcctccaactttattcttcttttttcaaaatccttttggctatccagggtctcctgatatttcataaagatttttggatgaagtttttcaaaaaatgccatcgttattttgatagggattatgttgactctatagattgctttggttaatatggacatcttaacaatattaagtcttctaactcatgaacatgcgatatatttccatttatttgtatcttcatttctttcagcagtgttttataatttttattttacaagccattcacccccttggttaggcttattactaagtaatttattcttttttgtgctattgaaaattgttttcttaattcccttttcagatcattcattgttagtgcatggaaatgcaactgatttttgtgtgttgattttgtatcctatgattttgctgaatgtgtttattatttaaacagttttatggaatctttagggttttctacatataaaattatgtcatctgcaaacagatataattttacttcttcctttccattttggatgccctttatttctttttcatgcctacttactgtggctagaacttctaatactgtgttaaatagaagtggcaaaagtggacatccttgcattgtacctgatcttagaggaacagttttcagtctttcaccgttgagtacagtattaactgtggtcttttcataaatgtcctttattacgttgagttagttttttttctattcctagtttgttgaatgtatttattattattaagaaagggtgttaaatcttgtcagatgctttttctgcatcaattgagatgatcatgtggcttttgcccttcattctgttaatgtaatgtattaattgattttcatatgttgaaccatccttgcattccaggagtatcataatgtataatccttttaatatgctattgaatttggtttgttgagaatttttgcatcagtagtcatcagagatactggtttgtagctttttttacccttcttcatgtctttggctttgatatcagggtactgctggcatcatagagtgagcttggaaatgttctctttagtttttttgggagtctcaggaggattggtggtaattattcttaaatgtttggtagaattctctagtgaaaacatttggtcctgggcttttttttttgagatggagtctcgctctgtcacccaggttagagtgcagtggcacaatcttggctcactgcagcctctgcctcctgggttcaagtgattctcctgcttcagcctcccgagtagctgggattacaggtgcctaccaccatgcccagctaatttttgtatttttagtagagatagagtttcaccatgttggtcaggctgatcttgaattcctgacctcaggtgattcacctgcctcggcctcccaaagtgctgggattacaggcatgagccactgcccccagccatgggcttttcttaattgggaaatttttgattactgacccaatattcttatccattaatagtttgaatgaattgtttttcatattcattattcctgctatcatttggttaccatctgcatggaatatatttttccatcctttcactttcggcctatgtatccttagatccaaaattagtctcttatagacagtacatagttgaattgttttttttttttaatccatttacccaatctgtatcttttgattggggagtttattcattgacatttaaagtaatcactgatagggaagacttactgttgccattttgctgttttctatatgcttgtagctttttgcttgtttttcccttattctcttactgccttcctttgtgtttctttcattattttttctaatgataggtgtattagtccatttccattttcattgctgataaagacatacctgagactgggcaatttacaaaagaaagaggtttaatggactaacagttccacctggctggggaggcctcacaatcatggcagaatgtgaaaggcacaattcacatggcagcagacaaaagagagctagcttgtgcagggaaactcccctttataaaatcatcacatctcatgatacttattcactatcacaagagtagcatggtaaagacctgcccctatgattcgattacctcccactgggtccctccgacaatacatgggaattgtgggagctacaattcaagatgggattttggtggggacatagctaaaccatatctataggattctcatttattttattttttccttttgtctccgtggggtacaaaatctcatttctttttgtgtatattctacaggtattttctttgtggttaccattgcaattacataagacatctttaaattatagcattctattttaacttaaacttcaattacatagtaaaactttacttctttacttccaccccttcacactttgttattgaagtcacaaattacatctttatatactgtatatccattaatatacattgtagttgtaatgtttttgtcatttaaattttatgcaccaaaattacaatagtattggttactgtatttgtccatgtgcctccctttacaggagaaccttatttttccatacagcttaatgttgctatttactgtctttctatttcaacttgaaggactcactttagcatttcttgtaaagcaggctagtggtaatgtactccctctacttttgtttatctggaaaagtcttaatttcttcttcatttttgaaggacagttttgccagatcaaatatgcttggttgacagggttgtttttttttttttttctttcagcacttaaaatatatcattccactcctttctggcttgcaaggtttctgctgagaaagccacaggtcttatgaatcctcccttgtatatgacaaatggcttttcacttgatgcttttaagattctctgtcttcactttagacagtttgattaaaatgtgtcttagtgtggttctccttggatttatctgtatttcatttctttgagcttgaacttgtatggtccatttttttccacagatttgggaaactgttagcaattatttcttcaaataagctcttagcccctttctctccctcttctccttctggtattcctagaatacttgtataagtctgcttgatagtgttccgtaagtcccttagtctcgcttcacttttcttcattcttttttctttttgctcctctgactcagtgatttcaaaaaaagacagtgacctgtcttcttttttccacctcatcaagtcttctgttgcatgcctttaatgatattttcagttcagttattgtatttttcagctccagaatgtttggctcatttttatactaatatctctttgttgatatgctcattttgttcttgctaagtttttcttattttgtttagttgtctatgttctcttctagctcattaggcatctttatgacagatattttaaattcttttttagacagctgatagatgtgcatttctttagggtcagtttctggaaatttacttttggtcctttggttgggctatgttttcctgtttcttgtatgccttgtttatttgtgtgctttgctaatatttgggcatttgaaaaaagaaccatctctcccagtctttgtgtactggctgtgtacagagaaagttcttcactaacaagctggctaaaaaatctaggacctcttatgctttttctgatttcctgcttctcctggtgtcttcctggaaaactgtagctctaatgtgctgcttgcctctgtttttagtggctcccaaactctggcaccagtctcatcaccgagtctgatgagactcaggcaagacagaaaccagccctttgggcagactccagacagccagaacatcagactaatgatccactcttttgtttccatcccaagagaagagccccagtatggaggcttcctcccacttagggggcaccttgctatttagggaaaggggaacaaacaggcatgccaaacatcgtgaaatttcctatccctttcattggaatctcttcctagttttacaatggactggatactgtagcttctcagttggtctccagagttctcacagagccattctggtctgtatattgttgttaactcagggtctctatgggggaaagagggcctgtagcttcctagactgccatcttgttgaagtcgtagtccaaacaccattgattttttaatgttaaccttatggccagcaacttaactcacttcttattctatttatactttcctggttgttcttgaatgtaccaagtcacagtctgtagatattgactgttctatatcttcttttgttataccagtgttatttttctttattcctgctgtccaggaccttggatgatatgttacagcactgtccatgttttcttcctgaatctgagagagattgtgactgaagtttctccatgatgtacagtttttcctacagggttttagtaggtagccttcatcatgctaggaaaattctgttctattcctattgtcttagagcctttttattatcatatattggtgttactttatcaaatgttttatgtgtgtctatttttaataatggtaaataattaatagatttcctgatgttgaccacctttttgcaattttgacataaaccttactttattatagtcactcattgttttaacatactgtttgatttggatgactaatattttacttaggatttttgtttataagttaaataggcctatactttttytaaactttttaattgttcttatctgattttggaatccaggttaatatagcctcataaagtgtgtttgtcttcttgttctactttctgaagtctcttctgtgagacagcagtgtatagaacccaagagtgaaaacatccagtccatatatatatatatatatatatattttttttttttttttttgtagttatcttcatggtcatcctcatcattttggcaggagaccagtctagttgtaatttcaggtccttttctggttactagtttcttaaatttttgtttcttctagaacaaatttttagccttcatattattctagaaatttatctagaatttgaaggtttgaggcttctttgaaataagccagtcgattgtggcattcaggcagagaaggtggatctataattagagaatagagtagtggtagtaagagaatgagagctaaaaaagagtcagctaatgcagtcagaaagaagaatgctagaattttactatagtagagctacaataatttctgtggttatggtttcaaagagaaggtatgggaaggagtaaccaaataaggtggacatttgaaaattatgatgtattgtattttacaaagatagccccaccccaatgcctctcatctaaaatcctctccaacaatgtgaccttgccactgtaccattaagaggtgacgtctctgtcccatgcccctgaatctgagcctgtcatgtggctgctttgaataagagaatgtggtggaagtaatgcagtgctagttctggcatagccttaattggcctgacaacttccatttcttgcctcttggtggcagccaccatgtgagagttgtgactaccttgagaccaccgggctataagaagctgcccctccgtgtagagaggccctggaagatgagatgccacttgaagacagagagagggcaaggaacagtgaagcaccaaatgtgtaagaaaagagttcacctggaaaatggaagagagaagacaaaattaccaatatcggaatgggagaggtgaaattaccacagatgctacagatactaaaaggattgtgaagagaaattataaacaaggctatgccaattgacaatttagatgaaatggacatatttcctgaaagacacatactaccaaagctcacttaagaagaagtagataacttgggctatctatatgtattagagaaaatgaatttgtaatttaaagcctttcccaccaaaaatgacaacaaaagaaaaaccccaagctcagatggcttcactattgaattccaaacatttaaggaagaaatacccattttgcacaaaatattccaaaattgaagtgaaagagatacttcccaactcattctgtgaggccagcatttccctggttccaaaaccagatgaagacaccacaagaaaataaaactacatgttaaaatgtgtcatgaacatagatccaaaagttctagcaaaactttagcaaaccaaatacagcatcatgaccaagtaggggctatcccaggaattccaagctaaatgaaacatttgaaaaatcaatataattcaccatattaacaaactaaaaaagacacagaaaaggcattttgcaaaatccaacatgtgttcctcataaaaactcatagcaaaatagaaatagaaggaaaccttctcaacctgataaaggaaatctatgaaaaatctacaggtaatgtcattcttaacagggaaggactgaatgtgtttgcctaagatcaggaacaaaacaagattgtctgctctccccacttctgttcaacattgtattggaagttctagccagtgctataaggtcctaagaaatcagtggtatccatattgaaaaggaaaaagtaaaactgtctttatttgcagacatacttatctatgtaggaaatgagatggatattatacaaaactatgagaatgaatgaatgattttagcattgtggcaaaatataagatccaaaatgtaaaatacaaaatcagttatattttttacacctgcaacaagcagttgaaattgaaatgtgtaaagcaatacactgaaagctgtatattgaaaactgtaacacattgcctagagaaattaaagaactaaataaatggagagatacatcatggtcactggttggaaaactcattattgtcaagataccagttttcaccagattgatctatagactcaatgcaatcctaatcaaaatctcaacaggattttttggagaaattgacaaactgattccaaaatccatatggaaatgcaaaggacatagaataggtaaaacaactttcaaaaggaagaacaaagtaaaaggctaatactacctgatttcaagatagtaattaagaaagtatgattttggcataaagataagtatacaaacaagtgattccttattatttagagtggttttaggtttataggaaaattgagtggtagatacagaatttcccatatacccagtgccctcacgtatgcacagcctccccatcatcagcatctcccactctagtgctatattcattacaatcgaagacacatcatcatcacccaaagcccacagtttacaatggsgctcactcttgatgctgcacattgtctggctttggacaaatgtataatgacctgtatccaccatcacagtgtgagaccagagtagtttcactgccctaaaaatcctctgtactctgcctgttcaccccctctcacctcctaacctctactctgcctgttcacccctctcacctcttaacctctgtattctgcctgttcacccctctcacctcctaacctctgtactctgcctgttcacccctctcacctcctaacctctgtactctgcctgttcacccctctcacctcctaacctctggcaacagctaatcttcttaatgtctttgtagttttgccttttccagaatgtgatctagttggaatcatacagtatgtagccttttcagattggctttttacacatagtaatttacattcaagattctttgatgccttttcatggcttgatagctcattttttttaagtgctaaataatagtttggatgtgccacagtttattcattcacttcctgaaggttcattgcttccacgctttggcaattacaaataaagcagctataaatatctgtgtgcaggtttttttgtggacatgagttttcaagtcctttgggtaagtaccaaggagcacgaatgctgggtagtatggtgaggatatgttgagttttgtcagaaactgccaaactgtccttcaaagtggctgcactgttttgcattcccaccaacaatgaatgttgtcccacattgtcaccagtattcagtgttgtcagcagttctggttttgggccattctaatacacatgtagtagtatctcgttttaatttgcagattcctaatgacatatgatgtggagcatcttttcatgtgtttatttgccatctgtatatcttcttgaatgacgtgtctgttaaatttttttggccaatttttaatcaggttgttcattttcttattgttgagtttagagagttttttgtatatttggaagagttcttcatagatttatcagatatgtcttttgcaaatattttctcctagtctgtggcttgtcttttcactcccttgtctttcacagagtagaactttttaattttaataaagtctagcaaatcagttatttctgtcatagattgtgcctttgatgttacatctgaaaagtcatcaccaaacccaagatcatctagattttcttctgtgttatcttctaggaattttatagttttgcattttacatttaggttgtgacctactttgagttaatttttgtgaagggtgtaaaacctatgcctagattctttttttttttttctgcatgtttatgtccattggttctagcactgtttgtagaaaatactaccttttgtccatttcattgtctttgctcttttgtcaaagatcagttgactgtatttatgtaggtctgtttctagactttttattctgtcccattgatctatttgtgtattctttcaccaataccatgctgtcctgattactctagtatagtaagtctttaagtcaggtaatgttagtattacagcttcattatattccttcaatactgtgtttgctcttctggatttccctttttatatcagccttaggaacagttcatcaatatctacaaaataacttgttgaaatattgattgggattgtgttgaatctctatgtcaagttggacagaaccaacgctgagtcttcctagccataaatatggaatatccatttatttagttctttgatttctttctttggaattttatagttttacttatacagatcttgtacatactttgtcaaatttatacctaaatatttcagttttgggggtgttagtgtaaatgatgttgtgtttttaatttccaattctgctgttcattgctggtcacagttaatttttgaccaaggcacaaaggcaattcagtggagaaagaatagtcttttcaacagtgatgctgaaataagtggatatccctgtgcagaaaaaaaaaaagcaaaaaaaatcaagcaaccaaacaaatggacttcacttatattttgcaccttatacaaaatgaatttgtaatgggccatagacctaaatgcataaaaattctggaaacaggagataatgtttgtgacattgagttaggcaagtttttagctacactaaaaaagactttccataaaaggaaaaaaactgtcaaagtttaaaaattacttctttcaaaaagcactgtttaaacagtgagaaataaactgacaaacagggagaaaatgtttgcaaatcatatatctaataaacgattggtatccacaatccactgttactctcaaaacgcaacaaggggaaaatagtttttaaaatgggcaaaatgtttgaatggacacttcaccaaaaaaagatacacaaatgtgaaataagcacatgaaaagctggtcaacaccattagtcactgatgaaatgcaaaggagatgccacaacacatctcttggagtggctgaaattaaaaagactggccaaaccaaatgttgacagtgatatggaggaactggtactgtcatccactgtggctaggtatgtaaatagaacaatcacttttaaagacagtttgacacagccaggcacggtggctcatgcttttaattccagcactttgggccaaggcagatggatcgcttgaggtcaggagttcgaaaccagcctggccaacatgacgaaaccccatctctactaaaaatacaagtattagccaggcatggaatcccgtctactctggaggttgaggcagaagaatcactcaaacccaggaggcggaggttgcagtgagctgagattgcgccactgcactccagcttgggcatcagaataagactcaaaacaaaacaaagagagtttgacagttccttaaaaagttacagatatggccaggcgtggtggctcacgcctgtaatcccaactctttgggaggccgaggcgggtggatcacaaggtcaggagttcaaaaccagcctggccagtatggtgaaaccctgtctctactaaaaatacaaaaattagccgggcatggtggcacacacctgtagtcccagctactcaggaggctgaggcaggagtatcgcttaaacctgggaggtagaggttgtggtgagctgagatcacgccactgcgctccagcctggggaacagagcaagactctgtctcaaaaaaaaaaaaaaaaagttacagatatgcctgccatgtagcctagccatttcactcctagtggtttaccaaagagaaatgaaagcgtatgtccacgcagacttgtaaatgaatgtttgtaggactttctttgtaatagacaaaatagtcaaaaactggaagcaatccacgcagccatcaaccggtaaatagatagaacagacggtggcatatccatgcagtggagtactactgggtgaaaaaaagaacagtgatacacactacagcatagagaaatctcaaaataattacgcagagtgaaagaagccagatgaaaaagaggaattaccatacagtcccatttgtatatatctcgggagaatgcagactaagctgcagtggcagaaagcaggtcagttattgcctagtggggacagaacgagatgtaaggagacaggaggtttggggagtgaggtcacatgggtacatacaaatgtcaaaacttaccacagtgtccctttaagcgtgtgcagtttattgtatgtcagttgtaccgcagtaactccaggggaagaaatcacatgagaaaatgcttatataagtaaatgacagaaagcaccacaactatatgaattagaaaaattcaaataagttagaaggatgcaaacagtaaagttaagagcagaaattagttttgtaagcaacaaagatgtagcagtgagcagtaacaaagcctctaagatgtcagtacttagagcaggcaggttgattaaagtcaacagaaccggtgaggctgatcaagaagacagaaggcactaccaaaacgtatctggaatgaaaacacggatatccttcagggtccagcagagattgctacagtggagagtcctagacacttcagcactgataggttttaaaactgagacaaaatagaacattttctagaaaagtgtacattgctaaaagtgacttaagcatatgcagaaaattggaatagaactctgcctattaaatcacacacacacacacacacacacatacacacacacacagagaataaattaagaaaatagaaggaaggagagtctgtggagagaggggaagtggttggcccagacaacattgagtgagttctagacatcgtttgtgggatgatgatccccattttatgtaatattttccaaggatagaaaagtagggaakaattctgcagctcattgtgtggctcataactcaaaggttactacaacctttatctccacaccagacaaggacagtaaaggaaaacaaaacaacaacatgtcatggaaatacacatttatacacttacattatctttaaaaatttagcaagccaaattctattttatattttttaaagcttcattaattcctcttaaatctatcatttcaatgtgattttaataaaaatcttattttttcatagtacttaaaagttgaatcccaacatggcaatagaaaactaacaatataaaaccatagtaatcaaaagtgagtggtaattttcggcagaacagtggcacaacatacaatctgaaaagacctgcagacccatggggcagcactggtgatcaggcctgccygtgtttaaaagaaaatgtaaactagatggaggcttgtctctctcacagaaaattaagtccaaaaataggtggcccagagaagctctggtggctccatggtctggagcctgatccctctttgtcccgcaccatctaagaggtctcttctgagttcagggtcttcataatccctagagctgacgaaatccctgagtacccagtctgaattccaggcacagggacacttcagccagctcagctcatcatccagagctcaggcacagggctccactcgctatggggcagctggggtggccgggcttacacactcagccacctggaagaggactggggctctgtcatgcaggaggaagggaagaaaggcagggctgcagccagcagtctgtgctagacgtggtgctcgcagaagacatggacaaagtagccaacgaccagtcctggagaaacaggctgtctgtgcagagaagcagcccaccatacactatccaaagcacatgctaggacagttaaggacctgagtatgcagagcagtgcctggcagttgcagggttcttcagtaaggcacagaaaaccccaattataaagaaaagtgaataaatttgactaaattaaaatttcaggaattatttactataacccacatatttggaaaagaaaagccacatattgggaagagatttctgatgtctcatgtgaccaacaaaggattcgacttggttacaggctgactcctgcacctgcatagcacagagccatccatttggaggatccttgctggggcgtggggatgtcacacacataaatgcaggagtcggggctcatggacctgaacccttcakatccargccttttattatatagtaattagactttacctcaaggaagaaacaaacacaagctgatagaacctagcatgggtgggccaagaaatagcaaatggccagaaaagttgcccggaaagagccctggtggccaaaatgatgccagttggctgcagctgtgtccctgctctgggagagttgagagtggggagcagccaccttggagggccaggtggatggggctgggtgaggctgaactgttccccttacacaggacacagtgacaggcagagggcccagggccatggtaggttgggggtggggtgggagccacagcactgccattggaggtcaccagggtgtccatcccactggcaggcagtttggcggtgaatgcagccccagagagttgtccacaagaccatggggtgagaggctcccatggggttggccaccccacggtgattatgttggcgcgggagccgtgggaaggaacgagagtcttggttcagatgacctcggcctgtgtcctcagctgcacagagctgtgggaacaaacaagaccatccagaggaggaccagcagcctgtctattcagagtcggctatggcaagggggccagagcactgtgttgggcagactcaaaggcacgcacaggaagggggatggctttattgtagggaaagggggaggctttgggtatgttctgatggaggtaggggaagccaagatgggctctgcagaaggtggcctcccgtgcagctgcttgaagaacccaggggcatctctggctggtcctgggttgaaagcaggaaggaatgggcgtggggcaaccactaggaagctgtagtccttcctgaaagcctggctgactgggccgagtgctgtggaggctgtggtttgggtcrgagtagttctcctgccctgtgtggtctggccgacgtctgtctgcagctcagtctctcaggccgggccctttactgaatcaggggacagatcagatgatagcagtctggactctgttcctaaagaaatggcacaaggaaaatgaaagacgaagaaggccaggcacagatgcctagacccgggtgcactgagccgaggccatgctgtgagagtggggacacctgtaggttccttgggtgtcagccaaacacacttcatggcacgctgtgagtgggcacctcccatggggtccgcaggacaggtggctgtggacatgtagtgggtatctctaggagacgtcctgcctgcagtcttggcagagctttacttgttttattygcatggacgctgactgtgtctgacaccctctcgctggcgctaggcgatttcatcctgatgaagtttgtcccagctgtcctttgtgaggtgcattagtggaagctggtgccacaccatttcccacccagggcctctgcagagctgtagacactcttggaattctctttcaaagcatacgttcagaattaatgactcctaacaaatgaaggtttctgcaggatcactgctttaaagtttgcccagaagacctaattcagcttaaagatgctgagtccatagaggcttctaatctgtagaagaaaggggcctgtgtttcttagaggtattgaatyatttcatgctttttctgtaagttagggaaaccttcattttcatttccattttggaaggtggaaggaatgtgtcataggaattggaggatttgtccattcgacacatatttattgatcttctgtatgtgccaggtacatattgtaagtgctgggataggtcagtaaagaaagcagacagaaacctcttcctgcactggggtaggatgggagcagagagtccaacatggatctgtaaattatgtggaagtcagaatggggttggagggcttgggcggcagggaagggagacctcaggcagcaggtaagcaaaaggcttgagtggctgggaagggaggcctccctcagaacggcttttgtacagggacctaaagtgggggcagccatggctgcctctgggattggtgttccagctggtggacctgtggacagaagctttgggcaagcagcaaggaggtccctgagggtggccagaagcttggggacaggtgcagggtgagaggtgacagggctgggggatctggccggaggactgctggcattttcttgggagccactggactgttttgtgccagggaatggcctgtgctggcccacgtgttcacargggtcaagaggagagggcttggggcaggcaccgggttccccttaggagagggcgtcatgacacaggcaggggggcatgacttgacccatggcgtagcagtggcagtggccagaagtcaggtcctatatctcttccaaaagtggatcccaggtgatctgctgatgactgctgtgacagggatgagcagggtgagggtgaccccagagtggggactgagcagctggaggtcagtgctggggcatatccagaatgaggcgtaaacaggtgaggttggcggctgtttgtcatgtgctgcctaccccacttgccagctctgccctgctaggctcttgagggggcatggagtggccctgagacttcaggcctccaaatacaactgtgggcattgtcaggcagaggctgtgccacggagtgagtgacagaggggggatatatggaggctggttccagtctgggcgtcagcctcctccagtctcaagtcctgccacatccgcagatctaagcccgaatgtttctcatctgccctggcctccctgtccccacactgcccagtcgaccttcatttctgacctgtactgctgagcgtcttcccctgcagcgtgtgctgagcatcttcccctgcagtgcgtgccacactgtgctgagcgtctaaccctgcagcgcgtgccacactgtgctgagcatcttcccctgcagcctgtgccacactgtgctgagcgtcttcccctgcagcctgtgccacactgtgctgagcgtcttcccctgaagcgcatgccacactgtgctgagcgtctaaccctgcagcgcgtgccacactgtgctgagcatcttcccttgcagcctgtgccacactgtgctgagcgtcttcccctgcagcgtgtgccacactgctgagcgtgtaaccctgcagcgcgtgccacactgctgacgccacttcgtaaaatgcgcatgcgccagcccctcccctgagacactccatgaaattagattgggccactccagaggcctctctctgccatctgaataccgccccctccctcatcaagctcctggctgcttaggggcccctgccctgcccctctgccctggctgcccttgctgctgtcctgtgtcccctgccccccaggctgggacatgcgttcctccctcagcctcacagccccctcctttggggctaagcttcagggtcaccccaggagcattccttcaagtacatacacccctttttctttttcacagaaccccgccctttctcccaaattgattttacctcaatttatrgttcttcatttgtctttttattgcattattgtttagctcctgagctgtatctccccccaggtacttcacaccctgtgtatgtagcgcccagcaaagggtgctccagacacagcaactcccaggctgagcagagcatctctgctctttgtggggctcagaaagagagaacaggcatattgtgaaggcatgtgtgtgttggagctgataatgaatacctaagttgccattggcatgcatcattggtgtcatgcatgtcagctgcacacgtgcagtcgctgtaaatccccacaccctacctgcctgtgcattcagtgccattgtcacttgcagagaacaggaaataagcagtttaatgttttgaaggacctcttgaagagctgtccttttttaagaagtatagtggtccccgcttctccgtagatgtgtctcaagacccccagtagactcctgaaactgtagatagtactgaaccctgtacgtgctggtatttttcctgtaagtaccttcctatataaagtttaatttatgattagacacagtaagaaattaacagtcactaataataaaataagagtgacttgaacacaagcacagtgatgctgtggccatcaatcttatcaccaaggcgactgctaatgggccagcggcatctgcaacgtggatggttcacatcccgggctggacagcacaagatcgcaccacactcctcagaacggcatacagttgaaagtctggaagtgtttatttctggaatttttcatttaatrtcttcagatcacggttgacagtgagtaactgaaacctctgaaagtgaaacctcagataaggggacctgctataattaaatatgtaatttcctttctgatatttcccacagatttctcacaagaaacatatgtggctcattgattgtgggaaaacgtaatggtaaaaacaaacacagtgtaaaataacttttaagtagatttttgtctttgtgatcgtaagctgctaaatcagtctgttaactttttgttgyactccttygtcagttggttgggatcctgcggaattgccagtgcatccctgtaaccacgcaggcttgggctgggctgcgtcgacactgagtccgagctccctgaagactgtgctttcttctccctccagctggaacgtggtgggcatccagggatccctgctcagcattttcgtggagcccatttacttctcgagcatcatcctgggcagcctttaccacggggaccacctttccagggccatgtaccagcggatctccaacatagaggacctgccacctctctacaccctcaacaagcctttgctcagtggcaagtatctctagagtgtgctgatttaatctctgtcttgattttgcaatgttttcatcctcatgaatgaaaaaaacaccacctgagctgctctgtggctatcaaaagaacatcagagtccttctaaagagacccaaggtgatgtttctgaggctntccgggccttgtctctagggccttttaagtgagtctctctgtaagattaatctcctttaccaatcacaaacctagccattcatagaagaattgatgggttcacacctgtcatcccaacactttgggaggccaaggcytagtggattgcttgagcccagaagttcaagaccagcctgagaaaaatggcaaaaccccatctctacaaaaaatacaaaaaaatcagccagatgaggtggggcatgcctgtggtcccagctacttgggaggctgaggtgggaggatcacctgagcccaggaggtcaaggttgcagtragccaagattgtaccactgcactccagcctggacaacagagtgagaccctgtctttaaaagaaagaaagaaagaaagaaagaaatgaaaaatgaaaagaatgaaattatgactgggctgggcacctgtctgttttcctctcactcaggcactgtattcattcctgtctcagcagcagagactcaacagacactgaaaattatgtcagcattggctttcccagactaaccctgagccaggtctccgggacgtttacgctgtcttagagccaccagggtgtccacagcggtgagctgcctagagcctgccctgggctccctggagaggccctgttggctccgagagatggtgacaggtggaaccaggggtgccaatggcaggcagaggctgtctccctggtgtctgcacctaccctcgattcccttcattgctggttttcttttttctttttttagaatttcagtggctaacagtaaagtgaacaggagcttttgaattcaaaggtcctaacttctaagctcacctttatttaaaaggacacagttaaggtatttttatctttttaaacatataatttcactacttttttaaaagctcaaaactaaaaccataatcctaacctgaaacacgtttattttggggtgtgtgtgtgcttgtgtttgtgctgccttgttttctagtgcctggcaactagcacgcctttaatttgagaaaaagcagtgtggaattttatttgaaagcatgcctgtcagagcacatgaaggaggcagggatggggaaaaacagttgtctttaattaaattttacagttccgtaacttaaccattgtgttttaagaaaaacaaaatagataaaacttgatggtaggtaggttgaaattgtagcatcaatgtcttttgaagtattttgttgtgtattggtgtgtgaatttctcatgattcagaaaatttccctctttgctctctgtcttctgtacttgagcaaagagtgctttaattttagctgtcactcatcttttatatgcatagatacttaaaacattgcatgtggaatatgggacacataggtgatactcaaaaatagttgttaattagggccttgttgaatagcgctgtctaagcaatatctcatccgtaactaaaatctgcaaagacagaatcattttgctaaagaaattttctaagatattgaaagtagagctcatttataaaagtcagtgtatttttatcatatttcacttatgtgaaaagcatctatatctgttaaaagaccttgaaagatagtgtctgcaagatagagacttcaaagttactgatgctgctgtttatcctttcctcctcaatatcttctctggtctttttttttttttttttttttttttttttttgagacagagtcttgctctattgcccaggctggagtgcagtggcgtgatcttggctcactgcagcctccacttcccaggttcaagcaattgtcctgcctcagcctcccaagtagctgggattacaggcgtgtgccaccacagccagctaatttttgtatttttagtagagacggggtttcaccatgttgaccaggctggtcttgaattcctgacctcaggtgatctgtccacctcagcctctcaaagtgctaggattacaggcgtgagccaccgtgcctggcctccgttatctctaatcttgatagcctaaagcacattaccaaacccctcccctggtccccgctgcagggggctgtgccgagctgattcagcagcagcagagagagcctgggttggagccatgaggctgcccctgcgtcagctctgcctccttggaagcttctgtgtctcgggttcttcatacgcccagtggcagggatggaccaggcaccccttgcaatccttctggacaaatgtgccactgtcctatgaaaataaaaggacaccactcaagctccaggaggcagaaccttaactcaaatctgagccaataaacaatgtcactctagcaccaaagtctatttcaaaatgcaaactatttgaaatatcttatttttggtaaatgctttattttggaaatgggtttttgttgttgtttccctgaagagagttcagatcagcaaagcaagtagctttggagaagacacctttagacgaggactcctgtgaatcagcaggacagcgtagcaggacattaggtgagccacagggtggagcaggatgggagggcagaggcttctgcttcagaattgaagccgaaggcaagtaatgctgtgggtgttactggagacaaaaggaaccaaacaagaaaaatctggagaggcaaatgttgatgtcttaatagatttgggaggtcacactctttaaaaatgggtcccaaagcaaagctctcaaaacttcattaaaagaaaagtcttacatttgacaagtgacctggacagaggagctaccaggacattggcccccttgctgtgcacctgcactgtgcatcacagctcacgtcgtgtttgttacactttgtcacctcacattttattataaaggtcattcccgtgttaaaaagagagcgcggtatgacagcrcctagtgaattgtagtgtctttagggaggaacaaaaatggacataaatgaatacaaagaaaagattacctgaaactgggagcaaatcaaagtaaaaatgtagggatagggtgttgctttcttttaaaaagataatgctgtcaggattaaagtgagaagaatttaattttcatttcagcctgaacactagttttactttcagaaaggttcttggtgccaagctgtgacacttttgcctttgtgggtatacacacttggtacccttgcttagcactgtggaagaggaagtctctcgagctttctcagactttctctcaaatgagtttcacatccagcacttgcaagtttcaggacaattccagcttcttatttatgtccattgatctcctgagtgtgagctcctcagctggcccagtttgttgtccaacgctcactaagataaaccaagaagaaggagcagggtgcccaaatgccgcatgcgatggctctggggaccttgttgacagacagcctgctccggggtttgcagacaaggcttcctatcctgctggttttcatgttgaatgttggcacgaaacgttaacaaacaaggctacatgatggggtagggtccttgtgaagagcttgcatttaggtatctctgggaggacagcacagggacccaagggggctggcagcaggcccaggtgtgtggcaggaagaaggcaggtgcctgctgagctgctatccacccgagaccatttgacattatgggcaggaagagcaagggaagctggtttaatgaggccctggctggagtgagagagaaggaacatcactgtgagagtgtggaaagtgtgtgtgtgtatgtgtgcgtgtgtgtgtgtgtgagtgcatgtgagtgtgtgcatgagtgcgtgtgtgtatgagtgtgtgtgcatgtgtgtgtgcacgctcacatgagtgtatgagagagagagtgtgtgtgtgtgtgtatgcgtattctccaggtaagagcaggcaccggggttgtgggaaagaggtgtcagtaatgtgagtttcctccttgccctggtttctaggaggagtgaacgtgccatgagtcattgtagaagagaacgaccaccaagcttggctccaagtacagaatcattcttttcatctgacaatttttctttccattttactttctgttttcctcccctttgcttttgctggaccgattaaattgtctttcccctttcttccgactggtgggaagttctaaatcttatttctattctgaccagtggttaccccaattttttaaaacaaatatgtttaaatcactttgaaaaaatgttggcatcaagaattaatatttgtaaagatccaaacttgggaaaagctgaaatattgggctcatttttattccacactcttcccatcctcatcttcctagattctgatgacatcatcttgagttttagaaactcattttatcgtgctttttttttaaaagcctttcgtaatgagtcacatagcctcatgatcaacaattgtttagatgaagccgtaagagctcctggtttctcttctaaccagttttctgtagccagtgctcctgccctyaactccacatccagatttatttttcactttgctggaatatatccttaattggggtgacagggtgatttcttggttggttgtttttgtttggtttttggagaaaagtcctgtgtgggtggggccctggatcttgatgttacctggcccttgcctgtgtgccaggtggactggggactgtggatgtctgsgctctgccctaccccaaggacacgtcaagacctccatgccacccctccatggtcaccctttgtcacagagccagtttgagtttctttcctttctagaaggtacctccttgttttctctcctgtagygttacatttatctattttccctaaaattcaggaatttcaacagattaagcctaggtgtgtggttagtttgtttgagtttctttcctacttactaccctgaaccctctgatctggattgttgagtcttcacttctgagaagtttccttctgtcctgtcacttctgctagaagcatcttctctgccctctctgttgtccctgaaaatgctgctgagcagaactcacaggcctgtgaccagtgtctctcctctcatctgatgtgcttttttgactgtactgcattctaagagaatgcctgacttctgtcaccatctcaggagtgaactgttttccccgcggagcaggctccccgggagctcatgcctggcccacttccctgcaccacggccgccacacggctccgtctcttgctctagttctcctttctgggagagtgactccatttggggctcrtcatctctgttgggttttcagtggctgcatttggggttcctcatgyctgttgggttttcagttctccttttgcatactgagagaacaactttctagtgattggaactgtctagaaaagtttcctgaaaggaattgagctcccctgactggaagagttcaggttggaattggatggacactgttgttacggacacggtgataggggatctggctgaaaggattaacccacgtgatctccaggtgtcttctaaactcgagatcctacggagtgcagtttgcttgtttttaaattctctgtgcagatgactgtaatgctacagtacagttaccattacctattgtatcaatgacacttttgaaggtttttaaaaataataatagttacacttcactgactgccgtcctcaggccatctcccgggcatgcatgtgctcaagtcaggagccagattcttacatgcttccctgaatccacgccgcagccctgtgggccgggcctgccgtcacccttcacagtggaagcagccgcagccggcagacaccacgaggcttgcagctcacagccatattccactgtccctaggacaagtacagcttgaacccacatcccacctttcaccaccccaagccttgcctcccatggacgaagacagtgcacgagagtgccttggggctcccccaggagctgcttcaggaaaaggaggagctggcaggatcactgtgagcctctcagccccactcccccggctgctccccttcatctacatccagttagcatctcctgcccatgcagctctctggacatgagcccacctcactcaggaccacagctctgaggctccttccacagctggtgttctaaaaccctgaggtctcctttgagaaaggactgttatgtggccagaggtcctctgtgtaaagccctcagcacctggctggggttagtggacaaccaggacaaggcacttccgagctggcagagaaagcctgagagcagccctggggagtgggctggaagggtcaggagaacccagccatcttgctctgtacggattctaatggcttgtgtttatttctctgtcagctcaagggctgcccttaagacgatcacaatgaaaggctcaaaggtgctctgctctcagcttaaatggcaggttggttttggacccagaggggctcagaggctccctcctgtgttgcatggcctgtatcatcctcactgggggtgctgtgcacagttttccttatactgtaacttatgcccaggtcttgactctttcttatttgcagaataaaggccactttcagtcgagattgtaagtacacattttccttgatccactaatgaatgtctgatagtttctataacatgaacccrtaataaccctaaaatatccattaatcattrtgtatattattcatttttgattaccctactgtatgaggaacctattggaaaatacctttagggtagaaataagaaaaaacatcaatgccagctcttctgagttttttaattgtagcagttattaggccaattcacagtttctctgtgtttttgctttaaaagttctgattcagcacacttaatttacaacaacagagggattctcgttaccagccaagttgttcttgcttttattggtttctgtaccgyggcctgggattaactcattaccctagttccctctttgcaggctggaaagataagcatctcactcacgtcagcccccacactgcactggcctcagggactcgtagacgtatgcgcttatgaccatttaggggctttctgccccagaaaaagcgtatggttagtattggaagctcgggctattttcttttttccttgtttcctccatttttgtttcaagatgggacttgatttaacttaaaatataaaaaatattttgtactattgggatcttatatttttgttaatcatttagttttagtgaaaaatattgtaattctaaggtttaagtatcattcaacagtaatcctttattttgatgagaagtagtggaattgcaaaggaagataatataagcgttatccatttgtttatgaaagattcaattccattatggtcagagattccccagcagtttaaatggacaccctctcttctagccattcccccacaaaagaaatccttcctgattctgtctgcttgaagggtgtgaccttgaacatgctcctggggctgccgcctctacagagtgacagctcagggacctgcaggaactcagaacatgcaggcaggtgctggaggtagggcaggtgtgctggtaagatggatgacctcagttccactggcaaaactgtgccacaggagaaacctgagcgtgtggtaaaaaccaccccagcagcaatcagtaaatgcaggaacagtgacctcaggaagacatgaggctcctaccagtgcctgtgatgaggccagcccagccctgtgtgtggttagggcacacctgaccaccccgacaaccagggaaggacggtgttggagctctgagttcttggcatgaggacatgatcttggctgattgttttccttcagaccttctgcagaattgaatgcacatcaaagaaacaagcagaagaaaccatgccagctacttgtattgaataaaagtattttacttacaaacttggattatcaaacttatgaggaaaataacacaaaagagaaagatctatatgagaaaacagaacaactgaaagaaacaatttagaaaacaagagaaataagtaatgataaatcttattagtatgttatttagtaagtgctgaaatcaaatattaatttgaaggtctagaaaatattcagtattttttgagtgtgcagtgggcatggttctgggtgttgggattttgcagtgcacaggacaaacaaaacctcttcctcatggagcttttgctctgatgagggcagggggatggtgaagtcagataagtctcagataacttggaacagaaaggcagaattatgagacagtggccagggtgctgcccaaaacctacccaatcagaatctcagaggtaggattcaatgtgcttattgtttaaagcttcatatctgattctactgaacatatctgcttaagaactacaaaatatatattggctgtctctgggttttatagctttaattttctaaggtttgtgtgaatttttggaattgtccatagtgagcaaatgttatttttttaatgagaacaattttttttatttttaaattatctttagtgtcttttcacaactttattgaggtataattggcatatgataaactgcatatttaaagtatacaatttgatacattttggcctatgtttaggtctgtgcaaccatcaccacaataaagataatgagtatacttaatccacttcaaaattgtcttagtactccttcataatccctccctctccccgatccccattcccatccccagtatgtaccatctgtctatatagatgagtttgcattttctgggattttacataaatgtcatcataaggtttgcaccgttttggtctagcttatttcactcagtttaatcacttggagattgatctatgttgttgggtttatccatagttcattccttttcattgctaagtagcattgcactgggtggataaaccacaatttgtttttcccttgaaatattgatggatatttaggttgtctccagtcttttaatattataaagctgctgagaacatttctgtacaaatctttgggcgcttacttccatttctctttagtagatacctaggagtggaatggctgaatcctaagataggtgtatgttgaactttttagaaaactattaacctgttttccaaaatggttgtaccattttcacattaccaccactagtgtgcgggagttgtagttctgtcacttatatgccggcacgcagtacgagcggttgctttagaaattttagcaggtgtttagtgatattccattgtgcttttaatttgcattgctctgatgactaatgaagttgaatgccctttcacatgctgatttgccatccctgtgccttcttcaataaactgttcaaaacttatgcacatttttactgagttgttyaacatcttattactgggttttgagagttatttatattttctagatacagatcctttatcagatatatgatttgaaaaatgctttctcccaatcagtggcttgtcttttaattctcttcatagtgtcttacgcaaaccacataattttaattttgacaaaatctaatttatagaaattttctttgatggatcatgcttttgatattatgtctaagaaatatttgcctaagtcagtactacaaagatttcttcttatattcttggaaattttacagttgcagtttttacatttaagactatatttcacttgagttcatgtttgtgtagggtatgaaggatgaactgaagttcattttttggcatgtaagatatccagttgatttagcaccatttagtgaaaggttcctcatttcttcatggaattgccttgtgcccttgtcaaaaatcagctggcatgtatatatacatgtgggtctgtttctggactctgttgtttgcctttaatctctttgtctaaaggccagtattacattgtcatgattactatagttttattataagttttgaggtcaggtagagttagtcttccaactttgtactttttcaaagttgtcttggctgcttaggtcctttttgtatttccatagcaattttatagtccactcatcagttctacatccttattgcactggttaggacctccagtacaatgttgagtagaagtgatgacagcagacatccttctcttacatgtcatcttgggggaacacattcagtctttcaccattaggtatgatgttggctgtaggattttttattgytgttttttgttttagagacaaggtctcactctttcacccaggctggagtgcagtaacgtgatcatagctcattgtaacctgaaactcctgggcccaagtgatcctcctgtctcagcctcctgagtagctgggactacaggtgcatgccaccatgcctggttcatttttaaattttttatagagacaatgtcttcctatgttgcccagattggtcttgaactcctggcctcaagcaacccgcctgcctcagtctcccaaagtgctgagattataggaatgatccaccatatctggctgctgtaggttttttacagatgtctttatcagctcaagacattttttttttctatttatagcttactcagcgtttttaatcaagaatgtrtgctggattttgtctgatgctttttttctgctcttagatgactgttgtcattgcagtgacttaggcctatagtcccagctacttgggaactaaggcaggaggatcacttgagccctggagtttgaggccatcctgggcaatgtagtgagaccccatctgaaacaacaacaacaaaaaatgagatgagcatttagttcatttttcagtttgctagtggtgacgttaaaaaaaaattaaaccaactttgcatcttgggataaacgttatatggttattatgtgctattctttttatatattgttggattcagtttgctaaaatttcatttagaatttttgtatttatatttgtctgtagggatattgggctatcattttagtttaatgtctttgtcaggcataaaatgagttggggtgcatttctttctcttcagttttctggaagagtttgtttggatttggtattatttctttaaatatatggttaaattcaccagtgaaaccattgggcctgaagtttgctttgtaagaaaattctaactacaatttatttttctataatagatttagggctattcatgttatctgtttttatcttttttcttgagtaagcttcagtaatttgtctttcagggaatttgtccatttcatctaatttgtctaatatattggcataaaagcattcagaatattcattttaatatctgtgatatctctaatgatatcgtcttatcccttatattgatgatttgtatcttctcttggttgtttttttctgatcagtctagctggaagtttttcaattctgttygtctctaagtgccaacttttaggttcagtgatttttgtcttttgttttatatttcaataatttttactctgattttaattatttctttttttyccgcttacctggtgtttcaattgcccatctttttgtagttttttaaggtgctagttgaggtcattgttttaagaccctttttactgcttttgtagcatttaaaaattatgatatgttttcattttcacttatattaaaatactttgtcccttgggttatttagaagtctgctatttagtttcaaaatactagggattttacagagatctttctgttgttggttttttagtttcatttaatgacttcagtccttttaaatttattagacttggttttatggaccagaatatgatctatctttataagtgttccacaaaacttgaaagaatgtgaatctgccactttggggtagagtgatctgtaaatgttgattaggccaagttgtttgattatactatttattttcttttatattcttaccgatcttctacttggtctatcagttattgagaggcaggattgaaaatctcttagttataattgtacattatctatttcttccccttttttagagtttttacttcctgtattttgtagctctgtgattagatgcataaaaatgtaggattgttggtttatcttaataaacygacctcctttaccattatatgatgaccctctttatttctggtaatagtgtttgttctgaaatttgttttgagattaatataacctcctcaactttcttttgattagtgttagcacagtgtatcttctatccctttatattaaagtactttatcttaaaaatatgtttcttatagacatatatttatatatatttatatgtttggatcttgcttctctctcccaccatggacaatctctgccttttcactgaggtacttagaccatttacatttattgtgattattgatattattaggtttaaatttcatcttgctacttattttctacgtgtttcatatgttctttgttcactttttcctcattttcttactgcttttgccttaattgggtgtgtttgatgattccattttgactccttcttgacttttgagctgtaacttttgttaatttggtggtggtttttagggtttatagtatgcattcttaccacgatctcccttcaagtgatattatactacttcacatatagtaaaagaaccttacaacaggatactttcgtttttccatycccaacctttgtggtattgttttcagacacttttgcatgtgttaaaaaaatccacatcttattattttcatcttaataattatcttttaaaggaatttaaataataagaaaaaaacctcttgtatatttatccatgtagctatcatttccagggctcttcattctttgtatagatctggatttccattttggtatcattttttcttctggctggaggacttccttttacattccttgtagcacaagtcttctgatgatgaattatttcagctttggtatgtctgggaaagtattttgctttcattttgaagtatattttgctgtacaaatatatttctgctggaatggcagggtcctttttctcctttaagcactttaaagacattgcttccctgacttgttgtttgcgttgtttccagtaagaaatgtgttgttatctttattcctctgtgtgttttttgctctgggtttgcttaagattttctcttaatactagtgttgaacaatttgttctgttgtgctttggtatatagttttattcatgtttcttgtgcttgggattcattgaaattctttaatccatgggtttgttggtttcatgaaatttggaaattttttattcatctttcttcagatatattttccgttcccccttctctctcctcaccgtcatgaaatctaattacacatatttcaccctacctaaacctgccccatatcactgattttctgttctttttttctctctttgtgtttcatttttggtagtttctgttactgtgtctttaagttcactaatcttttcttctgcggtttctattctgtggttagtcccatcaagtgtattttttatctaatacattgtagttttcctctctagaaatttggcttaggcctttttatatctttatgtctgtatcttctatatgtgaatgtcaggcacttttccattctctcaggaggctgtttcccagccttgattgagtaacatgcctactctgatcagtgctccgcaggatattcaaggacaccctctgcgtatctccagggctcactctgtctgcatgtctcttccttccggtactctgtcttatgaaatctggctgacttggtttcccttgactctcaattcaggggatctgctacactctgcctgggttccttactctgaacagtgaactgtcatctgggttttgatatctctccaagggagggataaatggtcattgaaagcaagtgagcatggtgacggggtgggggtggcctccacagggcacgaagtgagttgtactgagtcatctgagagtgcagtgtgctgcttctggccagtgggcttgacagttcagtgtctgggttcagaatatgagtctgcccatgtctaagcatgttctaaagattcatatcccaaattagttttgattttggtggcctataacatccatgtgatatgaattatcaagctcaatatataaatgcagatacatgtattcaattccgagttatgcaagtgtctttttaaaaactttcaaccctgcagaattagcctgtgattagttaagatgagatcgtttaaacacagcaagaaaataagtacaagggtacttcaaaaagttcataaagttaaaagataaaaaaatgtttaaagatataaacattatttctcaacataagctccatcaaattcaagacatttttgtaagtgctgatcctagccatttagattgtccctaaagaactgaatggtggctaggtgtggtggctcatgcctgtaatcccaacactttgggaggccgaggcgggaagatcatgaagtcaggagattgagaccatcctggccaacatggtgaaaccccatctctactaaaaatacaaaaaccagctgggcatggtggcacgcgcctgtagtcccaggtacttgggaggcagaggcaggagaatcgcttgaacccaggaggtggaggttgcagcaagccaagatcgcaccacacactccagcctggcaacaagagtgagactccgtctcgaaaaaaagaactgaatgtcttgggagtttaaccatgtcagtgcagtctttcttacattagtaactgaagaaaaattccttaagcatgccccttaaggaatttttgagattaggaaacaaaaagaagtcagaaggagccaaatgaggtggatttgcaaccaccataaggtggatggctcatgatttcctctcgaaaccctcacacacttgcccttgtttgatgagaggaataaataggcgctttgtcatggtgaaggtctctggcgaagcttccccagggggtttctgctaaagctttggctcactttcttgaaacactgtcatcataagcagatattaccatcctttggccctccacgtgaacccaacaagcaaaacgccttgagcatcccaaaaatgctgccatggcctgtgctttggccagtcagcctgtgctttgactgggccccttctgcctcttggtagcctttttttttttttttttggattatgcattttcttcaggattgtctttgtaaaagctatttttatctcctgtttgatgtttgttcttgcttcaattttagcagaagtcatgtagctctgataggagcgcttttcaaacagatgtcttaatcttcttagtgcctcaaactagatcctattcagacatgtttcagcaagttagtacaagtttattttggtgccaaaaaattttgaaatccatgaggttttttcataataagcattttccatgaactttttcaagactcttgttaagaattagggtttcctattgcatcatggatgtcacacatgcaaagccacgtgacctgaacatgcctggcctctcagtggcaggggagcacatgcaggcatgagcgccagaggtggtgtgatacaggagcaacccccacctgcacgacctcatgggaccctgcattagtctcagaagtggctcccacccatccactctcaggctgccaaggttcctggctccgtcagtgccagagtgagaaaagacacacttgtcaggaagtctcatgatttcaggtttctgtcaatcttctgcccacctgccctgtcagacaagtgcatacccgtgggtcagttctgctttctcagcactgctcctattctggtggccgtggaagagtgtgaggccactgccacggcagatgcacgctcaagtctgcgtatattcctcggcaggcagaattcccccaccacgcacttctgtggccatgtctgagcacagygtgccgcccgtggctgctccctccytgggggtgaaagcgggcttcacaccaccttcctgtgtcttccgtttcaggcatcagcaatgcagaagcacggcagccagggaaggcccccaacttcagtgtcaactggacggtaggcgactccgctattgaggtcatcaacgccacgactgggaaggatgagctgggccgcgcgtcccgcctgtgtaagcacgcgttgtactgtcgctggatgcgtgtgcacggcaaggtactgaggcgccctcaccgcaatgcgccggctccacctccccaatagcttgtctgtcctcacacctactgttccttaagttgtttcrtcatgtcatcatgcacagcttccgaaaacgatcacttggaatgattcttccttcagattgttttagcttagaagtgtggctacgtccctgaaaccttaatgccatctcaaaggcagctcttttcctccctgctgcagggtaacacccactgccaggccactgtgtgtggtggaaacgtctcttactctcagatattgaaagtcattatgcaaaacgcagggccagtcaccctgctgtcccctccttctcagcaacataaaaattgcttggattgtgataaccctccagtggagtttttaaaccttttgaattagctgtggggcccttttttccccagaataaaactttatatagtaagtcagggtattactagtttgtgtgtattcttcagtcaagtagatggcatctgtttattctgagaccagcattgtgcactggcatgggaggtatagccagaagggacagtgcccgggagggtcctgttcaccaggggcagcacccaggccagctgccacaagtccaaggtccacacagaaggagttactggccgcatgagggaaggcctccgaggtcatcagggtgatgacacacataacatccgtggtgcttcttagagttaaaaatgaaacgtgaatccactattggtggtttcccagaagcatgtcttcagaactcgggggtctgtagctgcctgtttgaccagcaagactggaacttggcaataactcagcccttaggagacgccgcaccttgttctgtgtgaagccgttcccttggcagaaggcgccttcctctgggttgctttccccccagaagccaatgcagttctgaaggccatgttttggtatcttattaggtgttgttttcatctgttacagcgtcaacagttgcatttgtttttttatcccttcacaggttccctcccacttactacgctccaagattaccaarcccaacgtgtaccatgagtccaagctggcggcaaaggagtaccaggccgccaaggcgcgtctgttcacagccttcatcaaggcggggctgggggcctgggtggagaagcccaccgagcaggaccagttytcactcacgccctgacccgggcagacatgatggggggtgcagggggctgtgggcatccagcgtcatcctccagaacctcacatctgaactgggggcaggtgcataccttggggagggagtagggggacacgggggaccaccaggtgtccacggttgtccccagcatctcacatcagacctggggcaggtgcgcagtgtggggaggggatggggtgcgtcagggcccagcatcgccgcctggcatctctctgccgcagcatttccccttctgaaccgtccagtgactgctttcaatctcggttyacgtttagaaattgagttctactgagtagggcttccttaagtttaggaaaatagaaattactttgtgtgaaattcttgaataaataatttattcagagctaggaatgtggtttataaaataggaagtaattgtgtcaggtcacttttatgccacattattttaattgcaaaaaagcatctatatatggaggagggtgggaaaatagaggtaggaaatagtagcctaaaggaaatcgccacacgtctgtctaaacttaggtctcttttctccgtaggtacctccctgggtagttccacacactaggttgtaacagtctctccctgaggagcagactcccagcatggtgtagcgtggccctgtcaygcacatggggtcccgcagcagtgactgtgtgtcctgcagaggcgtgacccaggcccctgtagccctcagcctcctctagaagcttctgtactccttgtaggatcagatcatggaaaacttttctcagtttacttctaagtaatcacagataatacatggccagtaatcccaggctggccattcattcaggttttttaaaggatatttaacttttatggactagaaggaatcacgagggctactgcacaatacatggcctaagttccctctgttccttcctctgaatcgaatggatgtgggtgaccgcccgaaggccttcacaggatggaagtagaatgatttcagtagatactcattcttggaaaatgccatagttttaaattattgtttccagctttatcaaagacatgtttgaaaaataaaaagcatccaagtgagagctggtgagaccacgtgctgctggcgtagtgtaggccagacattgacagtcctgacgggagctcagggctgcccagcgcccagcgtgcacgggacggccccacgacagagggagtcagcccgggaggtcaggagcgcggcgggcgagggccctgtgtggaccacctccaccaagctcagagatttgcaccaggtgccttgttgcctccgctcaggatgaaagaggagctgagagaagtgctctgcctgccagtgcagtgcccagctccaaggctctagagggtgttcaggtgggtctcctggggccatggggagagattggtgcagaccttaccccacagcatacacctgccacagcgaaatccagggtgttggcacctgtgtgtccgtgatgagcctaggaaaccagagcaggggcagaggggcgtcatcctcccaccggacgctgggagctcagaccccaaaactgaaacaccgtggcttcggcggggggtgtgcctcctgatgtcaggagccccatccacgtgtgtccacacagatctcgtcgcagcacggcaggaaggggtgctgcttagggctcattgttggggacatgaccgggttcagcggctagaacatctgccccacagcagcctcctcctccaccgaagagggtagttgtctccctgaagcagtcacagcaggcgtctctgccgctccgtcaccacagtggggttttgttcargcagatcgcgctggggttctgcacctgcagaaggagaggggtctgttgtcgctggctttcccccaagcaggctcttgcacactctagaaaaaacaccttgtaagtctgtgcatttttattgtcttgataaattgtatttttttctaatggggattgggagatggacttcgtttttaaaaatatgtggattttggttaccaagtttagtgttaatatattccatatacatacaaaactacccggtatgtctggcttttcccttctgtcaggtaatagctaaagtcagcatgattgctccctgtaccaccccaaataagtgagtgcctcaccttgtggggcctgagcagctaccttgagaccatgtgaggtggcacctttccggggtggactcgtgcggccttgaggacaggcacagggcaccctattcccaagccgtccaggcaggaggaaggcagccaaggcaactgnnnnnnnnnnnnnnnnnnnnnnnnnnnnnnnnnnnnnnnnnnnnnnnnnnnnnnnnnnnnnnnnnnnnnnnnnnnnnnnnnnnnnnnnnnnnnnnnnnnnnnnnnnnnnnnnnnnnnnnnnnnnnnnnnnnnnnnnnnnnnnnnnnnnnnnnnnnnnnnnnnnnnnnnnnnnnnnnnnnnnnnnnnnnnnnnnnnnnnnnnnnnnnnnnnnnnnnnnnnnnnnnnnnnnnnnnnnnnnnnnnnnnnnnnnnnnnnnnnnnnnnnnnnnnnnnnnnnnnnnnnnnnnnnnnnnnnnnnnnnnnnnnnnnnnnnnnnnnnnnnnnnnnnnnnnnnnnnnnnnnnnnnnnnnnnnnnnnnnnnnnnnnnnnnnnnnnnnnnnnnnnnnnnnnnnnnnnnnnnnnnnnnnnnnnnnnnnnnnnnnnnnnnnnnnnnnnnnnnnnnnnnnnnnnnnnnnnnnnnnnnnnnnnnnnnnnnnnnnnnnnnnnnnnnnnnnnnnnnnnnnnnnnnnnnnnnnnnnnnnnnnnnnnnnnnnnnnnnnnnnnnnnnnnnnnnnnnnnnnnnnnnnnnnnnnnnnnnnnnnnnnnnnnnnnnnnnnnnnnnnnnnnnnnnnnnnnnnnnnnnnnnnnnnnnnnnnnnnnnnnnnnnnnnnnnnnnnnnnnnnnnnnnnnnnnnnnnnnnnnnnnnnnnnnnnnnnnnnnnnnnnnnnnnnnnnnnnnnnnnnnnnnnnnnnnnnnnnnnnnnnnnnnnnnnnnnnnnnnnnnnnnnnnnnnnnnnnnnnnnnnnnnnnnnnnnnnnnnnnnnnnnnnnnnnnnnnnnnnnnnnnnnnnnnnnnnnnnnnnnnnnnnnnnnnnnnnnnnnnnnnnnnnnnnnnnnnnnnnnnnnnnnnnnnnnnnnnnnnnnnnnnnnnnnnnnnnnnnnnnnnnnnnnnnnnnnnnnnnnnnnnnnnnnnnnnnnnnnnnnnnnnnnnnnnnnnnnnnnnnnnnnnnnnnnnnnnnnnnnnnnnnnnnnnnnnnnnnnnnnnnnnnnnnnnnnnnnnnnnnnnnnnnnnnnnnnnnnnnnnnnnnnnnnnnnnnnnnnnnnnnnnnnnnnnnnnnnnnnnnnnnnnnnnnnnnnnnnnnnnnnnnnnnnnnnnnnnnnnnnnnnnnnnnnnnnnnnnnnnnnnnnnnnnnnnnnnnnnnnnnnnnnnnnnnnnnnnnnnnnnnnnnnnnnnnnnnnnnnnnnnnnnnnnnnnnnnnnnnnnnnnnnnnnnnnnnnnnnnnnnnnnnnnnnnnnnnnnnnnnnnnnnnnnnnnnnnnnnnnnnnnnnnnnnnnnnnnnnnnnnnnnnnnnnnnnnnnnnnnnnnnnnnnnnnnnnnnnnnnnnnnnnnnnnnnnnnnnnnnnnnnnnnnnnnnnnnnnnnnnnnnnnnnnnnnnnnnnnnnnnnnnnnnnnnnnnnnnnnnnnnnnnnnnnnnnnnnnnnnnnnnnnnnnnnnnnnnnnnnnnnnnnnnnnnnnnnnnnnnnnnnnnnnnnnnnnnnnnnnnnnnnnnnnnnnnnnnnnnnnnnnnnnnnnnnnnnnnnnnnnnnnnnnnnnnnnnnnnnnnnnnnnnnnnnnnnnnnnngagttgggttcagggagccctgggcggggtggctgtcagggggaactgggttccgggagccctgggccggggcagggggcggctgtaggaaggaactggtttcggggagccctgggcggggcggctgtggggaggaaggtgacgtgcaggggaccagaggctctgcactgctcctaggacagctcatctgtaatcagaaaaaaaataaacaaaatacagaacgctgactcctccgtgagacagatcggggaccttagcactttaatccctcccttctgagcgctcggtgtgcacttttagactatagctgtttcattgacgtgtcactctccatccagtgtccttgatgtggcttttagagacttagcagaaaattcgacacaagcaggaacttgattttttaagaaaaaatattacattttgaggacattttgacaagtaggggaagagagggcttctgktgttttgttttgttttgttaactaaacctgaagtattaattccacaaagacactgtccctcaggaccactcaggtacagctctgccagggacagagtcctgctagtgggaggtctcaggtggggckgtgtgttctgtgccatgaggcagcgacaggtccagatggatgtcgtcaccaccttcctcagctctcatcacctggtcgtacgccaggcccacctcttcccagcaagggacgccaaagaactgcagtttttattctgagtcttaatttaacttttcatcatcttttcctattttgragaattttttgtaattaaaagcaattattttaaaatgtgcaagccagtatctcacaaggcatggatttctgtggaatttatttttattcaaataaccatatttatctccaggctgtggaatcgccactttctttgtgaagacagtgtctctccttgtaatctcacacaggtacactgaggaggggacggctccgtcttcacattgtgcacagatctgaggatgggattagcgaagctgtggagactgcacatccggacctgcccatgtctcaaaacaaacacatgtacagtggctctttttccttctcaaacactttaccccagaagcaggtggtctgccccaggcataaagaaggaaaattggccatctttcccacctctaaattctgtaaaattatagacttgctcaaaagattccttttkatcatccccacgctgtgtaagtggaaagggcatkgtgttccgtgtgtgtccagtttacagcgtctctgccccctagcgtgttttgtgacaatctccctgggtgaggagtgggtgcacccagccccgaggccagtggttgctcggggccttccgtgtgagttctagtgttcacttgatgccggggaatagaattagagaaaactctgacctgccgggttccagggactggtggaggtggatggcaggtccgactcgaccatgacttagttgtaagggtgtgtcggcttttycagtctcatgtgaaaatcctcctgtctctggcagcactgtctgcactttcttgtttactgtttgaagggacgagtaccaagccacaagaacacttcttttggccacagcataagctgatggtatgtaaggaaccgatgggccattaaacatgaactgaacggttaaaagcacagtctatggaacgctaatggagtcagcccctaaagctgtttgctttttcaggctttggattacatgcttttaatttgattttagaayctggacactttctatgaatgtaattcggctgagaaacatgttgctgagatgcaatcctcagtgttctctgtatgtaaatctgtgtatacaccacacgttacaactgcatgagcttcctctcgcacaagaccagctggaactgagcatgagacgctgtcaaatacagacaaaggatttgagatgttctcaataaaaagaaaatgtttcactactctggtgttgctgagactttcttttcctttcaaattatttctgcccttggctccactagcaggcctggggatggacacccacatgcataacctgaaaaggtggctgagtcccgcccaagagctgcagctctgcctccacgtggtcttgtcacctgctgtgcttgcaccagtgctactggaatttccccaccttgggacagtctcccctcagtccccacccctgttagattcttgacttcactgtcttcctggagagcgtgttggcgcctctcctatatataaggtggtgtagaggaaaagtaggcagctgccccactcccatcctgcatataaaatggatgttgacacatgcccgtgtgactcgttaccctcacgttacttgtggctagaacacaggaagaacctacacactcaataagaggcaagggtgacacgggtgctggggtgcagtgaaaaaaaccaggtgctaagtgccaccatagaactatgttatttctaattacaacactggaaggacagtcacaataagtggaaagttggcagcaaagcggcatttccgtgtcgtggctgtaacagtgtatatatgcttcacgtactgtacaagcacaggtgggccaggctgtctaagaagggagtctggccgtggtctgtggacatgggatttgagatggttttgattttgtgttcttatgtgaaaagcatatccgtttgtctgatgtttctacaattaaatgaaaaacaaatataggaaaatattttgaaaagtcaaaagcatcatacaagtaataaaaaaagcactattacagacaggtaacttgattttctcatttgcatcaattttgaaactatttcatttcccacaataaaaacgttaaaatatgttgcagcaaaaacaagcttcagagaaaagaatgaagggaaccctctccctgatgagtgaatcctttgaacagtgattcttcgggagctgcctcgggggccacaccagatggaatactcggactcactattctgtcatggaactggggaaatgtccgaatttgaccacgtaagatgaaagttttgctttttacgagatactgtatagtgaatctcgtagagcctggctgtaaatgttgaggttctcgagcttttattcagtacatgcgtaatgaaggccgacccggaaggcactatttcaggtgcttggaacaggtcggtgaacacaacacagactcccccccaaatagctgctgctctgcaggaaagcaaataacacaccagacgccagtgtcagggaatggtgcctgggaagaaagaaaaagcaggtgaggatagtgcagtggggcgggctgcaatggtaagtactgggatcagagtagcctcacagagaaggcttgcaaggcagatggtcagccagagggggcctggcgagcccggggcactggaccaggcatcagcgtgccactgctggaggctgcagtgccaggaacctggcccaccagtaggtgaacgcagctgttatttaacgtcacatttgataaactcagaatgatattaaaaacaaaggtaaacactcgaaactcgtcacttcctactttttgctgcattttactgcaatctgtgttcttactgtgtgcatactctgcaatggtgggcacgcccctcctaggctgcgtttgggaactcacatcagtagcttggaatcagttgtggtgggaggtttcacaccactggtacccacagacacggtgactcaaggcttgactcactgttgtgattgtctctagacctagcaagggatggaggaagatgcagatcaaactgcaaatgtagctgttacattgtgaatggcacagaaaattgaagaaactgtctcacagcctctggaaactgttatctacttaagcaaagaagtcactcagtcactgaacaagtgaagctctggcattcgtcctgctgcttcgccttcatctgactcatcggtgaaaacatccccagcattcttgtcagaaccacactcattcatcagctgcaaccctgtgttggcttcagatgtagggctcagcaagactcaatgaaagcattccataaaaactggctctgtgggatttacaacagtactgtctattttattcatgtttttaagttgcatgctgctccttttatatctgtaacatgtacagtacgcttatgtacacatatgtgtgcccacactggagcagggtagcctgtttagcatttactagcacaccactgggtcccagatgtccttgggaacagatcaaggcagtgcaaaggccctgtgctggtgaggggctgaaagttggtgggaactaatcagcctctggcaggtgcctcccccatcccaccctccaggactggtgagattggtctgtgtggtacagctgcaggagaaaaaagtgtgaggccagacctgagggatgaggagtgagtgtgggtttctgctggcccacctcccgctatgccctcaggcactgaggtcccaccttctgccttctggccaagcagccaatgcctccaggggaaaatgacctcataaggagaaatgagaaatctgcagagcacaactatctaaagctcaaaatggtaatactgaatagagatcctattagaatagattctagcgttttagaacacagtccaggaagagatcagaaaacagaaccaagcagaatttgaaaaagtgaacacaacagatgaactacatagtggaatgaacttaccattggaagaccacatggaaaaggagagggtaacaaaaaagaaaatatagaaatactaaaatatttggctgatagaagtgctaacatctggctaatataatgttcatggactttgccacacccacagactgaaggcatcacagatgaaaggatgtgtctgagacgggcttaaaacagcaacagcagttagttcccaccaactttcagcccctcaccagcacagggcctttgcactgccttgatctgttcccaaggacatctgggacccagtggtgtgctagggcatggtggctcacgcctgtaatcccagcactttgggaggctgaggtgggcagatcatgaggtcaggcatttgaaaccagcctggccagtatggtgaaactctgtctctactaaaaatacaaaaattagccgggcgtggtggcatgcacctgtagtcccagctactcgggaggctgaggcaaaagaatcgcttgaacccagaaggcagaggttgcagtgagccaagaccacaccactgtagtccagcctgggcgactgagcgagcctccatctcaaaaaacacacacacacacacacacacaaaaatactgggacagctgagcgtggtggctcatgtctgtaatcccagcactttgggaggccaaggcgggtggatcacaaggtcaggagattgagaccatcctggctaacacggtgaaaccctgtctctactaaaaatacaaaaaattagccgggcgtggtggcgggcgcctgtagtcccagctactcgggaggctgaggcaggagaatggcgtgaaccccggaggcagagcctgcagtgagccgagatcgcgccactgcactccagcctgggtgacagagcaagactcagtctcaaaaaaataaaataaaaaataaaacagggacaggcagctccactaatggagaagacaagaagattcggatgaaacgataccggccaagtgttggtaattgtatgtttgcaaatgttcataagaagatttaaaaagtgctagcatagactttttaaaatgccatttatttggtactctaaggactcgtgggattttttttcacacaaaagcaacaacttttagtgctgtaaaatgtaaattgtccaaattaaagaaaataagaaaaatatcaggaagcttttaaaattgcaatcatttacttccttagagagtcattttaaatgtatttttgtggaaacaagtactttatacatcagctgaatcttatgttgttctccctggtcgattttctttcctagcactgattaatgacatttgcatttgtttatctgtcccactatgaaatgcagacatcagggggtgagaggcattggtttgttcatggctattcacttggcacaagcctgctatgttgcagatattaaataaatatattctgtattaattttaaaagttcccagacataccatgcgtcagagctttgccacctgggaagcaggtttgcatgagatgcttaaattgagaaacaaaatttaggaaatcttacaagaggtttacagtgtaaaaatcagtactttgctaagtttgtggtggtttttttttttttttttcttttgagacggagtcttgctatcgcccaggctggagtgcagtggcgcgatctcggctcactgcaacctccgcctcccgggttcacgccattctcctgcctcagcctccctagtagctgggactacaggcgcccgccaccaggcccggctaattttttgtatttttagtagagacggggtttcaccgtgttagccaggatggtctcgatctcctgacctcgtgatccgcccgcctcagcctcccaaagtgctgggattacaggcgtgagccaccgcgccctgcctgcggtggttcttaaaaagctaaagtcaggccagacacggtggctcacgcctgtcatcccagcactttgggaggccgaggtgggtggattgcctgagctcaggagtttgagaccagcctggccaacatggcgaaaccctgtctctactaaaaatacaaaacattagccgggcatggtggcatgcacctgtaatcccagctactcgggaggttgaggcacgagaatcgcttgaacctgggaggcggaggttgcactgtgagccgagattgcgccactgcactccagcctgggggacagagtgagactccgtctcaaaaaaaaaaaaaaaaaaaaaaaaagtgaaagaaaacaacacacatctttaataacccagaatttagtctgggtaatatcaacgtgataaggccagggcgacatggagacccaagtatatgagagtacgtctcagtctctgtcccactggggcacagatgggaatctccattatttttctaatgaacaaaggtcaaagattttatgttaatcattataaaatctgttaataagggaagtggtaagatgttaaaattgactccgttgacaaattgactaactctaatagattaaatgaattagggcttttatctgcttgtcccaggcagaaaacagtagggccaaaacagaagtcaataaccggtggataattttgtctgacctcatgaatattgaatgcttcatgaatactgaatgcctcatgaatattgaatgtcttatgaatactgaatgccttatgaatactgaatacctctctgatgctcccattttctctccacagtctactggctcatgtgtctcacaggctactggcctgtctgctcatttctcttattttctatggatgagttgaatactcttagatactcataaacaatactgcagacacaccttacactttgtcagctacgggatttgttagttttccacattatgttgattctttccttctaggacttagagtgaagacacattggacctttcatgctatctaccacttgggtcagttatgaagctttatctctcagttccaaattcaatatttacgttccgctttataatattgaggctgggaccctgcaaatatgatgttcccattctctgctggctttatattctgccaaaggtagtacaagagggaccatggcagacaggatgagggagaaggtgatttcctgccatttgcttgctgttgctgctcagccgcagtgcttctgcaactgcaaagctgctattggttctcatcagcaggttgctttggagtctcactgcccgccttcacaggtgccagtagcaggacagcagcactccacctcagaggctgaggtccagctctgcacagcccctcctgaacttctgtaatacg

SEQ ID NO: 95952 - DNA, 35895 bp, Homo sapiens
  misc_feature (1)...(35895): n = A,T,C or G
ccaaggtcttttctttctagcacgtcatatgtgacagaaccttctcaaccaaacagtcccgagaccgcccagatggctgtcttcccatgcccgtgctccgggggcagcaggacaggcctggaaactgagtctgcaggtctgtggagctttcaggagagagccgggcctgggcccagcaacccagcaagtgaggtcaccacccagcctcggccatcttgccaggggttccagctgacttgttagatggcatggtgtggctctcagcaaggaagccagcccctcacccccctgggactccccctcaacagggcacctccctctcagcagcattccaggagcagctggcctgttcacacagcggggcatccttggagcctacattccaccccacgcagccaaactcgatttggaaaacgcctacctccaactattcaggcacctcctcaaatcccaggtctttttttaaaaataagttgaatcagccaggggcacggtggctcacgcctgtaatcccagcactttgggaggctgaggtgggcagatcacctgaggtcaggagtttgtcaccagcctggccaacatggcaaaacgctgtctctacgaaaaacacaacaattagccaggtgtggtgggtgcctgtaatcccagggaggctgaggcaggagaatcgcttgaacctgggggatgaaggttgcagtgagccgagattgcaccactgcactccagcctgggtgacagagcgagattccgtctcaaaaaataaataaataaaaataagttgaatcagccgggtgcgatggctcacacctataatcctagcactttgggaggccgaggtgggtggatcacctgaggtcaggagttcaagaccagcctggctaacacggtgaaaccccgtctctactaaaaatacaaaaaattagccgggcgtggtggcaggcgcctgtagtcccagctactcaggaggctgaggcaggagaatggcgtgaacccgggaggcggagcttgcagtgagctgagatcacgcccctgcactccagcctgagtaacagagcaagactccatctccaaaaaaaaaaagaccagcctggccaacatggtgaaaccccatctctactaaaaatacaaaaattagccaggcacggtggaacgcacctgtaatcccagctacttaggaggctgaggcaggagaatagcttgaacccgggagacggaggttgcagtgagccaagattgcaccactgcactccagcctgggcgacagagtgagactccgtctcaaaaaaaaaaaaaaaaagttgaatcataggaaattgccatttttttgtgggtcaaaaggtcacatttcagcaatttcacgtggttcaaactggggctgattggcgtcgtgggaggaccacaaagtcccatgggtaagagtgggcccaggagtcccgccgcctggtctcacccagctctgctccctgttcctgcacactcgtctttctcttctgtaaagggatggtcaggtcgtgcccctccttcagtgttaggaagatcctgtcaggtaacacaggtgaagctcccagagcagggcctggcacatccgcaatcagtgcatggcagtcagttgttgccgttgtcggtagcaatagcattagtaactgtagccgggtgtggtggctcacacctgtgctcccagctacttgggaggctgaggcaggagaatcacttgagcccaggaggtcaagcctgcagggcgccatgaatgcaccactgcactccagcctgggagacagagcgagaccctgtctctagaaaaatgaaagatacaggctgggtgcggtggctcacgcctataatcccagcactttgggaggctgaggcgggtggatcacctgaggttgggaattcgagacaagcctgaccaacatggagaaaccctgtctccattaaaaaatacaaaattagctgggcgtggtggcgcatgcttgtaatcccaactactcgggaggctgaagcaggagaatcgcttgaacccgggaggcggaggttgcagtgagccaatatcacaccacagcactctggcctgggtgatagggtgagactccatctcaaaaaaaaaaaaaaaagaaagaaaaagaaaaagaaaagatacagtattagtaactgaaggtgggatgtgggggtgtgggggtggggcagacacgcagaacggggagcaggaactctgcttgcccaaatgcagagtggagagatggcgtgaaagtgagtgagtgcacacgttactctcggaaaatgacacagcgttgctggaagacgtgcagccaacctgagacacggaccgcctgcattcctgggccagcagactcgcccctcaagtcaaaaggaataaatgtaaccaaagaagtgtgagacttacataccccaaatcccaaaacaccactgaaagaaattaaagatccaagctcctcctggacgcctgggctcaggaaccctcccctcagaacgatcttggccaccgacctacacaaatcctcccctcctctcatacccaaagggcattgttgctatagtgccagcccttcagcccctcggatgctccagctccttattctagaactctccatcggcagttctttctctccagtgacgctgcctgtccatggacccaccagcttttcactgtccctgccgcctgctgcccatccttcccgccccacccagcgcagatccctgcaaacaaacgcagctcagcctcccgtctgtgccgtctcccaccaacacactcagacaaaacttcactctcacacgtaacccagcctgcaaacagccccagtcccggtggctcccagcaaagggcattttgttcttcccctgccgggctctgcagggctgggccccgggctgcaggttgaggtcagggccgctgtccctgaggtctcagctgcaaacaggcacactcccttctgctgtgtgtcccaaggggtgaagcaaaccacggctcagcccaaatccaaagggtgggtaagtttccgccactgccgtgacttgggcagggagagagaatctcgtaaacacacacgaccatctccagcgctcttcccctgccctgccacgcgggccactcaccgcagccagagaaaagcacagccgtgctgccaggggcctgggaaacttgtgaatggaaattcgcaggagccctcagtgctgcccacctctcctccttcccttcctcttcctcctccttcccttcctcttcctcctccttcccttcctcttcctcctcctcctcctccaatctcctccagttctgagggcccagccttccggccaccaggggatggtgcaggcccaggcctctcccctctgctcgccccccagtggggtagcggtttatcctctgtccactcatgacatgtgcactttctgcatacgtgttatactctgaacaaaagtaacaacaacaaaaccctccatcagctcggcctcgctgtccacttgctgctgaccagctgtcaggcctattcctttgaagaaacagaggtgattagaaggaagctcttccaccttgtccacaggacgccagcattcctgcatctctggctctgagctccttcccagtacaatgtggtgggccaggccctcctgggggctctgctcctgcagtgcctcctctcatgtaggcagacacagaaatgaggcagaggctagaaaatgatgagggccggggagatgtgtttttcttttttctttttttctttttttttttttttgagatggagtttcgctcttgttgcccaggctggagtgtagtggcgcgatctcagctcactgcaacctccacctcccaagttcaggcgattctcctgctccagcctcccgagtagctgggattacaggtgcctgccaccacaaccagctgtattttttctttctttctttctttctttcttttttttttgtatttttagtagagacggggtttcaccatgttggctagggtggtctcgaactcctgacctcaggcgatccacccgccttggcctcccaaagtgctgggattacaggcgtgagccattgcgctggccagtttttgtatttttagtagagactagagacggggttttgctatgttgaccaggctgatctcaaactccggacctcaggtgatcctcccaccttggcctcccaaagtgctgggattacaggtgtgagccaccccacttggccattcgtgcactttcagtggtcaggtgtagctttttcattttaaaataggacctacggctcacattgatataactaagtgaataaataaatgagggagaaggaaaactctaataatggaatgccaaatggtacatggaggagtgatgggcttagaaaaaccactattcagcaaccattttattttattttattttacttatttatttacttttttttttttttgagacggagtcttgctctgtcgccaggctggagtgcaatgacacaatctcagctcactgcaacctccgagtccttggttcaagtgattctcctgcctcagtctcccgagtagctgggattacaggcacgcaccaccatgcccagctaatttttgtatttttagtagaggcgaggtttcaccatgttggccaggatggtctcaatctcttgacctcgtgatgcgcccgcctcagcctcccaaagtgctgggattacaggtgtgagccacagctcagcaaccattttaataaaaatcaattcagacaaaatcatcagtaagtgttaaaactagagagtgggctggctgcagtggcttacccctgtaatcccagcactttgggaggccgaggcaggtggatcacctgaggccacgagttcgagaccagcctgtccaacatggtgaaaccccgtctctacttaaaaaaaaatacaaaaaatagccaggtgtggtggcaggcacccgtaatcccagctacttgggaggctgaggcagaagaatcgcttgaacccgggagagggaggttgcagtgagccgaaatcacaccactgcactccagcgtgggggggaggttgcagtgagctgaaatcacaccactgcactccagcgtgggtgacagagaaagattctgtctcaaaaagaaacaaaacaaaacaaaataacaagttagagaaaccagatagactgagtgacagattcatacacacctgcacactgtgtgtgtgtgtgtgtgtgtgtgtgtgtgtgtggagagacagagagggagcaaatgtagtaaaaacttaacatttgaaataacaatgagtttctgataatagaagcaaaaaaaattaatatttggaaaatctggatgagggaatatgacattctgtatggttcttgccacttttctaatctaaaattacgttaaaatttctaaaaaattaaaaagtatttgggctgtgtaacaaattactgcaaacttgagtggtttaaaacaacacacattgggctgggcgcggtggctcactcctgtgagcctagcacttttgggaggccgaggcggatggatcacctgatgttaggggttcgagaccagcttggtcaacatgatgaaaccccgtctctactaaaaatacaaaaattagcctggcatggtggtgcgtgcctgtaatcccagctactcgggtggctgaggcaggagaatcgcttgaacccgggaggctgaggctgcagtgagccaagatctcaccattgcactccagcctgtgtgacacagactctgtctcaaacaacaacaacaaaaacaacaccgtttatcatctttctctcccgcaggctggctgaaggctctgagggaggccctggccacctttcccagccctgtggaggccgccagccatccctgccatttctcgtctggtggcagcacatctcatctctgcckccatctccacatggcctttttctctccgcgtgtctgtgtccacgtctctcttcttataaagactggacaggattttttttttttttttttttttttttttttctggagacagtctcgctcagtcgcacaggctggaggacagtggcgcgatcccggcctccaatgccaccttccagagccttcatgatgtaactccatccctgtcccctccccacatcgccggctttattgttcttcgtgtcagttcctgccagtggacatttaattctaattcacgtctcactccctcccctactgtgagccccacgtggcagagaccscggcggagctgcgcgggccggaggaggctgcggarcatcgctctgacctgagccggggacgctgcggaggcgcagcacgttcctctgcccagagctgatgggcaccgtccgtgtctttcgctgcaggtccggggggagactcgggggcctgggatcccccatttagccatagggcggggggatcaggttcagcctctgaaagtccagagcacgatgtttgggaaacggccccgcccgcggcctccggsacctggcgaaggagccccgcggggcgcccctgctaccaccctgcgcggagtcggccccgtccccgagagcgcccggcagcccctggccgtgggccgcaccggagccgcgcaaggcgactgttctgcgcctcggmtcggggttcggacccggctctgggcgcggtcacgcggggcgctgcgcacggcgtccggcggccacagagcgcggccatcgagtcccgccccggcgcggcgccccctcccgggcccgcgacacacgccctcggggtcggtcctcgaggacgcgcagggccccccacccaccaggacgcacgtttcaagctcatcagtaaaggttccttaaattcccgaagggcaagaagttaaccaagtaaaacagcatcggaacaccaggtagaagacaccaccggggtccgcgggtgggggtggctggaacccggggcgggcgggctcaggcgaagaggaaggcgggggagggggcggcgacccgggtctgcggttgaatcaacagggcgtgggaatggggcgggcggactggggtgggggcatgccggggtcccggggagggcgggggtcgggcaggccggagggtcccaggctgcggcggggtggggaaggggtgggggggagggscccgggctgggtggggtggaggaggggctgggsgggcgggtgctctgccacgagacattggccggcgccggcctccgcccccgcctctccgccaatcaccgcccgcctgctcccctcgccgtgggtccccgcgaggccgccaccccggggtcgccgtctccgcctcgccgcagtcggggcagccgctcgcccctcttttccatgtatccgtccaggtgagatccggccccaccgagactcgctcccctctctggacagaggatctcaactgggtcccggtttccctctccgcgcctccgcccagagttgcatcatctgcaccgaaaggcggcgagacagggtctcccaagacccccgccccaccggcgcccacgcctgcggtcttgaccgcccagaagatgggggctggccgtgcacgtggccccgggctcccaccccagcccccgcgccggcggagtggaccccactggcggcgagtcctggagcgtggagcagggacgcggggtgggaatccgggggagatgcacgtttcggtgcccagcattgagttcgctgcattgtggatgggaaatggctgtttgcaaatcgccctttttggcggaccgtgtggggtggcggtaaacgctgtcgttgcgcgggcggcacgcgaggtgggtgcccgctgggggagggacgcggggctctgcccaggttgcgttcgggggatggaggttttcctgggacctcacttccctgagccccaggcgagaccgcagctgagctgtaggatgcaagcgggaggcggagcgtgggtgggagagcggagcgcgaaattctcggcttcccgaggatcttctgggcttacttstccccagctttgtcccaaagtgtcgcttccggaggcggagtggccggcggtttccgggtctcagtagggtctggatctcccacctggaaacctagaggagtttcccgctctccgtgcgcgtggccttccccaggcccctccgggagtgctggcgcgcgagtgcaggggtgccccgggaacgtcgtgaccccaagggggtcttgtggtttaaggagcgaacggaaccggccaggcgatgccagctgaacccgccttcccgggacgcacgtgcatccggccgcccggcgctgttgtcttggggagcccgcgggttcgggtctgggtcgcctggcgagctttccgccgagcgcctctgagttctacagagccccgacggcttgcgatctgcgttcccggcagtcccttaccttgcgagagagggctccagggcgaggcgaggggccaaaagcaaggcgctgggccgcctgcgtctgccggggcctcgggtccacggctttctggaagattcggcggcggagcatgcgcgccccaggccagacagggcctgtgccagacggagagtcccttcccgtaggtgactcccgcgacccgcggaggaaggtgctgctccgctcacggcggcggcttcttacaaggttgggatagaaagaaaagcgtgggacacgaacctctgaaagcgggtgcatttttctggggaagagaagatccaacgccttcggattttcagacaagtccgtggtcccaagaccttgaaagcaccaccctccagggtcgtttgaagccgctttggcccccagtctggtgaattgcaaaggtggaggggaggctgggaagtccaggaggccaagctgaggcctgggtagggcctgtgcgcagagaccacctgaacagcatactccaagggcttccaaaggcagccggcttccgcaactttttcttttttaataggctttttaaaaaaaaagcagttttaggccgggcggggtggctcactcctataatcccagcactttgagaggctaggcgggcgaatcacctgaggtcaggagttcgagaccagcctggccaacatggtgaaacttcgtctctactaaaaatacaaaaattagccggatgtggtggcgggcgtctgtaatcctactcaggaggctgagacaggagaactgcttgaacccgggaggtggaggttgcagtgagccgagatcgcaccactgctccagcctgggcaacaagagggagactccgtctcgaaaatttaaaaaagagcagttttagatttagaaaaattgaaaaaatagatagagttcccccagtttcccctgttattaagatcttaaactgatgtcgtatatttgttactttatttattttcttttatttttatttttatttttattttttgagacggagtctcgctctgttgccaggctggagtgcartggcgcgatctcggctcactgacctccccctcccgggttcaagcgattctcctgcctcagcytcccgagtagctgggactacaggtgtgcgccaccatgcttggctaatttttgtakttttagtagaaacggggtttcaccatgttggccaggatggtctcgatctcttgacctcatgatccgcccrcctcggcctcccaaagtgctgggattacaggcgtgagccaccgcgcccggcctatttgttacaattaatgagccaattccacgatcacataaccattgttgacattaaccaaagtccgcgcttgagtcagatttgcagagttttctcctcactgcccttttctattccaggatcccatgacagattctgttgtcacgtctccttacagagtttgagcggtgctgaactgtcagcaccatctgtccggtgagtgacggctgtggacttagtcttcctgttgaatgtggggaatcaaaggagggtgaagcggggctgagcccagtcctgggccctctgaagaaggcaaggtgggaggtggtcgtgggttccttgtccccccagaggaggggcagcagatgggacctcgcctggctttctttttgctttcttcttttttttttctgtctcatctatttcaggtgcgtgtgtgtgtttttaatcctgggtaaaatacacgtaacactgatcactgtaaccatttctaagtgtgaggcaaccaccgtgactatctccacccagaacgttttcatcatccccagcacaacctctgcacccattaaacaatcaccctcccttccccactcacctcagccgctggccgcttctattctactttctatctctatgaatttgccagacatagaggggcgttcgagagtcccaggtgcctcatcgtggaagtggaatcacacagtatttgtccttttgtgtctggctcatttcgcttggcataatgtcckgaagkttcgtccgtgttgtagcgtgtgccagaattcatttctcttagggctgagtaatattctagtgtgtgtatgagcctactgtgtgtgttcatccgtctgcggatacgtgggctgcctccacgttttgacttgtgaatagtgcagcagtgagcatgggtgtgcaagcatctgttttgttgttgttgttttattttttaaatagagatggggctggagcccaggctggtcttgacctcgtggactcaagtggtcctcctgcctcagcctcccgaagtgctgggatgagaggcgtgagccaccgcacccggcccaagcaactgtctgcttccattttttttggtatatgcctataggagagaaatggccaagcggctgcccacagggctggtgcctgtgtttttgtgcagttcttcctgggcttctctgagggagcagagcacgcctcccagagggggccgggtcagcagggttcgctggaaccccacagcatccragcctgaaccgacgcctctctccttgctttgccaggtcccagcatgccttctgagacyccccaggcagaagtggggcccacaggctgcccccaccgctcagggccacactcggcgaaggggagcctggagaaggggtccccagaggataaggaagccaaggagcccctgtggatccggcccgatgctcygagcaggtgcacctggcagctgggccggcctgcctccgagtccccacrtcaccacactgccccgtaagtcctgcttttgatcacaagagggctgatccataacctggagggcaggagtttgttacctggacaccacacagccaggaggacatgaggtgtaaccccctgtagtcactctggattgaggagctgggggtggggccatgccgtgtagatgaggctctgagaggccaaggcctccttacgctgcagcccagcgcctaggccagtgcctggcaagacagtggatgctcagcaagtagttccagaataaataaataaatgtgcccaggtcacatgctttgcccggtctgtggctgcgtgtgcacattcactggaggtgagggaccaggatcctgcctgcgctctcttatttatttattttttatttttttgagacacgagctggagtgcagtggtgcaatcatggcttactgcagcctcaatctcccccagttaagggatcctcccacctcagcctcccaagtagctgggactatgggtgcccaccatcacacccagctgatttttgtatttttaggagatggggtttcacccaggctggtcttgaatgcctaggttcaagtgatccgcctgccttggcctcccacaagtgttgggattacaggtgtgagccaccgcgcccggcccagcctgcacttttccgttaactctaggtcatgaagacttcccgtaggcattacatatttttccataagggctgtttttctggtggcacagactgttcggtgaagaagccatcattttgtaagccctctacggggtagatagatgtttgcagttacctcattttacataactgcartagaagatacgacacattcatttagccaacaagtctttcctcagcgccatgtgcatttcgtgccctgctcaaggcgcagaagatctatcagtggaaaagacaaatcaacaaaaatccctaccccagcatgaaactgaaatcaagctcactaagccttaggattatctttatttccttagtgtamtcttggaggagaacaaatagatcaaagaatgtgcttcttagatgtttgattccttttttttttttttttttttttgagacagagtctcgctgtcacccaggctggagtgcagtggcgcgatctcagctcactgcaacttctgcctcccgggaagcgattctcctacctcagcctccctagtagctgggattacaggcatgtgccagcacgcccggtggatttttatgcttttaatagagatggggtttcaccatgttgtccaggctggtcttgaactcctgacctcagttgatccactcgcctcggcctcccaaagtgctgggattatgattcctattttgtgtccaccactaccagcgtttatggttgttgatttacagttcagaatgggtgggggtggctgggtgtactctcagtgcagcaatagaaagaaagaagtgacagtggacaaacccagaaggtctgagtgtcaaacatactcagtgctgggagctcaggaggccaagcagatgtgtgggcagccaggaggatgggctcttgctgccaagacaaacccaagagagcagtgggtgagaggcccggtgaggtcgggagtggctgctggagggtggagtgggcagggaagacaggcccgattcctgagggctccgtgagctcctaactctagggcatgagaaggagacgatgccctccaggttgtaaatggcgttgcacctgcacctcacatactggcctcattcatcctccgaagacacccccatcctgagacgcagagccgacgccgcttgtctccagtcggagggcccctgagaatagtggcgttgcggggaggtgctgcagaggtgggtcaggagttggaggttcattctaggacagtggcgtgtcctcccaggagmctcttgggctgtggaagtgggagtccttgagataaggggctccagggctatccctgcaagtcacatcctttttcttgctaagcgctctgggcctggccctgatcacctctgcaaacttctcaggtaacttcacagccacygaggcccagtgctgagtcagcacacctgctgcagggaggcgggactcttcccgcctggctggccagatgcccgaactgaattaatgaactaatcccmggcgctgtcaccctggggcttggctttccacctggccctggctctctacacctgccaagcctggttcccttctgccgagaactgcttctgagggaacctccctggcccctgtacagtttggggacctggcaggactgccttctgctccccgggaagggtgcgattggattccagctgctcttgttggcgcctgttttggccttcagggtagctctccctgcaaatgtggcactccctccatggcacaggacctctgggagctgggttcaccccaggtctaagggtcgcctcctggggggcaggacccaaggaccctggctgttcagcaggtgactgtgctgaagagggggcccagggttagccacggggtgtcatcggagctgcaaggcccagggaggggttgcgggtctggagaccgctgtaagccatgcgtgttcccagatgagtatgtggtgagcttggtgcagatagatagggggtgtcatcagcatctccctgggggaggatggcaggggcatgagggccatttaggaaaccacctggaccagggtttgagggtttacacagccagatgctgcagggcagggcatcacgagcctggccgacagcgcctctgccggggctctgagtctgccacgtgcctgacattttctgtgcagggctagacatcccgcctgcgctttgcagccattgtccctggtctaaggagtctctgccctgacacttttttgcttcctatggtcacatgctgagagatgaaaggaaatgtcatctccagtaaagcctttctgaaaaggtggacctaaacctttgttttggagtcagtatttgcttattttaacttttttatttggaaataatttrctactcacaataagtggcaaaaataatagatcctttgtacccttctcccagcttcccactaacaacatctgccacgactgtaggttcattttcaaacctgggaagctggcattggtgcaaataaaccacaggcatgatttgctttttatagatttgtatgtctaagcatgtgtgtgtatgtgtgtttcaggcgtgtgtgtgggatgtgtgttaggtgtatctgtgtacagatttgtgtaaccaccacccagataaagccagttctttttttttttttttttttttttccagttcttcgagtgttgatttgtgtaagacaatgtctgccagggctggtactatttttttttttttttcctgaataattgtggactcctctgtttcagggcaaaatctccaaaaatcttgccagatattctgaaraaaatcrgggacaccyctwtggtcagaatcaacaagattgggaagaagttcggccygmastgtgagctctgtgagtgccctggctttggagaggggcttcctccatctacactgggctccgtgggcctggggggtcctggggggtcctgggatggatcccttaggcaaggccctgggatcagaaaactcgctggttaatragtggccaagaacatatcagcttaagtttgggaaaaacacacaacagggcattgtgtcagagggtgaccaaagtgactccccagcagatggacmagggaacgaacaggtgacctttgaactgaggccggagtggaagcagcgagggtgtgaagggccgggtgagggtcaaaggcagaagcaagcaggtggggagggttagcgtcatgcctgctaaggagcagtggacgggtcctagcacgtgctgtgagccacccgctgtccagggagcggttacctctgtcttgccagcttcgtggggacagatagttcagctcatcatttatgagacagagaatgggaatttggagggtctgtggctggcctcgtcctgggtgcgcagggggtcacctgaggtgtggtctgaggcctccggggaagggcatttctttgcaggacgcagtttccaggctcaagarcgtggagggaattcctaagggtcgctcttcaccaagagcgcagagccctggtagacctcagcatcgtcacagagaaagctgtgggtgcagaggccttggggacaaggcggggacggaatttcgtatttcagatgaccaaggycaagtgagttcggagggaggcaggaagggtgccgcggagaaccccgcgacagggccagatggagggggtggagttcgagtgggaaggagagggaaccagtaacatggcttgggactttttcatcctgagatgctctaatgtcccagccgggggacctgtgagagctggggcaggcgctgggggaaggaagtcaggggtcggtgcgttgggaaccgatcgccgattcacaggaggggcctcgtgggagcctggccctcctctgcccccctctagggaaggagatctcggagctgcagcagagcagcccccttcacagagacccccaaggcagcagggccggctctgtgctcatttgtcagacaatagggacccttaactcgtacgcagcacgcgtggctggctcactgtgctccgtacaggatgacgtctaaacttgryggttgcccttgaagtaggttttggaatgcccgttttacagacagacacrccgagggtcaggttggtcacgtggcttgccggaggccaccagctctgatttctgcttcggagctggcccccaggcgctagtgagaatgatctaactgagggtttcacagtatgggacccagaggggtccgagaatgcaggcctgtagagggccagaccccgagagtcctccccaccacacacagcgcctcgtcctggttctaggggcaacacctgtctggtggttgctttcagaaattttgaggtgctgcaggctggtcccaggtccctcaaatcacatttcatgcagcccaktctctcgctcttaaaaactaaatatttttaagagctggagagggagagaggacttgcagtaaggaaggaagtgcaagtgaaggccttggccttgtgcgggaacygcgcagggagcccttccccgggcaggtgacgccccacaggggraggaggacaatgggaggctgtagggagagtatgcgagtccccatccgatggggaagccagtgctgtggcttcaggacatcaagctgctttggcaggggccgctgggtatggctgggcataggggcgtaggggacccaaatccaggcgcctgcccgccacaagcccagctcgtgggtggggggacggggttttctgcggcgccccccagtgagggctgcttatgcctctctggttcccacagagttgctcagcgccctgcaggaccggtaggatgggctgcagggggagaagctctgataggctagtgcccaggtgcaggtgtaggggaggtgagtggagaggtggcaatttttcagaacccacagacccccaagcccgtcccccaccctggggtgtatcaggtaatgggggggtgagcaggaatcaatggsggggtggtcagggggtcccctctgtgattcatctctgcctcccagtggccaagygtgagttcttcaacgcgggcgggagcgtgaaggacydcatcagcctgyvgrtgattgasgatgctgascgcgacgggacgctgaagcccggggacacgattatcragcygacatccrggaacaccrgtgggtgccaggcccagagggggtggccrgggctggctgtcmcctacccatgccgagcctgccgggacccggggrggatggmtgagctgcagccgcatgtgctggcccgcctggccgcctgctccctggcatcttgcaccykctgccggcctgtgtcccaacctagcttcctttgaccagcattcggggccagtgccgatgctctcggggcgatggcacctggcagtgcctggcacacaagacgagcayccggagtctgctcttcctgtgcctgtgtacccggctgggcctggaggaaccagatctcctgtcctgcgccgctgcctcctcctccttgacgtgtaccttttatttctgcctctggcagcctctctccccctgcacttgaaggcagaagcagccatgttgggcaattttggaatcccacagaaccctcttccctgggccctaagggaaccggcatcggggtgtgcccctgtgtcccaggcaggggcggggcagggcttggggggtcactgggcccctctcaccctctgtgtgccctcagggatsgggctgrccctggctgcggcagtgaggggctaycgctgcatcatcgtgatgccagagaagatgagctccragaaggtgggtgggcrtggccaggggcggggtcatagggcaggggatgagggtgcctgggccaggcggaaggtgcaggccaccgctttccctcctgcaggtggacgygctgcgggcactgggggctgagattgtgaggaygcccaccaatgccaggttcgwctccccggagtcacacgtgggggtggcctggcggctgaagaaygaaatccccaattctcacatcctagaccaggtgaggcacctggggcctggagacaggcattccctaggagggtctcggtcagggatgtgggggtgactgaggtgtcaggggtcagctcacgggctctgctctctttctatgcagtaccrcaacgccagcaavcccctggctcactaygacaccaccgctgatragatcctgcagcagtgtgatggtgcgtccctctgtccatcttgattgcatttatccctggctgcctgggagtgtacacatctcttgccctctccttggtgaactcctattcacccttcagaacccagctcaaatgttccctctgtgaaatgcttttctagagcatttctctagaacaatttcctccctccgttgtgccctcttggcctccgcctgtggtttacctgtaatagcaaacacagggcatggctgtatttgtttacccagcaatctctgcaggtctgcaggggctcctcctgcagataatgcagacagcgagtctgttcagggcccaggctggtgctgggctcacagcttggacttcatttgggatcatgccctgactcggcatcaaattcatctgcagaacagagctggtgacatctgcgatgagctcactctctgttacaagcatgaggccggctccttgggcccttttccagggactcggtgccaaggcctgtgggggttggtactgaggttttcccaagagatccctttagagataagttgccaagaggttggcgccctggcttcctattgggaatccggtgttggcatgggctggagtayaccctcagtccgtgcccaggagccgggctgtaaggtccaggcatttggttgtttgggctttatgtgtgagaactctctcatttggcaaaaacagtcctgtctcagcatgggtgcccaagctgctccgtctcgctgagtctttccctgctgtgacttctccaccagatgcccgcgctggcggccagcagtgtgagcgcccagcgagtttctgcgctgaagcctaaaagactgattccatttcctgtgtaaattcagttaactcactcacaccacgcaaacatccaacagcccacggaggtggttaattcacagcctccctctgcccgccctcagcgcctgcaccccccggacagggtcctgtctttctgcatccagccaaatgggggttttaggggtcgagtgtcactgagcaaagactgggctggggtgccccaggctgcctgtttctgaggctttcacagaccaagggcagcaacgagggctgctccaactggagaagaagtttttcttttgaactttttggttacccaccgtggtttgggctgagtgtgttttcaatgattattactatgagtgatgggctggccaggcagggacccaagaatgttatccgtccaccagggaagctggacatgctggtggcttcagtgggcacgggcggcaccatcabgggcattgccaggaagctgaaggagaagtgtcctggatgcagggtgagtggtgtggccgggccggrgaggggcagtgcggagtggccccggcttctgagctgaaagctgtcattcctcacggtctgctcagcacgctgtctcccgcggtatttctgcgctgcctgggaggtgtttgggaagacaagggtgcttgacacataagggaccagcagctcgtgacccgaaggagctggggctgggtgctcgctcaccggccagtgtcttggagaaccttcctgyrctgagtggggggtcggagttccaactgggggcctctgaggatcagccaggagctctaagtcctctggtcctgagtctgcccctcaactggggcttgtgggagttgggagagggttcctggactcggggttaagagcaggtctgaggacgggtgcctagaaaggtcccgctgatgagacaagggcgttctctccctgttgcttgcccttgaaaaagacgtcactgcccagcaatgccctttgtccccaaaggctctgctgctccgccgcagggtggtctgtctggactgtcctgggggccccgctccgagaagcaccccrgggaggtcagttcctcccaggcacctgcctttacttctgagcgccctgcactgaacatttaggtcattaccgctttaatacttggagcctgggttcttgggtttctcatcctgcctctgaggctgggaacaggccaccacccacaggcagatcattaacaggcagttgttaacggcrgtattggccactcccataatagaatatygaggcatgtccaggcggggcttttgctggccttgagccctgaagccgckccctctgcagatcaytggggtggatcccgaagggtccatcctcgcagagcyggaggagctgaaccagacggagcagacaacctacraggtggaarggatcggctacgacttcatccccacrgtgctggacaggacggtaggtcgagtccagagcccggccacagtgccrgtgcagcctgtaactcaccctcacactggggagcctggctgaccctgggccccaaccagcttctccactgaaacagaagggcaagccccgcacrcatggtgagaagctggtctcgaaggtcgagacaaagtagactgggggacgatgtccgcacacgtggcctgacctcaccaagggatgtagcccaggtggcacaggcagggagcagggaaaacgtgtgaaaattaaggccccggaaaagtctgttaagagccaaaaagctgactttggcctgagggagagcagagaccgaagggccggtgtgggtcacacggatgctcagtggggctggcgggcagttttgctgtctgcaaaacgtgttggaactggaaagtctgcagacgtgccgatcccagggggagaggctggggtgagacmtctggggtcctaccgcctagacacggggtccaccatgaggctgttcaccctcttggtcacgtgggagcggctcccacgctgacgggctgtggtggggtcctgctcaggtggyggacaagtggttcaagagcaacgatgaggaggcgttcacctttgcccgcatgctgatcgcgcaagaggggctgctgtgcrgtgagtgggtggcgggcacgggggtatggggaaggcagagatggctagggggcactggggatggctgggggcgcaccctcagtcagccaccgacctgcatgtgtaagacagcagttctgaggagtgtcactgcggcggccacgagcctcaggtgttgtctgcctgcccagtgtggtcacctgctcaggtgagggcaggaggccatggggcggggcttcgagctgccttccagaatgtgtttctagaacaaggctgaagctctcatggcacttattgtttctaatcaagtccaccagggcccctggggcggtggctctgcattgacggggcccatggccgggactgggtgctgcgagcaccctggagcagctggggaggggactggagcctgaggctgtccagctcgaccccgctcaccttcctcctaccccgtgcccctctgcccacctgcttgggggtggacagaccaggtggccgctggcaatgccactgactagccacacaggcagcagaggccctgtagggaccayagttgatctagacctctggggactcggagagcacacaccagcttctaaaacgcaggcagggacatgtgaggtttctacatgtgcattccgtgtgtcatgtcactttgggggtggtgacagggaaagtggaaggaaaccagccctcagcatggccaagtcccccgttagctgagccccaaactagagattggaagaaagtcttgattgaaaaaccatttcccagccaggcgcgttggctcatgcctataatcccagcactttgggaggtcgaggcgggtggatcacctgaggtcaggagttcaagaccagcctggccaacagggagaaaccccgtctctactaaaaataccaaaaaaaaaaaaaaaagtagccgatgtaatggtgcatgcctgtaatcccagctactcgggaggctgaggcaagagaattgcttgaacctgggaggtggaggttgcagtgagccgagatcacgccattgcactccagcctgggtgataagagcaaaaactccatctcaaaaaaaaaaaaaagaaaagaaaagcattttccagatgaatctgtcacgaaaggtgacttggtgcccataatcgttgggctctccctgtctcagtctccctgctccccatgttggtggagaaacaagcccctgcctttggggctggaaagcaggtccatgggccccgttacagaggagggtgcctctcttcctgtgggggctcctrctgcagacttagaccttcccgactgctgtgtgcaccctcaaactaagcccagagaagacgcctctgactctgacttcagggctcctagggacagctggtgtcactgtgagccttggtctcttgtttataaagcagagcccagtgtgcagtcaggcagcctgcaggcgtggtgctgggggctccgtcctcgtagcatcgctggctctaggctcagggccaggaggtttgccaggggccgcagccccactgcaggcatttccctggcaccagtgcccaccccagctcattatgaagccccgagtggacacagaaactccatggtgcacaaggaagaagccgatgctcacggagaagtggggtcctcccagcccctctccccgaggcaacccctcttgacggatccttcggagtgtgtctgacatgctcccatgcgtgcacgtgcacaattcatgcatacgtgtgcacccacgcacgctcaccctggcgcgtctgactcgtggccctctctgcaggtggcagtgctggcarcayrrtgscggtggccgtgaaggcyrcgcaggagctgcaggagggccagyrctgcgtggtcattctgcccgactcagtgcggaactacatgtaagacacggcttccctcccaggtccctgctcctctccatcctgccacccttccctggatgcctctcacgcctcacctgagaaccggcagccagaactgggaggggaggaggccagcggggccctgtgagcaccgcctccactctcctgcccacgtgccctcacgctgtggggcttcccagcctcttaatgctgtgaaaatcaatgcacactcgcagtgacagccctgacaggaggggcatgaaagacggtggctccctctctgtcyctcctgtcccttcctctctggtgtctgtccccctcactgctctggggtccgtgagctccaacgggtagccctggccacatggactgacgtcctcttgggccgggccctgtgccacctcctatccaccctgactccctctgctgcttcccccaaactccagattgggamcgagtgctgcccaggtggccccctaggacttgctgtgactgttttgcccagaggcccctcggacagtaacgccacagacctcgctggtcaccgggcagccaggctgagactggcgctgctctgcacctggtctccggaggcggtaccagggcgggtgtctacagacccccatgccctgtcccctgcacctgcagggtttcctccatggcctgcaagctgcagcggctacacagctcccgagagctcagctgcccttggagggccaggcctggctggtgggtgcccccagttgggttccccagtgtggggtgattcacatctggtgcccagggtcaagatgccctgtgcagggctcctgcccacccccgtcagtgcaagaacaccatctccccacatacttggccagcctgccaygtgtacctgtgcgtgtgagtgtgtgaggggcagagagcgagcatgagaggacgtgtttatctgagtgcctgagcgatggctgtgtgcatgctcacacacgcttgttggccatgggggcgggaagtccagcccccaggcttccccctggggcttccagccagcacttgggggtctctgctgcaccagtgaggtccaggaraggggctgggcaggcagtgcgtgccactcagcaggggcgggggcccggtggggccctgcggggactcggtgactcccccatcccgcaggaccrasttcctgagcgacaggtggatgctgcagaagggctttctgaaggaggaggacctcacggagaagaagccctggtaagaccgctcggccggagacccgctgcctgtgctggccctgcccagtgtgacaggcaggagagcactcccccgtggcctgtgctggccctgcccagtgtgacaggcaggagagcggtccccgtggcctgtgctggccctgcccagtgtgacaggcaggagagcggtccctgtggcctcctgctgaggtgctgccggcgggggtgcgagagcgtttgtccttatcctgatccccccgacctgccctcttccctcaggtrgtggcacctccgtgttcaggagctgggcctgtcagccccgctgaccgtgctcccgaccatcacctgtgggcacamcaycgagatcctccrggagaagggcttcgaccaggcgcccgtggtggatgaggcggggtcagtctcagcccctgctcagagctcagtcctgggttctgtctgcccagctccaccccgtcagtgtcactggacagggcagccatgcagaccctgcagctgggctgataggcccgcctgggccgcctcatacagacgttcagggcattggaggccccttgccggtccctgagcagcctggggcagggctgccgtgctcactccaggccctcagacctcagcccacccaccctttgtgtgcaggctgtcctgggcccacctggaggtcaggggagagatgccccgaggacatgtctgacagcagaaagccttggcacacatgcccagtgaccactgagagccccacgtcgcggaaacctgacggctggtcacccttgaccctggctgaacgggtccaaggactcttggtttctttctccccaccagggcccagactggttcctgccgcgtgtaggctcgtggcagaggacttccatgtgtggccagagagcgctcctccctggggcagctgagcgtgtgccccacygtcctgggaggggtgaggtatgagygctgacccctgcctgcccccgtcccacagggwaatcctgggaatggtgacgcttgggaacatgctctcgtccctgcttgccgggaaggtgcagccgtcagaccaagttggcaaagtcatctacaagcagttcaaacaggtacccagtcacctacaggcagctcaaacagatgcgcrgtcacctacaggcagctcaaacaggtgcccggtcacctacacgcagctcaaacaggtgcgcggtcacctacaggcagctcaaacaggtgagcggtcacctacaggcagctcaaacaggtrcscggtcacctacaggcagctcaaacaggtgcgcggtcagctacaggcagctcaagcgggtgcgcggtcacctacaggcagctcaaacgggtgcccrgtcacctacaggcagctcaaacgggtgcccggtcacctacaggcagctcaaacgggtgcccggtcacctacaggcagctcaaacgggtgcgcggtcacctacaggcagctcaaacgggtgcccagtcacctacaggcagctcaaacaggtgcgcggtcacctacaggcagctcaaacaggtgcccggtcagctacaggcagctcaaacaggtgcgcggtcacctacacgcagttcaaacaggtgcgcagtcacctacacgcggctcaaacaggtactcaggcacttcgggaccccagagggtgccagagtactccagcctcgaaggcgggacaccgcgcttcccgtgtgggggtgctgggtcctcgaccctcaacaccacttaggccgaagctggctgcacccctcaaaccatgaagctgagaagcacccactttacaagtgcagcagccggagagsaggctctcatcagtgcaggctcatccacaccagccgtgttttggggacttaaggaggtcattcgcgctcagaggctgtcccgggcaccatgcggcgtctgccggggtctttctcctgcccagcctcatttgcctgtgcatgcacttggttatccaacaagagctagaacattctgggagaagcccacggtggctccttgccgggctggtcagactccgtggttgtcctgagacacccaccctctgctgccctgagggtggcccaggaaagtttgtgtgaccttccacacggatcccctgggacatgcaggtgtggctcttgacactggaaaggctgagggttctgcccaaacctaggagtgaattcgacttctttcccatctcacacacacacccgagacgtcacccgaatccacgtatttcccacgttcggctgccactgcctcccrggtgggctttgcaggacccaccatcgcatcccctctcactccacagaaaactcgtggggccntgttccccctgccactgaccacgcttcccttgcagatcygcctcacggacacgctgggcaggctctcgcacatcctggagatggaccacttcgccctggtggtgcacgagcagatccagtgtgagtggggccctgctctgtgcgtggggttctcactggggtcaggccaccaagcctggcctctgccatgggcagcagctgggccccccatcccctgcggggtgttaggggagtgggtggtgccgaccttcagtgacacccagtctttatgccngggcctcccacatgccctgggctggtgggctgtacctgtgattcctrcagggacccctcatcaggccacactgggtagggccctttgtccagcatgcagaggctcaggagtccaggccccttgcctccggggaggccagcagtcttggggattctcagggacaagcccagaaacatctagaagggtttcaagtcctgaccctggcattcggagggctgctctgaatggaagcctcatgtgggtctcacaggagccactgatgggctgtcctcagagccccgctcccagcaagctcatgaggttttgcaactcctgagcgcatccccgggcgtccccaccacatccccacaggccaggagagtcgctcgcaggttttgggtcatagatggcagccctgggcctggggcccacaggaagagttgggaggggccctggagcctggagcctgcccacccaccaggcctgtgtgcagggggtgagcgctcggtggctgaggctggtccgtgagggccccaagtctaaccccatctcccgtccttggctctgcagcgcaggaccaggcctgggcaggcgtggtgggggggcctgcaggtaggtatcacccacccctcagaatggctctcaggctcagattcacagcctccccatggcaaatggaggccttccagggtcctggacccacccccaagcttgggtaggagggatccccctcttaatctcacatttacttgtgtttgaacatctcagaaaaaaaaaaagatgcaaattccaatgtcagggtccccaaatcaagtcttcctggagcrtgtccacgcttgtcaccaccgtctgtggctgctttcaagcacgtcagggctgcgtgctcataacagagacggcacrgcccccaagacctaaaataccaccagctggcccttgtcggaaagtcccctggctggccctagtccattgactctgggccgrgctgccaggrccacagaagcctgcggcactcagggctcccagggctcccttctccaacagttgctgtgcctccgtttccccraaatgcaaggagctgatctcatctgtgttccctrtcttttcctggggctctaagtgggccaccccaagggacctctgcctacaaagagaggagtgacagccgtggcggagttgggacgggctccgagggctcttcctcacccgcaccttgctcacccctctgtgcctcatgacagctggtgtagggtcctgtggagacgcaggaccaagaggatgtgtggggagcggggagagagagggaacgagatctgtgttaaggaactggatcatgagatcacggaggctgacaaaccctgagatctgcagggtgaggcggcaggccggagactggagagccagcagttcaagccccaaggcaggaaattccacctttggttctattcaggccttcaactgcttgggtgaggccctccacagtagcacacgttatctgcctcttgactcttgtgctaatccggaatcccctcacacatgcccagaacgacgtgtgaccaatgcctgggctcccacggccccgttaatctgtattaaaattaaccatcacaacagccctgtctgggtatgtggcatgggagcctcggccagcattaacaccgggtctacgcttgccaggagaaagcaggaggggtgaagacagaatcaggccagagatggaagctgtgtgctgcccatggtggcaaggggtttttgtctgtttttagagacagggtcttgctctgttgccgactggagtgcagtagtgccatcatagctcgctgcagcctcgacctgctgtgctcaactgatccttctgcctcagtctcccaagtagctgggaccacaagcgtgtgccaccatgctcgactaatttatttttaaaaatattctrtagagacagggtcwcaatatgttgcccaggctggtcccagacttccgggcttaaatgatcctcccaccttggcctcccacagcgctgggatcacaggtgtgagccactgtgcccggccctgtaagcgggtttgaatttcatgcccacaccggctctgaagtcatgagtgcctcaggagctcagmcggtgggccagggaagggtgtgtcctgacctgcggtgggtggagcctggcctggggcccaggggactcacgtggtgggtagaacctggcctgggggctcatggggctcatgtcagaagaacactggcttggccaggcacagtggctcacgcctgtaatcccagcactttgggagccgaggcaagtggatcacttgaggtcaggagttcaaggccagcctggccaacatggcaaaaccccatctctactaaaaatacaaaaattagctgggtgtggtgatgtgcacctgaagtcccagatactcgggagtctgaggcacgagaatcacttgaacccaggaggtggaggttgcagtgagccaagactgcaccactgcactccagcctaggggacagagtgaggccctgtctcagaaaaaaaaaaaggaacacagccttcgccgctgggctccagccaccctgggcccccatggtgcacaggtgccccaggccctcaggagcctcctgccccgcagcagcccacccagcctcccacggcacctgcaaacccactgcctcgttctcccctcagaccacagcaccgggaagtccagtcagcggcagatggtgttcggggtggwcaccgccattgactygctgaacttcgtggccgcccaggagcgggaccagaagtgaagtccggagmgctgggcggtgyggagcgggcccgccacccttgcccacttctccttcgctttcctgagccctaaacacacrcgtgattggtaactgcctggcctggcaccgttatccctgcasacggcacagagcatccgtctcccctcgttaacacatggcttcctaaatggccctgtttacggcctatgagatgaaatatgtgattttctctaatgtaacttcctcttaggatgtttcaccaaggaaatattgagagagaagtcggccaggtaggatgaacacaggcaatgactgcrcagagtggattaaaggcaaaagagagaagagtccaggaaggggcggggagaagcctgggtggctcagcatcctccacgggctgcgccgtctgctcggggctgagctggcgggagcagtttgcgtgtttgggttttttaaytgagatgaaattcaaataacctaaaaatcaatcacttgaaagtgaacaatcagcggcatttagtacatccagaaagttgtgtaggcaccacctctgtcacgttcyggaacattctgtcatcacccygtgaagcaatcatttcccctcccgtcttcctcctcccctggcaactgctgatcgactttgtgtctctgttgtctaaaataggttttccctgttctggacatttcatataaatggaatcacacaattgtggcctcgtgtctaacttatttcactttgcatggtattttcaggcatgtcagagcacgtgtacttggtttctttttgtggccgaataataagccattgtgtggatagaccacattttggttcctcatttatcggtgatggacacctggttgtttctgcttttcagcccttgtgagtaacctgctgtgcaccttcatggccgagtatgtctggacacctcttttcacttttcttgggtgtgtacccaggagtggcattgctggttaatgtggtaactccatgtttaatttttttttttttttttttttgagatggagtcttgctctgttgccaggctggagtacaatggcacaatctcggctcactgcaacctccacctcctgggttcaagcgattctcctgcctcagcctcccgagtagccaggattacaagtgtgcaccactgtgcctggctaatttttgtatttttgtagagacagggttttaccatgttggccaggctggtcttgaactcctgacctcaggtgatccacctgcctcagcctcccaaagtgctgggatgacaggcgtgagccactgcgcccggcgtccatgtttattttttgaggaaccatcaagctgtgttccatactggtcacaccgatttccattctcaccaacagtgcccgagggttccagtttctccaggtccttatcaacacttgctattttcttgttttaaattattatagccatgctagtgtgtatgaagaggtgtctcattatggttttgatttgcctttctgtaatcattggtgatgttgagtgaccatcttttcatatgcctgttggttattttttgggagaatccatctcctgtttttaaattgggttgtctttttgttgagttgtaggagctctttatatgttcaggatactaagcccttatcataagacttgcaaatattttctcccattctgtaggttatctttttactttttttttttttgagatggagtcttgctctgttgcccaggctggagtgcaatggtgtgatcttggctcactgcaaccttcacctcctgggttcaagctattctcctgcctcagcttcccaagtagctgggattacaagttcccaacaccacgcccagctaatttttgtgtttcgtattttttattgttttgagacagagtctttctctgtcgcccaggctggaatgcagtagcgtgatctcagctcactgcaacctccgcctctcaggttcaagcagttctcctgcctcagcctccccaggagctgggattacaggcacgtaccaccatgcctggctaatttttgtatttttaccagagacggggtttcacaatgttggtcaggctggtctcaaactcctgaccttgtgatctgcctgcctcggcctcccaaagtgctgggattacaggtgtgagccactgcgcctcgtctactttttaatatttttagtggagacagggtttcaccatgttggccaggctggtcttgaattcctgacctcaagtgatctgcccacctcggcctcccaaagtgctgggatgacaggtgtgagccactgcgcctcgtctaatttttaatatttttagtggagacagggtttcaccatgttggccaggctggtctcgaattcctgacctcaagtgatctgcccacctcggcctcccaaagtgctgggatgacaggtgtgagccactgcgcctcgtctaatttttaatatttttagtggagacagggtttcaccatgttggccaggctggtcttgaattcctgacctcaagtgatctgcccacctcggcctcccaaagtgctggggtgacaggcgtgagccattggtcccggtctctttactttcttaatgttctttgatgcacggcagtttttagttttggtggagtcaaaatttgtttgtttgttttttcctgttgctcatgctttgggtgtcatatccattggcaaatccaaggttcatggaaatgtacccctatgtcttcttctaagatctgtacagatttagctcattgttcgattttgagtcaatttttgtagatggtttaacatgggagtttgtggatgtctgtctgtctcagcgtctcttgttgaagagacgatgctccccccatggaatggcctggcaccgttgctcacagatgtatgggctcatttctagactcagtgctattccattgatctgtgtgtctggccttatggtggtaccacactgttttgattactatagttctgtagtaagttttgaaattgaaagtatggatcctacagctttgttcttttacaatgttgttttggaaattatgatgtatcctgatgtatttgtccttatgtttttgtgtgtgaaattctttgagcttattggatcccagcacgtggcaagtaagagttccaaaaagaaaacaaggaaggatctcagtaatgaagtaattcacaaaactgccccagaactcaaagacatgactttgcagaccgagaggcccacccagtgcccagcaaaatggaccgcgaaagatctacacagtgaacatcactgtgaaatgtgaggtcactcaagacatgagaagtctaaaacactcccaaaaaaggatgaaaagcccagctcacacagggaggcttgggatgagaaaggcatcaacttcagcctccagcacacatggaaaccaggagatgaaccctgacggaattcagaagaggaaggaatgcaggctggaagccctgaggccagcaccctctcccttagcaccggaggcaggagacccacttccatcatgcagggcaggctttctgcccaggaacacacgccaccaaaaggagggaatgaaaacaggagaggaaatggtgtcacaggaggtcccagggccactgtgagtccagcagcagtaggacagaggagacctaggcgagaagattgcttgaggccaggagttcgagaccagcctgggcaacacagtgagaccctgtctctacaagaaaaaagaaaggaaaacaactcctcaggaggctgaggcattaggatcacttgggcccaggagttggaggctgcagtgagccatgattgcactactgcattctagcctggatgactcagtgataccctgtctcaaaaaaaaaaaaaaaaaagacaggagtgatgcttcaggggagataaggaaatcaagaggtcgccagagtgctgtgagcctatcaagagatctgcatgcctggtggagagttgggagttgcatcagaacctagaaaacaaagaggccgggcacggtggctcatgcctgtaatcccagcactttgggaggccaaagcagacacactttgggaggactcgactcaacacacacacttgagtccaggagttcaggacctcatctctattaaaaatagctgggcatggtggtgggtgcctgtggtcccagctacttgggaggctgaggcaggaggattgatggagccagggagattgaggctgcggtgagctgtgattataccactgcactccagcctgggtgacagagcaagaccttgtctcaaaaaaaggggagaaaatattggagctctgtaagaaatgtaattacatracatgactaggctaggaataatagttgcttcatcataatcgtgtaaacactggatattaatctattctcaattataaaactgtcctgaaggaatccgagaatggaattatatttcctactagtggggaggagcatgggagaggaagaatcttcatttttccacagaaggatgttgatagataacatctatacttacaaaaagaaaaaagcagctgggcgcagtggctcacacctataatcccagcattttgggaggccaagatgggtggattgtttgagctcaggagttcaagaccagcgtggacaacatgaggaaacaccgtatctactaaaaatacgaaaattagccaggcgtggcagtgtgccctgtagtcctagctacttgcgaggctgaggtgggaaaattgcgtaagtttaggaggtcgacactacagtgagccgagattgcatcaccgtgctccagcctaggtgacagagccagaccctgtctcaaaaaaaaaaaaaaaaaaaaaaaaaaggaaggaaggaagaaaaggagggagacaggaaaggagcacaagcaagtttctggacatatggatgcaagtaagtttataggtgagcgccactccagcctgactggcagacggagaccctgtccrcccctcccctctaaaaacagtagagctctggtgagctgaacagtggtccttcaaagctaccaggccctaatctctgaaacctgtgaatgggccctctttggaaaaagagtccagcaggtgtgaagctgaggctcctgagatgcagagacactcctggatcatccaggtgggccctaaatgccctcgagcttccccttcggttttccccgtgtggcccagtgtgagtccgccagggctgctgtagcaaagggccccacagtgggtgcttcgacaacttactgtctcacagacttggaggccagaagtccagggtcaaggtgttggcagggatggttccatcaaccctgaataatgagattcataaaatacagtgaagtccagggtttattcaagcttaaagcttgggaaccatcactcgggaaacagactcgaaaagaatgggccagcgctccagagtgggaagggaaggtctcgcttacatagaggcagagacaagagaagtctgacagggttgcaacgttttccgtacaaggtagtgcatagcttatagtgtttcttttttacgagacagggtctcgcactttgcagtggtgtggacatggctcactggggccttgatctgggctcaagtgatcctcctgcctcagtttcttgaatcactgggaccacaggtgtacaccaccacaccagctaatttttgtagagacagggttttacatgttgcctaggctggtctctaactcctgggctcaagtgatcctcctgccttggcctcccaaagtgctgggattacaggcgtgagccactgcacccagcgagtttgaactctttaatgccacagctccttctggggctgagggaacctccgtcccaggcctctccggcttctgcgggttgctggccctgcttggtggtccttagcttggagaagcacccccttgttctccactttcatcctagcagggcattctccctccgcatctgcatccacattaccctttgtgtaaggacaccagtcactgggttagggtctaatggcctcatttagctttaatcacctctttaaagaccctgtctccaaataaggttatattctgaggtagtgggggttaggtctgcaacatgtcagttttgaggggacacaatctagcccatagcactccccacccccaacacacacacaccgtgcacagagtgcctgttaggccggrtgtgatggctcacgcctgtaatcctagcactttgggaggccgaggcaggtggatcacctgagtcaggagttcgagaccagcctggccaacatggagtgcctgttgacgagcacctcccagccttggcacttgctggacgagcctggaaaaaagccacaactctggacccagtttgatctgggtttgaatccaaactctgccacttatcagttgggggttcttgggcaatatgtcccaatttccatgtctacaaaatggagataagatctagacatggagataagatctacctcatgcagatgaatggagaagcaaaatgtggactatccgggcaacggacaatgattcagcttaaaaaggaatgaaaccacrccacgtgctacaacagcacaaaccctgcatgaccccacgaatcctgcgtgaccccacttatgtaaagaatctagaacagctgaactcagagaggcaacgagaacagtggttgccaggggctgaggagggggatgaggaatcattgttggctgagaacagtttcagttcgggaaagtgagaaa

SEQ ID NO: 95953 - DNA, 54970 bp, Homo sapiens
  misc_feature (1)...(54970): n = A,T,C or G
tgtattttattttattttttgagacaggttcttgctctgttacccaggctggagtacaatggcacaatgatggctcactgcagcctcaatcttctgggctcaagtgattctcctgcatcagcctcccaagtagctggatccacaggcacgtgccaccacgcctggctaatttttttttttttttttttagcagagatggggtctcactatattgcccaggctggtcttaaattcctgggctcaagcggtcctcctgcctcagccacccaaagttctaggattgcagccatgaactactaccactggctgaaagcaagctttttttttttttttttttttgagatggagtctcgccctgttgccccaggctggagtgcaatggcaccatctcagctcactgcaacctctgcctccccggttcaaccaattctcctgcctcggcctcccaggtagctgggattacaggcacgtgccaccacacacagctaattttttgtatctttagtagagatggggtttcaccatgttggccaggctggtctcaaactcctgacctcgtgctctgcacatctcagcctcccaaagtgctgggattataggcatgagccaccgtgccaggcaaaagcaagcttttaaaaaaagtattgataacatgacgtgtggtcaccataaccatggtcatgtaaaacaaaaataaaattctgaggccccccaaccatctgaatggacttcctcctcagccagggaactctgaaaatttaacctgagagactggttcaggccatgatgggaagtggggatgggatgtgccttattctacctctccagcattaacatcaatgcagacttcaagtctgataagaaacatttgacaacccattctctctaaagcctgctacctgaaggcttcctttgaaagtaagagcttcagtctctacaatcgttgatcttaacagacgttcctttctattgatcccaggtctttttttcttttttttttttgaggcggagtctcgctctgtcacccaggctggagtgcagtggcgtgatctcggctcactgcaagctccgcctcccgggttcgccattctcctgcctcagcctcccaagtagctgagactacaggctcccgccaccacgcccagctaattttttgtatttttagtagagatggggtttcaccgtgttagccaggatggtctcgatctcccgacctcttgattcgcccacctcagcctcccaaagtgctgggattacaggtgtgagccaccgcgcccggccagtcccaggtctttaaataaactcaaccaattgtcaaccagaaatttttttttttttttttttttttgagagggagtctcactctgtcgcccaggctggaatgcagtggcgtgatctcggctcactgcaagctccgcctcctggttcacgccattctcctgcctcagcctccgagtagctgggactacaggcgccaggctaatttttttgtatttttagtagagatggggtttcacatgttagccaggatggtctcgatctcctgaccttgtgatccgcccatctcggcctcccaaagtgctgggattacgggcatgagccaccgtgtctactctgtcaaccagaaaatttttaaatctacttataagctggaaatccccccaacccccttcaagttgtctcacatttctggacaaaaccaatgtattttttttttgagacagagtctcgctctgtcacccaggctggagtgcagttgcgcgatcttggctcactgcaatctcctcctcctaggttcaagtgattctcctacctcagcctcctgagtagctgggactacaggtgcccgccatcatgcctggctaatttttatatttttagtagagacagggtttcaccatattggccaggctggttttgaactcctgaccttgtgatcctcctgccttggcctcccaaagtgctgggattacaggcatgagccaccattcctggcaaaaccaattttttttttttgagatggagtcttgctctgtcgcccaggctggagtccagtggtgtgatctcgactcactgcaacgtctgcctcctgggttcaagtgattctcctgccttagcctcctgagttgtcgggattacaagcacacaccaccatgcccagctaatttttgtatttttagtagagacagggttttgccacgttggccaggctggtcttgaactcccaacctcaggtgattcgcccaccttggcctcccaaagtgctgggattacaagtgtaagccaccatgcccagcccaaaaccaatgtatttcttaaatgtatttgattgaagtttcacgtttccctaaaatgtctaaaaccaacctgcaccctgaccaccttgggcacatgttctcaggacctcctgaggcctgtgttgatacggacaggagacagggaaatactgggtagaagagggcagttccctgggaaagcccccgccctcaagcctggaaacccacggccctaaatgggaacaggcattcctgtttttgcacccaaaagttgccttttggtctgccatgtcccccgtcctgtacccatataaaccccaaatccctgtctccatgaggagacaaacagaagagcagaaggatggcagaatggtggggcagagagaaggagtgtctgaacaccaagaggagttcagctgggggacggtcagaggggagatcagctgctggacggccaaactccaagggaagatcatcttcccactccatcccctctcagctccccatccatcccactgagagccacctccaccactccataaaacccccgcattcatccttcaagtctgtgtgcgacttggttcttcctggatgctggatgaggacctgggtaccaagagggcactggctggttaagatttaagccatctgcagatggcaaggctaaagagtgcactgtaacacatgcccgcttgggcttcgggagtcgcagacacccacccctggatgctgctgtggggctggagcccaggggcactcatccccgctcctgcacctgcccgtctctgtgctccccctcctgtaaggggtttgaacatgcatggcggctcaacagacaagtcacacccttgttgcacatcctgcaagaggggtcagggaactctcccatttcagtgtcatgggccatggtcactgataattggcttagaataaatttctttcaatattttacagattttgactctttttgttgacattttccaaggttcaccgtcctttgagggcacactgtgttgccaccataactcagctggtcatgcctcgaatgctctggtggaagacccgcttggtgtcagttctctcaggtcctctcttttctttctcagtgaatgactttctggacaccatctccaggaccccgtccacttgcctccccaggtggaacccagctctgggtctctccaaccacttgttccctaggggagcctccctggccaccacccagctgggggccacccctccagggctctctccctggaaaggctgacctaggggtacaggctggggtggcagcccacccaatcgaagcgaggcatcccattcgtctcctggactgggcatcttttcagtagactcgtagtgtctagaaggtctttactatctgagtcatcaaggaaaaagctttgctcttggactgataattagtggcaagtgacatgtgctcataaaaacaccaaattagctcatctgcccacacagtgcctttcacccttgggtggtctcagaagcacctgcagagctaaaaaggagctcagcgccaggctcagtgaggtaggacagggctgggcctaggtgtgtgtatccagttccctgggtgactctaaaatgaccagtgtgagaaccacaggcactggccatctgcacaacagctgggaacgggcaaccagatctttgaaaagcccaagaaaccacaggcaaaaatgtactcaccacaatgacattttcagagtttcgatcagagccctctgtcgagaaggagggtcctggagcccacgggcctggaggctggtcagctctcttccatgcctcccctgctctttcctcttagtgcttgggaccaaaggtgtgataggatggggggggtgggggctggggatggggaagggaccatggatgatggatcaaagtgtggaaggacgaaatccactgcagagagagagattcatcaggcgctcctaagagccaagggcgagagactcacagagtaggatgagcaaagggtagtaagggcagttgttggtgctgcctttgtaggttcctggggctctcacccagcactgcttgtcaccaactctgtaacctctgacttctccttagtttgttaacttcacaatctataagtttgggaaaggacaggagaatttatttcttacaaagggttacagcctttaaggtgatgagacgggagagttccctggagccttttgctggacttgtgataggggtgtggcttgcttacctggcaccacgctctaactccttgtgggaggggaagcacgcaggcgagtgggtgcgagggccaggacaagcgcttttggactccagcctcgtggtagcatctaggggtgtgttacaattaattctctttattttattttattatttttttgagacagagtctctcactgtcacccgggctggagggcaatggcgcgatcttggctcactgcaacctccacctcctgggttcatgcaattctcctgcctcagcctcccaagtagctgggattacaggtgcacaccaccacacccagctaaatttttgtatttttagtagagatggggtttcactatgttggccagactggtcttgaactcctgacctcttgatccgctcaactcagcctcccaaagtgctgggattataggcgtgagccaccgcgcccggccaatgttagctattattaatggacaattatgactaattatgaagtactttcttttaaaagcctagatctctaagtaatgtcttcctccctcagtcctcagcacccgcctggtcgggcattgggtctcaccaagctacagagccctaggtgcgctgtgttaggtcaccaagactttagtctggtgatactgaccccagggccccaaatcaccatggctgcaagtctggaacccaaaggcctccgttccccggggtggtgcagggaagccgcagggagtgcgtcagctgtggagagcgcaggggtgggaagtgaaggctgtggggtcccccagggggtcaggttcgtcctcgaaggcaggccctccacaggaagacctggttggggtgggatcggacacgcggcccagacccaggcacctgtggatggacggccgggcatgtggccatcggctgggggcctctgcaggccgcgccaccagagtgggcactcagggtccgcaagggtctggggcgccccgagagaagcccgccgccccaggccggtgcggagttgactgggtccccccggccccgtgtctgtcagctcccgcgcggcccctgggaagggacgcggatcggatgcgggctccgggccctgcaggcagttgagagcgcggttcccttgggtatccggggtccggggtcactttcgcgcctccgcactattcccacgcccgcgcgcactctcgtggccatccgcgttgcgagagtgtcgcgcccggaggtcaggggcgtggagcccgggcccccgagtctcccctgcgtgcggcggggcgcggggcgcggggcgcggggcgcagggctgaggcggagcacaatggttgaatgaatgaatgaacgaacgaatgaacggcgctgcagagccctctccaggcggaatgaaagtgcaaacccagcgtttcgggcggcagagtggcgggggccacctggcgcggccgcgcggccagggtccggtttcgcttcctcccagcccgggggcggggcctgcgtggctgtccccgccccggtccgcccccggccagcccccggcgccgcgcggaactcgcgggttcggagccgcccgctgaggtcagaaggaggcgtctgcgctgatcgggtccgccgcgcgccagagccagagtcgcagccgaggggagccggggccggagcccgagcccgagccgagccggagcccgagcgagcggcggagaccgtgcccccgcctcggccccgcgccgccgcggccaggcccggcatggaggaggagtgccgggtgctctccatacagagccacgtcatccgcggctacgtgggcaaccgggcggccacgttcccgctgcaggtacgcatccgcccgcagcccgggcttacgtaacccgagcccgtgaccttggcggggctgcccgagacgagcctcagttccccgagggaggctcgggagctgcgggcagagcctggcgcgggcgccctggaggcaggcgcgggatgagcctcccgctctgcttggcttgcgggggcggaagcggagggctgagcgctctgcgggcccctgcgggtgggacgggtccggcgtcggggtacgcgggtaggagggagccctgtgcaccagctatggcgcagcygctcgtcctcgccccttcccgccgaccgggccaactgccgcgggggcgggcgggcggtgcggctcccggaggcgaggaaatgtcgcagagccccgaggagtcccggagcagtcacgcgagccgggaccttgccccgctggaacgcagaagcggccgtggagctcgagacgctcgcgcgctcacctcctgggcccctgtgcgtggggaagtcaggaagaagacgccgagtgaggtcacggtgcccacgagggtggattcccctcggcctgaccacgccaggaggtggccgaagggaagagggtggggcaggggctgctctgcaccctctagcagagcggcatccctgcaggtgtttgctctgacgaggagaagccccagagagcagttcgggactgtgcggattggctttagggagccagcttttaaaacgcgttggcccacggcctcctggttgcagctaagtggcccgtggaggggtaggagaggcctgggtgcagtggcgtgggtgtcacgcagggccgaggcagaaccaggacgacgggcacttcctggccttgtcgagtcagcaggagggctgggggtgccctgccgggtcgtgctctcctgtgctgcccacctgcggcctggtcactggggacgggagcaggtatgcctggtccctgtgctgggccccacgggatgtaaagaagggccacctgggcacggcggggcctgcggtgcgggctggcctgggaggaggacaggaagaggggagcagagcttcagtggaatttgagggctgacctaggcgtgcccccaggaggaccaagctgagcagagttgagcgtggaaaggcagggggttcgagtccgaagtaagtggaggtcctgttgggaaggatgcggtgcttcacaggtggtcttacttgagaccctgttccatccagctgcaggcagaccctgcctgggacagtcagggtgcaccggttctgtggctccggctcttaagcactgctctggaccactcctagcttgagggggttgggggaggtcaccacaggctggcggattgcttgggcagagtcagaggtaggattgggcttgggaagaaaggtgcagggtgcctgaagcaggggcagccaggcagtgtggaaccagggggctctgaggacagcgtccactctcttggcagaagtgtgcaggtcctgctgtgtctgtcccgtccctcctcccatccacctcctacttcattgggcaaactgtttccttctttggctcactcgggatcccccagcaatgtcctttgttctcgaactcccagtgactcgaggggtgtcctctgattgctcacctcaggtggagcctcgaaaggatggcgctgctgttcctacctcgggtctccccagtgcacggcatccttacctgtgggctccacagggttccatgcaggcattttgctcccataccccgatgtccaagcccggctggacaaggagaagcaatgtgatgaccgaggggctgagatggctggagacccagcgagcctggaccagccttagtgggcacaggagggaatgggggacagagcctggaartggccttggggccagtgtttgccgcttctagctgcagttccaaggggacgtgtccccaaagtctagagctgctcttgcaagagtttgttcttgattttgatcatcacatgtggcttaggactccaaagccttgttcacatagctgaatgtgaggaaagaaaacttagaaactggcagaacatagcctctggctgggccccagagatttgcctcaaggctacttggaatgagactggagaatgcctcaggggtgtggcatgtagcagggcggctggagaggcgccttatggggactgacccaggtgtctgggggtcccacctcaaagcaggtgtctccacatcttggaattccagctgagggacctggccctggtttctgagccttccggagtctcacctgcaaactaggcacaatacctgtttgcaagatagcaccagggctccttgtgcccttcatgccaggctcagggtacacctattgccagggagctcccactgattccttgtgagtgtagcacagatttgttgcgactggaccatctgcacgtctgggcttcagagctgttctccccagctgttttctgccaggtcctgtcagaggcagccaccctccctgggcagagcaaaaccttgagcctgtgtttggattttgtttctgggcctaagcctaaggtacatattagtggtggggaactaaaggagggaacatgttggcatgaccagtactggcaggaggtgcagtgtgtcaggcagcatgattggggtttgcagatagaacgcagagggcaagggcaggcttgaggtttgggggtgcatggaggagaggagctggggggctgcccaagtcaagcacagacctgcccaagacaggccatgggatgcaccctggggtggggcacttccccgctgctctggcttggattctagacaggaaggagtggagggaactagtggctgcggccatctgcccttccacattgctaggactgtttcctcttgggtgtaggaaacctcaggttcttccagggctgggaggtttggctctttggagccccaggtgtgtatgtgtggaaagccttcctggctatcagttcagcagctcacatgtttctgtaggcctcactgcatgggggagatcctggggccctcagggcagcctcccaaccccttttgctctattgcttccgtaaccctaaggtacacagctgtagggttatgtatgagtttgctggattgaaaataccatatgcagccttagggtcatgtaggagtttgcccggactgccaaaacaaagtaccacaaaccaggtkgctcattgtagcagaaattcacctctcatagtctgggggccagaagtctgagaccagggtgtgggcagggccatgctccctccatacaagggtccttcccggcctcttccagctctcggtggccccaggcttctggggctcacggccgaatcactccagtctctgtctctgtcctcacgtggcctccgcccagtgtgctctcttaaaagtccacttaacatgggattcaggcccacctggataatctggcatgatctcatcttggaatcttacatctgcaaagatactttttctttctttcttttttttgagacggagtcttgctgtgttgcccaggcagaagtgcagtggcrcgatctcggctcactgcaagctctgcctcccgggttcatgccattctcctgccttagcctcctgagtagctgggaccacaggcgcccgccaccacgcctggctaatttttttgtatttttagtagagacggggtttcaccrtgttagccaggatggtctcaatctcctgacctcgtgatccgcccacctcggcctcccaaagtactgggattacaggcatggggccaccacgcctggccttctttttctttttctttcttttttttttttttgagacgagggtytcactctgtcgctcaggctgaagtacaatggagcgatctaggctcactgcaacctcccccttccaggtacaagcaattctcctgcctcagcctcctgagtagctgggattacaagtatgcaccaccacacctgactaatttttctgtatttctgtttagtagagatggggtttcactatgttggccaggctggtcttgagctcctgacctcaggtgatctgcctgcctcggcctcccaaagtgctgggattacaggcgtgagccaccgtgcccggcccaaagatcctttttccaaatagagtccccttcacaggtttcagttaaacatatccttcgagggtccagcattcaatctggaaggagccttcagagaaatttgaaagtggcataaaccaaggggtgaattaaaggcccagaagttgatgacgtcaagacgtcctttttggaagtgaggggagcagcacagctgtgagtctccaaactgggctgtgcagagatygtcccaagcacgtctgaggccagtagctgccctgtggggagaggcaagcctgtcctgtcactgtgcatcccgtccagatggacaggtagtagattcccgctggctgggtgayatccgtgtccttcatctgtcagcctctggagccgccgaggctgggtgccaggcactgccgcctgggacacatgtgacctccgtgctgcaggaccacagtgcaggtgcgctttcacagggccgctcctagggaggaggttgtggacatcagacattccatgattggattccatggctttgagaatctcacttggggccttagctcgagacccatttaaataccacatcgcagagaccagaaggcaagaccatgggactccctgcagcccccaccagaagaccctgtgaggtggctggctccatctggggcctgcaggcagccgcattctttcattctcstggtccgtcggtgcggagcagacctgagacasctgagggggcttggcggaggttgtatttctctgtctaggggcctcaatgccatgcccgttaggcaggtggactgtggctcaagcgccccacaggaagaggcagggggctccctgccctggaaccctggatgtcagcacctgactcctacctgctgtgacattggcaaaagtagctgtggcagaggccgagggtcccacctgcttactgggccccgcttctccggacaggagcagaagctgcagagctttgggacctcagcacttgagcagcatgtggacgcgagcagcgagtaaccccgggctcccagagacgcgtgacggggtccccagggggttgcttgagggccctcaagtcaggagctgatttctatcctcaaatatttaagcatccccaagcccaggtgcggtggctcacacctataatcccagtactttaggaggccgagrtggggggatcacttgagcctgggagtttgagaccaccgtgggcaacatagcaagactccagctytacaagaaaaaaaaaaaaaagctggctatgtgactcacatctgtagtcccacctacttgggaaggtgaagtgggaggatcacctgatcccaggaggtggaggatgcagtgacctgtgatggtgccactgcactccagcctgggtgacagagtgagaccctgtctcaaaaaaaaaaaaaagtaaaaaataaacatgtatggaagtacaatgtatttttaaccagaaagttgacagagaataccgatgcactaggtagaccctgttttwaaaaaaaaaaaatcccctgctctgcaaagtggcctcttcttcagagatgtggcatcactggagggttctcttggggaaatggttaaaacacctggtgttggctgggtgcagtggctcacgcctgtaatcccagcactttgggaggctgaggcaggcggatcacaagatcaggagatcgagaccagtctggctaacacggtaaaaccccgtctctactaaaattacaaaaaattagccaggcgtggtggtgggcgactgtagtctcagctgcttgggaggctgaggcaggagaatggtgtgaacccaggaggcggagcttgcagtgagccgagatcgcgccactgcactccagcacgggcgacagagcgagactctcgtctcaaaacaaaacaaaacacctggtgttttgaaaaatctttacattttttcttagaattcctaggatagaaagagtcttctttgccttcagaactgcactataagatcctggaagaataccaccctgccttttaaaagacatcatttttgccttaacatttttcaaggtgacatgcatttgcaaacagtacaaaaaagccagcgctgggccaggcacggtggctcacgcctataatcccagcactttgggaggctgaggtgggtggatcacctgaggtcaggagttcgagaccagcctggccaacatggtgaagctccatctctactaaaaatacaaaaaattagccgggcgtggtggcacactactgtaatcccagctactcaggagggtgaggaaggagattgcttaaacccaggaagtggaggttgcagtgagccaagattgcaccactgcactccagcccctgcaacagagcaagactcaggctcaaaacaaaaaaaaaagaaaaggaaaggaaaaagagccagtggtgaaaagtgtgcctccttccttcctccggtggcccgcactaacttccttagaggtgatgctgatgctgtatgttggagacgcttctgagtgtcctcggaacgttcccacgtgctctccaggccatgctgggcagctggctttcctcccgtctagctgggattctctctctctctctctctctctctctggcctctgccagtccctgggtctgagccagaatgtgtcccaatccaggaaacaggtgttgtttctggtatttcttctttttctttcatctttctccaagaaggaagaaaattggctagttttttgcttttctgactcccttagtttgggactgaggtttctgttattcttgtttggctgtcatggagaaaaacaagaacttatcggtcccgttttccattttttctttttcttttttttttttttttttttgagacggagtctcactctgtcacccaggctggagtgcagtggcgtgatcttggctcactgcagcctcctcctcctcccaggttcacgccattctcmtgcctcagcctcccaggtagctgggactacaggcgcccgccaccacaccaggcaaatttttctgtatttttagtagagacagggtttcaccatgttagccaggatggtctcgatatcctgacctcgggatctgcccgcctcggccttccaaagtgctgggattacggctgagccaccgcgcccggccaatttttgtattttggtagagacggggtttcaccatgttggccaggctggtcttgaactcctgacctcaggcaatccacccacctcagcctcccaaagtgttgggattacaggcatgagccactgcacccagcctattggtcccattttctgatctatttttccctcttgcctctggctctagcccacatcggtgcatgtgtgtgtgtgtatgtgggtgtgcatgtgtgtacgtggtgtgtttgtgtacactgtgtgtgtatgtgggtgtgcatgtgtgtacatggtgtgtgtgtatgtgggtgtgcttgtgtgtacatggcatgcatgtgtgcatgtgggatgcatgtgtatggggcatgtgtgcatggcgtgtrtgcacatgtctgggcatgcatgcgtgtgtcatgggcatgcatgtgtgtgtatgcggtgtgttgctctgcaggccccagtgttggccggcccccccgtctttcctgtaagtgacttccttcctaggaggcttggtgtgactggcattccctggaaagggaggggcggatccgcagaacgggcagcttcggggacacaggggctgctgattggcattgtggcttgttggccttggtgtctgcgggtgcacacccacacagagcttttgaaatggaatcctgcgtgcccagttcacagagtgagtgacgctgaggaataagaacagagggaacttctcaaggagaaaggaagaaaggagttgtcaaagatgggctgagcaaaaaaccgtgcaatcagccgaggaggggccggcagcgcctcccttcctgcccacagagcagccgccttgtgcccrtctattccccggctctgcatggggcctctgttttaaagggttctgtggccaagacaagcctgccagcccctgtccctgtccttggccactcctccggcagctttccccattcctgaagcaggtggctagcctgcttagcctcttgtcccatctccttacctgtgacagtcaccaagcctctgggaatgtggtcaccctaggacagctaaacgaggaagctgtgcagtgcacacaggtttggctgaccccaagggccagttgctgtgcatgggagcgagttctaaggggtgggagggagccagcactaggtggagctctgccagccggggcacagggaggaacagcatccaggaggagggtgcagcgggtgtgaggccctgtggagcagactctggagctagaataaggtggcatttttgctgcacgctgtgggggtggacggggcccgaggtcacaccagggagcccatattgggtcaggaatgctgctttggcaatccctggactcagcccccagctgtctggccatctgggcacttctgagccagccatgacctctgccttcccttagcactttgcagtgagcccagcacctggcagcccctgcccagctggtgcacggtccctctgcggcactgtgagcctggaagtagggagctgggtgtccatgtgctctgagcagggctgggggcccaggcgatggaccctggagctgtgaaggctgaggcaggggtgggtcagggatgaggggagactgctctggggggctcggggccatttccaccagaagttccccctgggagtttgtaggacaaaggacatggttgatgtggatcatagggctgaccagtggcaggcggtgggagggacgcggggtgcttgtgccccaggttgatcagggtgaagcagtcacatgatctctcctgtcctctttcctcattctggtttcctaaagtggtcagaggtctctgcaaaataagctaaagggagggttctgctgggtgggtggcttcggcttctgtgcagsgctcaccctgctctcccctggaacgcctggaactagggtggtcaggctggggtggaggagctcccctggaatgttccagagcttcccccactcctgccgttctgagtcaccctgcctccccggaggaggaggaggatcagctgagccgccgcgctcacgtagtgtctggctgtctgcctgtctgcctcgctgtgagcagagtgggatgctgccgataaggcgcgcacgtgggccctgggaggagcccgaggcagccactcccgcacgtgggcaggaggagggctgctcacaccaccggccgagggaggaggactgcgggctgcgcctgggcaggggatgagcttgtgtcgcgggcggcagggggaagggagtcggagagctcctgcggtccagccggatgactgatgaggttgaaagcacttccgctgcggcccccgcaggaagttcccaggaggaagttgcgaccctttctaagccatcccactggcctggactctgctgggattattttgaccccccagggcagagtgtagccatctgactggctttctctctcggcaggagacggggcgcacgcctgcaggtgggggagccccaatacgtcacacggatgagcggggcaaagcccagccccccaccccgcacccgcccgcccgcaatcctgccccctggctgcggcctccgcggctcttcccaccccggctccgctgggtgctyggcgcttgtttacggagttacaccttgcggtagaggctgagcaggagcttgtccttcagacttcccagcggagacagccaggctgtcctgtggcagcagtgggtttgycagaggccgggggctttggccagggccggcagagagccccagtcctgaagaaccctcgttcttcgcgtgctgtcgcgggggctccgtaggcacggttgcagcagggtcttggaggccgaaagaaggacggtctgagctgagagaggggagttggccaggcacaggggtttcagagctttacaggattcagaaggtgcccggggttctgcagcccagtgaggagttcacagagtggtgggcgacccagcagccaggggcatcagccgtgggagtgggacgctccgggagtctgagctgcatcctgtgggcgcagcagacgctcaagggctgggtttagaggggtacgtctggaggtgcgggtggggaatgcacatgaggggagctrggagcagaacagtagcacgggccgagcacgatggctcacgccttgttattgcaccactttgggaggctgaggtgggaggatcgcttgagccccggagttcaagaccagcctgggcaatataggcaatatttctccacaaaaaataaaacataaaaaattaaccaggcatggtgacacatgcctgtagtcccagctactcaggaggctaaggcaggagaatcaattgagcccaggagggagaggttgcagcgagctgagattgtgccgctggactccagcctgggcaacagcatgagatcctgtctcaaaaaaagaaaaccaaaacaaaacaaaaaaaacaaaaaacaaaaaatggtagcacggcggcctaataagaccatcccgagaagggggatgaggtgatagtccacaggcctcagtggaccgtcacagcaggtatggacatcagagagtcttgctcatatctgattgattgattgattgattgattgatttggtttgatttgaatttttttgaggcagagtctctctctgtcacccaggctagttgcagtcttggctcactgcaacctccgcctcccaggttcaagtgattctcctgccttagcctcctgagtagctgggactacaggcacgagccactacacccggccaatttttgtatttttagtagagacggggttttgccatgttgtccaggctggtctcgaactcctgacctcaggtgatcctcccacctcggcctcccaaagtgctgggattacaggcgtgagccactgtgcccagccctcatatctgatttagagtatgtactgccaagctccgtggtgtgaatacttccactatagctgaacgtaaactaccaacctgagcaggaaagagctgtgcagcagcctctgtcatgtagcgttcttccctccagacacaatagacacaaatagctgagtagacaacagatagtgtaaaatgctagtaaactaggaagtggtgaggctacaatatatattatgtttacttttaatatagtttatgtagtctgggtgcagtggctcatacctgtagtcccagcactttgggaggctaagggaggagaattgattgagcttaggagttcaggactagcctggacaacatagtgagactctgtctcaacaaaaaaatataaaaattagccaggtgtggcagcacgcacctgtagtcctagctactcaggaggctgaagagggtggatcccttgatcccaggagttcaaggctgtagtgagctatgattgtgccactgcactccagcctgggtgatagagtgagaccctgtctcaaaaaataataatataatttacataattgtaagttttatgactcaattttttttttaaatagagatggaatcttgctatgttgctcagtctggtcttgaactcctgggcttaagtgatcaatcctccagcctcagcctcccaaagtgctgcgatcacaggtgtgagccactgtgcctggccatatgactcagtttttaataatgactctaygtaaaactgacctgcactattgcatctggcaatcgcgtggcccaatccatcttcaaagccagcaacagtcrttgagtccttcttttaacttccaatctctgatttttccttctgcccttcagcctgagaaaactctgcttttgaagggctcatgtcattcaattaaactctcctggataagaagatcctcatgggagagagatctcatcacactgacaggtttcacccacactcagggggttgcccgagggtgagcggggtccctgaaggtcattcttagaattctgccacggaagagccccataggccattatagggacagggtttactgtaaaacaaggtgattcacatacacagaccagtaatgctgttcctaaaggggcccaagctgatcccatcagtcagcagggctgctcacagggcacytggcctgtctttgttgaaggcgattcctgtgaaggcagtggaggagctccgggtgggaggtgagtgttgtggagagcccagcagcccgctgggctgaaccttggaccaagaaccagtctgtccttggctcccttgtgggtggggaaagatgaggtgtatcaggcarggtccagtccagaaacagaaaccagagcaacaatcgtagaggccgttgttcagccaggtattgagaaaatagagaaggcaaaaagggaacactggtgtcgtggaggagacccctgccagcattggctccacacagctgaccctgggataagagaattgttggactctttagaacctggagctgggaaggcaggtgtctgccagctggcgggtgctgggagtctgtgggggcatgcgatgaggaattctgctggtggagggaaagccacaaagtggattccgctgctgctatgggaagggacggtcactaccgctgcccctgtggggagaagagccccgggggaagaagagcactgctgacagaagcccattctcttcgcaggcttcagtttcacattcttggtacctcctggtggtgcctgggagggagccactgctgtacagagatgccaattccagaggcatggtccggcacagagcgctggcttccagctgaaggacatgtgtaacagcaggagatacctttctctggggtcccaggctcccgtcctggaccttggcaccccgccccccgtgcattgtcgtcttctgagtctggctttgtctggcacatgaagttggatgggtagactctggaagcgtccagaccagcttgcgatgctgatgaataagctgattttgatggggtgtgtgaaacggagatgccagcccaggggctcagcttgctcgtgctctcatttaaaagcagaaaatagcgacttcattctcggatacgtttgccagccccaaaggattaattatctacacacccagaagcagtggagcagaatattttggcaggattttcaggatttgtgtcatcrttgcttaatatctgtttcttcacagtcggttagaattttaaaggatttgaaatactgcaagctatctgtgtatagaggctgtggattcgggctggtacatttgcaaagtgcccattttattttttatttttatttttatgttttttgagacatattctcactccgtcacccaggctagagtgcagtggtgccatcagggctcactgcagcctccacctcctgggctcagtgatcctcccacctcagcctcccgagtagctgggactacagacatgtgccaccacgcccggctaatttctgtattttttgtagagacagggtttttgccatgttgcccaggctggtcttgaactcctggcctcaaactgtactcctacctcggcctcctaaagtgctgggattacaggcatgagccactgcacctggccgcaaaaaaagttaaagtgctaactttaactttttagattagtaagactgctaacgtgtttcattagttcagtgataataccggcttcaaagaaaagccttggcaaatacaaatcgtaagcagatagctcaactcatcatcacaaagcaaascccacccagtgaagaaacaaatgtgggaagccccggaagcccctccccatccccacccccccccccgccccccccgccctggaaacagccgctgtcctggtgttgacagcagaggtggcactgcctggctttgaacttgaaggtgggactcaggggtggttggctgttcagatgcagcagggagagagggtttggggcattgctggtgcacgggagagggtggggatggccccccaaactagcggaggccgggcttggccctgggagatacaggaaggaggcccccactccgtggattccgtccttcctctccatctgtctggaaccctcaccctctccctccctctctgtcctcacacacccactccctgactctcactcaggcttttgaggcatgtgtgctgcccgcggagcccttggcctgacttcttccaaggggtggggtagacgcccacattttcacagcagagacagcctcccagcctctgttcagtgtgtggacagatgggtattgccttcgttttattgtttgttagtcttattgagtgctttcgctgggtgcgatttctggaatgatgcgtgaagtgcttccccatggaggtcctgtgggctgggcgatgccctcccgggctggttgctccccagagagggaagcccagctccagacacacaaggccctgcctgtgcacatgtcatgtgtgactcggggagagcctcctgctctgatgcgtcagccctccagcctgcagctgggggccccgtgccagccgggactcatttactcccctcttctgagtcagcacctgctggggttcgtgggaccccagacctggctctcttacgcctacctgttccttctctgtcttgcaggttttgggatttgagattgacgcggtgaactctgtccagttttcaaaccacacaggtaaggcgttggctccagcagctggcatagagcagactgtgggtgtgagggacggggcggagtgtgggtgtgagggacggggcggagtgtgggtgtgagggacggggctttcgtgtggacggggacctggagtcctgggygtcgctcgggcagagcctgcacagcatatcagggtgtaggcctgggtggcctcgcctctgagaggggttgtgttgactcagcttggctgctttgaggctgtgtgacccagtgcaggtggcagaacctctcggtgcttcagtttccttctctgtaagacaggagggcaatcctaacacctgccgtgaggttgccagagttgattacgtcacttgcataaaatgcttggaccaatgcctggctcagagcgcagccgtgtgactcctgctgtccacctgcctcctggagctgaggagggtcccccatggggtggtcgtgctgggggatgtgtaggtggttctgggttttctctgttaacagcagtgctgcagggccccgtgtgtgcctctgtctccctgccctgggactctgaggactttgctggctcaggggactgagggtggccggcctcagaagcccctcacaggccatgctttccatgcccccagccccatggcctgggggtggaggtgcgtggagtcccccctcctctctgtggtttctatactgcttcgtcggcaggagaacaaagctgttctgttctttgaaaccccacctcgcttcccctgaaatttctctgaacccaggcggaaccttgggagcacagaacgtcccagaaacagcctggcagagcatcagtgcgatatgttggagcagggaggaggggcctggcccctactcttgggagtgggaaggaatgctgtggtttcttttgaggtgggcatgacacgtgctaagtgagaggaaagagttgcttggccggtgcagacggacaggctccagctcttggcggtgcagatggacaagctccagctctcgctgaaaccctttcctgcctttgcttgcggggcacactgggtgctgtgagatttggagacgtccccgaagactcaggccctccaggagcctccctgaacccacatgtccttcctggctgctctcgccatcctcctttaggatttatttttcagtgagtgagctggccggcttggacactaaagcagggtgttgagtgtgtttctggggactgtgttgggctccgtcagtgctggttcaacatccacaccgacccggctgcccttgcatggattccaggttgcgggagggccccgggctttggcaatgccttccaggcttggtggaagcttctcagtgggtggtgggctggctgacccgagggcccagagatagaaaaggggtctctggtctgccctcaggggactgggatgaggacaggaccccaggcgcttgggagcctccacagttgcagagccaggcagacagcctgggggtgtcccttcccatggggtccagcctgtggttcctgggagcccccactccagcctcctccagatgccatggggggcctgctggtttaggaccccttagccagctcagtctatggctgtgggctggctcccagccccctgtacccacactctcggggtcagctgtctgtgcggcctgatcaggaggcccccgggtagcttccctaaggctgtctctgtggctcaggggcaactccctagggcagtgagggcaggtgtcactctcccctgcaccggggcccttctgcctgctccccttccctcgcccctgccacactgtgctgctggggagtgaggctggtgcatcgtgtacctgccctgggtgccacgggagctggtggtcaagacgggggactcggcctcctccgtgcagcccctcagcccctctgggctcccgtgccacccactgtgagtgcggtgcccacgatgacactgtctgttctgcagaccttgacagagctggaggcgctttttgttttttgagtttttttgttgttgtttttcctttttgttccccctaccctctgtctaagggctagaggtgcttatttttcaccaaactcacctccaggaagcattttactggtcctgattatgcacaaagaaagatgtctgcatgcacgacgggcctcccgcattgtaggggctgttctgctccgggcacccttgttccagggctgcgctccccgggctgtctcaggggccacgttgtcatgttcctcctgctgcgtggcccatcgtgcgtgcccaggaccagctcacgccctgtgtgaccggccacgtgagcccagccacaagcagccgtgcggacactcgggccgtttccactttttggctgttggggtcatgctgccatgaacgtttgtctcagttctccagtgagcacctaggagttgaaggtggggttgcacaggctgcgcctgatttggcagggagctgggatgatgctgccagggagctcattcgcgactctgcccagggttttccttttcctttttctgtttttttttttttttttttgtgagacaaggtctccctctgtcattcaggctggagtgcagtcctgcggtcatgactcactgcagccttgacttcctgagctcaagagatcctcccacctcaccctcttaagtggctgggtctacaggtgtgcaccaccacaccgagctaattttgctatttttcatagagacggagtctcactatgttgcccaaggtggtcttgaactccttgggctcaagcgatcctgccccctcagcctcccaaagtgctgggattacaggtgtgagactccacgcccagtcttttcttttttcttttttagagacaaggtcggtctctgtcgcccaggctggcgtgaagtggcgcaaccagctcactgcagccttgacctcctgggctgaagcaatctttctgcctccacctcccgagtggctgggactatagttgtgcaccagcacgcccacctcctgcccagggttgttactggggtggtcacgtgggcagcttctgcctgggatgggccacaaagccagactcccggcagggacacgggtgttccacacaagctgcgttgttggttccctgacgcccttcaggctggggggtgggaaagccgatcccccaagtgcctgcagagcccacctggcgcaggcctcgccgcctcgaggctgctgctcgcacttctgccccttcccccggccaggcccccgttccttgaggccgtaccacaaggtgcgttcatttttccacaccgtgagctgggcttggcagagcctccaccttgtggccagtattcccagtggcccctttgagaggatttcctggagctccctgtctgagcttcccggactgagggcactgggaaggagcctgcggagctggaggtcagcgggtggacgggttgcgctgtcctggctttcggagtgtagagccagaggggatgggacaggtgccctgctgctgggcttggtggtccctgctgcagggaaggggcagctggtgtgaacacaaggagctgcggggctggagaaggccagggccaggagcctgccgacggacaccagcgaggggccaggccgggccaggagcctgccgacggacaccagcgaggggccaggccgggccagactccctggccggctgggatctgacaggagcgccaggctccttgggccgcccgaggaaccgcttgtttgcctgtgctttttcatctgtaaatggaatgagttggacacaagatccaagcgccctcccctgttggagaaggttcttgtgggctctgggcccatcccacatcccacagtgggcaggaggccaccaagaggtgcaagaccatgccctctgtttcgataggaagctgggcctcagaggggcctggggcctgtgtctgagacccggccaagtgctggacgtctccccttcctcatggctgttatggctgaattacgtccccccaaattctcatgttgcagccttaaccccagcacctcagtgtgggactgggtttggagatggagcccctacagaggtcagcaggttaaaagaggccatcagggctctgggtgggccctgatccaagctgcttggtgtccttgtaagaagaagagatgaggacacagacacacacagagggacagccccatgaggaaacagggaggcaatgccgtctgcaagcccagggcagaggcctcaggaaccagccctggtgacacctggaccttggacccccgtgcccaggacagtaggagaattggagccgcctggctgcagtccttcccgatggcaccctgtattagtccgttctcacactgctaattgttgggaaaagggcttgtggaatgcctgtataaactggccatgaaaatatgggacaataagttgtggaaagccacaagaggcctctgaggaggaaagcctcctaattgccatcatgttcgcatgctcagggcgagacctgctgtcttatctgtaaacaccgtgttcaaggagaaagacattccttcgaagcactggactgtggacagacacacgggctcctggttaagcccgctcccaccagctcctgtccgataagttaaagatacgctgtttgagcacaaaggagattcattgaaaccgctattgctgtagattacgcctgtgacgcactgcctccctttcactgtttcgccctgaayatctgcttctcagatctaagtgactgtactcaataaatagcgtggagaccagagctcagtgccttttgcagcctccattttgccactggccccctggctcctacctttatgaactcttttctttttctttttttttttttttggagacggagtctcactctgttgcccaggctggagtgcagtggcgcgatctccactcactgcaagctccaccccctgggttcatgccattctcctgccttagcctcccaagtagctgggactacaggcacccgcaaccacgcccggctaatttttttgtatttttagtagggacggggtttcacagtgttcaccaggttggtctcgatctcctgacctcacacaccacgcccagctaatttttgtattttttagtagagatgaggttttgccacgttggccaggctggtctcgaactcccgacctcaggtgatctgcctgcctgagcctcccaaactgctgggattacaggcgtgagccaccgcacccggccccacctttatgaactcttaacctgtctcttctcattcctttgtcactaccggacgttggatacaccatgggtggtgttgaggctggtccccaacactaataaagacatacctgagactgggtcatttgtaaaggaaaaaggtttaatggactcacagttcagcagagctggggaggcctcaggaaacttacagttatggcagaaggggaaacaaacacctccttcacattggcggcaggaaggagaagtgcagactgaggggcccagggttttaaaagccccttgaaaccatcagcttttgtgagaactcagtcactatcatgagaacaagatgggggaaccacccccatgattgaatgacctcctgccaggtccctcccacaacatgtagggattatgggaactgcaattcaagatgagatttgggtggggacacagccaggccatgtcacctccccaggaaaggagcacatgtgcagcagtggtgagtcccaccctgcctggaaagatatcaaaatccgagggcagaaaggaccaggagggaccattgctcacctccctcctcctaccccttaccccaaaccccgccccagcctggcagaagcctcctcaggacacaccctccaccggaggggcaggctgctgtgtgaggcactgacctcgcccgcagtggataccacctgcccctcctgaccccagtgactgttaacccagagtccatcaggggcttggtctctggcagacccacccctcagtgcgtacactctggtgtcccgggcagagtacagggcaggcgcccccaggtgcaccccccagatgccgcactgtgcctggagcgtggctcctgatggcagtctcaggacctttgcgccacacgtcctcccgtgcgacggctsctggggaaagccaaaggcgtcccttccagcgggagccagcgactggtacgcaggagggccctcaggggcaggagccatggagccctcctctggtgtgggaattcaggggatcttagccacagggcatggcgygtgggcgcagagccggccgtgacccacaagtgcgtgatacttgtactttgctattctaggaacccatacatcagttttccttatttgctgaaaaaggcatgcattagaggggtgattcatgtgggaggaggccgggagcccctcgatgtgaggcgtttctcatgggcgaatgtggggtatccatggtggacccccaccctgtgtggatggctgccccctgagcagtgctttgagctggagctgtggtcaggttccgcagtgcaggaagggctcccaggaggctggtggtcccgcctgcaggaagccgacgcgtctgtcctcacacattgatatgcctgtctgcctgggacggacacttcaccctggctacccatcgggccaagggcaggttgtatacacctgggctgaggcctctttctcattcacatctatctcttgctcaggagttgatctaagacaggctctaattgcaccttaataagcttgttggggaggagttgggggtggggacataacaagccctacctgccagggtatccgggtgacagtggccggtggccgagcaccccggcctgaatagctggggactaatgcaggagacgctgggaaacaagagactgtgacgttgtgcggagggagtagccaggggccttccggacagcaatgggggagcaacgcagccgtgagctggtgtgtctctccccacgctcctcctgtacctgggacgcagctcccgcaggaactggcagtgggagtgtgggggccacggaggtcgtagtaaccatccctgacagtgcaggggcggggggctcgcgggggggctcgcggggggctcgcgggggggctcgcgggggggctcgcggggggctcgcggggggctcgcgggggggctcgcggggggctcgcggggggctcgcgggggggctcgcgggggggctcgcgggggggctcgcggggggctcgcgggggggctcgcggggggctcgcgggggggctcgcgggggggctcgcggggggctggcggggggctggcggggggctcgcgggggggctcgcgggggggctcgcgggggggctcgcggggggctcgcgggggggctcgcggggggctcgcggggggctcgaggcgtcccatgtgggcagccgttgggacctgccaagcactgcgcctagtgatctccttcgggtttgagccagtccatggggaggagccgtccaccaggcagcctcagggagagtgggcgggtgtcaagggaagcccacggccccagctggcccccttgtgtctgagcccccatggcttcctctgcctctaggctatgcccactggaagggccaagtgctgaattcagatgagctccaggagttgtacgaaggcctgaggctgaacaacatgaataaatatgactacgtgctcacaggtaggtgcmggagcaagctgccgcaggggactacgcaccccactccagccagggtgggctcagggaggtccagagcacccccgccctgggcctgtctcgggtccctgccccttcaaggagggccttggcgtgcccaagccaccatcacacccccggtagcctggggggtcctggccacactatgcctgccgggacaatgactgcccaggctgtgccaagtcacccccactcctgtgaccacactggggttccagtgcccaggggagggtgcaggcagggtgttgggaacgctgaccggggcaggacaggtgggtgggacactcaattasgtgacgggctgctacctggtacactgccatcctttgtcaactttctggttaaaaaaaaattgtatttgtatacatgtttattattattattatttttgagacagggtctcactctgtggcccaggctgtagtgcaatggcacaatcatagctcactgcagcctcaacctcccaggctcaggtgatcctcctgcctcaacatcccaagtagctgggagtaaaggcgtgcaccaccatgcccagctaactttttgtgggtgtgtgtggagacagggttttgccatgttgcccaggctggtcttgaactcctaggctcaagccagccacccaccctagcctcccaaagtgctgggattacaggcgtgagccactgcagccagcctggtttctacacttttaaatggttaggggaaacacttagcctcccaaagtgttagaattacaggcgtgagccactgcgcccagcctctctacatgtctaaaggtcacatataaggccaggcacaggggctcgaacctgtaatcccagcactttgggaagactaggagggaggctcgcttgagaccaggagttcaaaaccagcctgagcggcatagtgagaccttgtctctacaaaaaaatttttaaaaattaattagctgggcacagtcccagctactcgggaagctcaggtgggaggatggcttgagcctgggagttcaaggctgcagtgagctatggttgaaccactgcactctggactaggggacagaatgagaccctgtctcaaaataaataagattaaagtgtcatatgcttattactgaaagtagaaatataaataaaggaaagatcactccttcacctctcgcccgtgggttcattcctgtgaagcacagcgtttctgttgagaaatgctgccgggtctgccctccgtgtctttcaactgtgaggacacctcgtttgcacccacctccctccccccagctcctgagcactgtggggacacctcacctgcacccacctccctccccccgctctgagcactatggggacacctcgcctgcacccacctacctccctccagctcctgagcactatggggacacctcgcctgcatccacctccctccccccgcccccagcactgtggggacacctcgcctgcacccacctccctccccccagctcccgagcactgtggggacacctcgcctgcacccacctccctcccccctgcccctgagcactgtggggacacctcgcctgcacccacctccctccccagccacccctctgcagggtctgctggtgcttctctttctttgtgccacagttgatcgtggtgagtctcctgttttctgrgggtgacctggattctccccctaaaggttatacgagggacaagtcgttcctggccatggtggtggacattgtgcaggagctgaagcagcagaaccccaggctggtgtacggtaggcaggggcccaccctcgggtctggctgtgtggccccacacgggtggggctggcctgggagcccgggaagggacgtcttagcctccttcctcctctgcacgcctccgtgccccgcctctccgggccagtgaattgtgtctgctgggcctctgaagatgttggcctgctgaagtccgctgggctagaagcgtttgcaggtgaccctggtgtcttgtgtggctggtgtgagacaggaaggggtgtcagtgtgctcgtatagtggggctgctgtgtgaatgcctggggcccaggcagcactgttgtgtgactacactcaccctaaaggcggaaggggcaaggggccacacccaggcagggccaggctagggagtgggggagggcagggtcatacccaggcagggccaggctagggagtggggggagggagggtcacacccaggctgggcccgctagggagtggccaagtctttggggcatctgccttgatcggtctttcgttagaggccaggcagtgctggatccatcttgacgcctggcagaaggggcagcgtcaccaaaccttgcagacaggctctctctggggcacaggtctcccgggtggcaggaggacaggcctggcctagcacatggtttgccacgctgtgtactgttgcccaaaaggagagtgcttgtcggtacagacgtgtgaggcccggattgtgtgtgctcgaggccaggaagaggaagggagctgctgcacctgcttgggtgacaaacagtgatgaatagcacctcacagcaattaggatgactgtcatcaaagacacagaaaatagcaagtgtgagcgaggatgcagaaaccctcatgcacagctgctgggagtatgaaagggtgcaaccactgtggaaaacacgttggtagttccccaacaagtggaacaccatcaccatgtgacccagcaattccgccctgcgcatgtatccgaaatagctgaacacagactcaagcggatgtgcgtattcccacgtctatagcagcgttgttcccagtgaccaaatgtggaaacaggctgtgtctgttgatgggtgatagacaaacaaagtgtccgtacatacaatggagtattactcagtctggaaaaggaaggaaattctgacacactctgcaatgtggatggcgcttraggacatgatgcttagtgaaagtagccagacaccaaaaagggagactgttacacgatcccgctmtctgaaatagctaggaaaggccagttcatcgaggtagaaagcagacgaaggctcgtcgcggctgggaaaggccagttcatcgcggtagaaagcagacggaggctcggtgtggtggctcacgcctggaatcccagcactttggatggctgaggtgggcggatcacctgaagtcaggtgttcgagatcagcctggccaacatggtgaaaccccatctctaataaaaatacaaaaattagccaggcctggtggcgcacacctctaatctcagctactttggaggctgaggcaggagaatcacttgaacccgggaggcggaggttgcagtgagccaagattgcgccactgcactccagcttgggtgacagggcgagactccatctcaaaaaaaaaaaaaaaaagaaagcagactagacgttaccagggcctaaggcagggggagtggggcgtgagtgtatagtgaggacagagtttcagtttgggaagatgagaagttttggaggtggatggtggtcgtggttatacacggtgagaatgtcctgaatgctcctgaattgtacgcttaaacatgcttacactggcaaagattatggtatatattttttactatattaaaaagttaaaaaagggaagatacctacttcaacttggcagcttaaaaaacaagaaaaaagaaaaaagccaaatgtggttgctcacacctgtgatctgagcactttgggaggccaaggtgagaggatcgcttaagcctaggagttcaaaaccagcctcggcaacatggtgagaaccyatctgtacaaatcatttaaaagctagctgggtgtgctgctgcatgcctgtggtctcagccacttgggagggtgaggcaggaggatcgcccgagcctggaagatcgaggttgcagtgaaccatgattgcaccactgcactccagcctggacaacagagcaagaccctgtcttaaaaaaagaagaaagaaatgtggagggtttcttactcgtcagctgtagcctttgctgataagatgcccttgtgtctctgcagtgtgtgatccagtcttgggtgacaagtgggacggcgaaggctcgatggtgagtagtttcacgtgtgtgatttaaaagtgtggtgagtggagctattcctgtccagccagaagacaggcccacatctctaagtgtctaactcggtgggactcctctgtccaggggtaaaaagacaaaccttgttaggaaggagaaagggaaccgacatattttctgtaaagtgcctgacggtagataaatatcgacacctttgccggccgcacagccttgccacagctgttctcattagagcacagaagcagccacagataagaggtgtacaaacatgatgacttcttttcttttctttcttttcttattgagacagagtctcactcagtcacccaggctggagtgcagtgtcatgatctcagcttactgcaacctctgcctcctgggctcaggcaattcttaatgcctcagtctcccaagtagctggaattacaggtgcacaacaccactcccagctaatttgtatatttttactagatacgatttcactgtgtcgtccaggctggtctcgaactcctagcctcaagtgatccacctgccttggcctcccaaagtgctaggattacaggcatgagccaccacgcccagccatggatgactattttctaataaaatttcatttgtggacactgaaatttgaattttctataattttcatgtgtcacaaagtgtcattctttttttggcttttttcccctaaccatttaaaaatgtagaaaccagactgggtgcagtggctcacgcctgtaatcccagcactttcgggggccagagcgggtggctggcttgagcccaggagttcaagaccagcctgggcaacatggcaaaaccccgccatctctaatcaaaatacaagacaatgagctgggtgtggtggcacctacctatagtcccaactacttgggaggctgaggtgggaggatcacttgagcccaggaggtggaggctgcagtgagctgagatcgcaccgctacactcactccacagagcaagaccccatctcaaaaaacaaaagaaaaatctagaaaccacttaacccatgagctgtgtagtaacagcagcagctgcagcccacagacctggacgtcggatcaagtggatggagaacaaatccactgtgaccagtccagaagcctagaatttagaggcggaaggaacccaaaggtgatcctgcctgtgggtttttaactcagccattcagcgcccaggcgatttcagtatctgccttctttgtcgttgtgtctagggtgtctgtttgcttgctgtatattcactgagcacagcgggcttctccactggcacagggcacgcctgggcctgtgccctccctgccccgctgggtcagtggttgaagtcaggatatctgtcactgggcatctaactgggtggggcgggctggtgtgctcagcgtctgtctgtccactttctcccatgcttgttctctggaaggttccctgtcctgcgcccagcctgcaggaccccagcttgcagctccctgccttcccttcatggtgctccctggtgtgggctctgctgaccctcggcagacacttgcgtttggatcacgaagagttggggccactgtccagttcagtgcggctacgggatctggcccctcgattttgatcacatttgttttcctgaacaagagtggcctaaacacgagctcctgtctcagatgagcggtcaccccgtatctcccctttccgtgaggttaaaggggtgtgttggccctccctacccaaaatggggctctaaagagctttccttcgatttcctggtccagggatcggggacatccacgtgccacccacccatccttagtgcctcctaagccatgtctggagcagcggccggcgtgtgaccactttgtgtgctctgagcaccaggtgcagacatgcctcctgtggggcctctgatctccaagggaggtttccgggagcaaagtgaagtgaagggattggaaactcaggccactcagccagcaggggctgctgaaatgttccatgaagcccacagaattcttccagagcttcgcactgcctccggcttaaatttgatcgctaaagaaaaccatgtgttgcctggcacagtggctcacgcctgtaattccagcactttgggaggctgaggcgggtggaccacctgaggtcaggagttcgagaccagcctggccaacatggcgaaaccccgtctctactaaaaaaaattagccgggcgtgggggcaggcgcctgtaatcctagctgctcgggaggctggggcaggagaatcgcttgaacccaggaggtggaggtcgcagtgagccaagaccacgccattgcactccaacctgggcaacaggagcgaaactgtctcaaaaaacaaaacaaaacaaaaaagtgttgaattgtttgtcaggcaacttagacaaaaactagatgaagggtgcattgactcagccaggaagagctggcgggttgggctcccagtcgcagatggacatggccagcacccccaagccctcaccagatgaccagggctgctccatccacctgtggggtttccctttcctcgtctccctcctccctccctccctctctccttcacctccttctcctcccagacactctgtggggacccactgtgcgccctgagtcctccctcggcccctcggagcacttagggttccccactctagtgtgcctcggccacacgctgtccccgtggtgggaacaacttatcgctacagtcggggggcctggcccctgagcctggacttcagggggcttttgggggagcactccgtggtgggcttccctccgcgccccctggcgtgcttccctcacggtgactcagcctctcctcctgtctcctttgttggccagtacgtcccrgaggacctccttcccgtctacaaagaaaaagtggtgccrcttgcagacattatcacgcccaaccagtttgaggccgagtaagtcattttattttattttactttatttatttatttttcargatgggtctcgctcttgtcacccaggctggagtgcagtggcacgatcacagctcactgcaacctctgtctccggggttcaagcaattctcctgcctcagcctcccgagtagctgggatgacaggcgtgagccaccacgcccggctaatttttgtatttttagtagtgacggggtttcaccatgttggccaggctggtcttgaactcctgacctcaggtgatccacccatctcagtcttccaaagtgctgggattacaggcatgagtcatcgtgcccagcagagtaagttattttaaatggcaaatgctaccagtctttccccagggagagctgcagagaacatgccagaagggtctccactctgccttcgggctgcctgtttagcttacgaagtggttctcaggaaggtcctgccatggggcgagtgccccttgatactggagcaggatgtggtgggggcgcctgggttggagaagcccctgcccacctgggtcccaggctcacgtcttctctttggtggtggcagccatgggtgatggggatggttttgctgcccctgtgccttcctgagcggcagggcccctgggagaggaagaggaggggcgacctggggagctgtgggcttgtcggggccaccacagcagagggagggtgggggcagcacaggcggccaggtcacctgccgccctgtgaggggaagaggagtgtgttgggcttggctgtctgayaccgagtttgaaaaggtctttctttgggtgcatggctccccccagctgaagaatcacacaccaggggaagccaccagcgccccagtgccatgaagagtggagctgcccgcggagggggctggtgcctgtcacagcttagctctacctggccctgagccaggtctygagcccccccattcacgcaggggtgggggcgcctggactcttggaggcctgggatccctgacctgggcctgtccaaacttgggggtggcatctcactcgaggcccctgagccatgggtggcccatgcgtgcattaatcgctagcggctctttgactttgtatggatgtcagtcacccatgctgagaccctgcgctgtggcatgggccttaagtgggggccgtggctgctgtccatcaccacggttacgtataaacagcagccatgattgggccttacgtgactcctgtaatgtgagggtcccctttagaaccaaaccccacatgttgcaggggccccggcccagggtggccagtggacgaagagttagctgcctgtggggatggggntttccagagccgctgcggtttggggaatgtcaacacacaacccggagaggagaggctcacctgtccccacccgcctgtccccgcctgtcttccaggttactgagtggccggaagatccacagccaggaggaagccttgcgggtaaggaggccctctggggcctgtgcggggcacatgtgccgctcacggtggggacgggagacaggctgcctgagtggcaccactgtgtcatttctccccagcagtgactgaacagtctgtaccagtcggggcctccagagatcagcaggatatrtgtgtgtgtgtacatgtgtggacatgtttgtgcatgtgtgtgtgtgtgtgtgcatgtgtgcgtgtgtgcgcgcgtattgtgtgtgggtgtgtgtgtggatgtgtgcgtgtgtgygcgcacccatgtgtgcatgtgtgcacgtgtgtgtgtgsacatgtgcatgtgcgtctgtgtgcatgtgtgtccatgggcgtgtgggcatgggtgtgcacgcatgtgtgcrtgygtgtgcgtrtgtktgcacrtgtktgyrcatgtgtgtgcrwgtgtgtgtgtgtgtgtgtkcacatgtgtgtgaagagctattgtaaggcggtggcttgagctgtgtgggggctcctgggcatgtttgggatttgcagggccagctgttgggaagggcaggctggaggctggacacaggagcagatgcagcagcccaaggtgcagtttcttcaaagtcctttttctccgggacttggagaccgtgcgtgtcttgctagcattgaaccttggttgagtcatcttagtctgttggggctgctgtgacaaaatgcctgagactggatgatttataaaaaacagaacttttggccggatgcagtggctcacgcctgtaatcccagcactttgggagactgaggtggtcagatcacttgaggtcaggagttcgagaccagcctggccaacatggtaaaaccccatctctactaaaaatacaaaaattagctgggcatggtggtgcacgcctataatcccggctagttgggaggctgaggcaggagaatcgcttgaagccaggaggcggaggttgcagtgagctgagattgcaccactgcactccagcctgggcaacagagtgagcgagactccatctcaaaaaacaaaacaaaacaaaacaaaacagaactttgttccccacagttctggaggctgggaagtccaaggtcaaggcactggcaggctcagggtctggcgggggctactttgctacccggactgcaccttgttgctgcatcctcatgtgtggatggcagggggctcgaggggcccatgctgctccctccagccctcatcaggcacagagaaaggggagccctcatgacttaatcatgccccagaggaccccttctgaatattgccacatgggtgccatgtttcaacatgcattttagagcagacactgtcagactgcagcaggagtccatgtgctttgggctgcgttcccaagcagcctggcgctgccctgaattttgtcttcacaacccaggagcctggtcctgagaatgggccactgcagcagccactcctcccactcggaggcctttcgctgacctggtattgggtcctgggactgcagagtcagctgaccctggagcagggtccagattctgctatggacacgtgctgggtggcgatgcagcacatgtgtgtgtgtgtgtgtgtgtgtgtgcgcgcgcgtgctgcccgatctgaggcaaccgtgcggtggagacagtttctacgagagttacagaaaagccaacgtacagaggggccagctcctcctcgctgcaggacaggcacccatctgtccaccccccaagggggaggccctcgccagtcacctgtggggagccacacggtttgggctgacagtttgtggggggatggtggctgaccaggtggctgtcttccctccgggagtgccgccattgggaacgggctctgggggagtggggtgtgaccggccgtggctgatgctccccgtgccactgccaggtgatggatcggggagtggggtgtgaccagccgtggctgacatgtgaccggccgtggctgacrctccctgtgccactgctaggtgatggacatgctgcactctatgggccccgacaccgtggtcatcaccagctccgacctgccctccccgcagggcagcaactacctgattgtgctggggagtcagaggaggagtaagtgcccccatcgtgcaccgtggccgcctctgctcttcccagaggaaggtgttctttggggctgcaagaatgttttgggttcaatagcatgaaatttaagccttatccagcaccnggatgacacccccattttacagactctcagggatcaggtgggattcccaagacctcacaggtcacgatgaatggcctggctggaactggcttccacggacccagcatcataggcctccctcagagccaggcggggtccctgagttcactgggaggacgcgtccacccggctgtgctgattgtttacacagacaccacctggttgattttctctgaacagtgtgaaaatgackcagaaggctggggccatgcactaagctagtggccgcgggttcatacccatgggcccaaaagaacagctgtgacctccttgccgctctatgtttggacatgggagccttgcaggcacacacataggcacaaatgcacatacacttgggcacaaatgcacatacgggcacacacgtggacatgggcacacataggcatacatgcacacatacacacgggcacacacaggcatacatgcacacggacacatgcatacacacggacacacatgcatacacgtgggcacacgcacacacatgcacacacactcggatgcgtccaggtacatcctagttcttcacgccgtcgttactctcgggagtttcacagcgacccccgaggcggcctgaccgtgtggccctctgagggtgcagtctttccctttcccttgctgcggtgatggggaccccatgcatgccctgagcccccacgtcctgagcaaggccaccttgtgctctgcccctgtgaccctccctgccgccgtgcccaggaggatcagggatgggaggctggccctggcagaggagcggcagatctcagtgaccttgcccatcttctccccctagggaatcccgctggctcygtggtgatggaacgcatccggatggacattcscaaagtggacgccgtctttgtgggcactggggacctgtttgctgccatgctcctggcgtggacacacaagcaccccaataacctcaaggtcagccacacgcaccgctcccctcctcgcccactcccacggcacctcatggggagcaggatatgagagtcctggtggggggtccctgctgagctgacagggcatggccctgagtgctggccccagttgtgggggagggcagtggccaggccatgacaggagttgcgcctgtcactctcacatcgcctcccatctccccttatttgggacctagggatgatcagagtctgtgagggcttgggtgacagatgtttcagaacagacccatgggggtcccaccaggattcagatgccacccgcttggcgttggcgcagggctgtgggatgcatggagctgttgtgtccttggtgacttgggggctgctgcagaggagtggcaccctgcagcatttcccacagtgtgaccacggcagtgacctgagggacggaaaggccrgagccgcccttcggggacagtaggtgggaggctgaggacaggggtccaggcaggtgtggagagccgtctttctgggcgttttgtctggatgtctgcctgcttttcaagtttgtagagatcgggtggctttgcttagacagtggggggagtgggactgttgggcaactgacatggcaggttgggatgtggggtctcgtgagcctttctcgtgtgtcccatgggtaagcacacagctcagcggggacagaggagttttgttgcaactgtggcgctcagatccgtgacytccygtgctgcatgcagcagagttgcttgtggcctcggcaggtggttttgtcagctgagtccgaggacgcctggagtgtgtcttcttacaacaccgtccagagccgtgctgtgctctgaggtggtccccagcccctgggctcagcccccaaaactcccctgggtacttcccactgcgtccgcagtgggttcaggtgggagggaggggcctgccatcyctttggaatgtggggcagggcaggggtgccatgggagtgacaggaggaagacaggacacctctgtcactattgggtgcgctggggaaggaagagttcagaggtcaggacctgcaggtggctctccctgtgctgtctttgccgggcygcttaaggggccacgtgtcccccggggtacacctcctccccaacaagtcagtttcagctgagtgtcctggtgtgtaaaatggaagaggtggactgaggccctttgcctcccatgggactagcccctctgcacaccctgagctggaatgcacagccccctcattccatcccttctggcccctcaagggcaattaaacagggccattaagtaagcctgccgtgtttaattggtggtgcagggcagtggaaaagtgccagctggcaccccgaggaggcctcactgccaggccgcccaaggtcacattctgrgtttggccagcccagggttgtggagtcggggagcgagttccccgtgcttccccagcacctttgactctgaggcatcactgagtgatgattggctgactctgaggcatcactgagtgatgattggctgactctgaggcatcactgagtgatgattggctgactctgaggcatcactgagtgatgattggctgactctgaggcatcactgagtgatgattggctgggctttcggcaggagcacttccccttgtagactcgttataaggagttaattctgggaactcctaccaagctcctgctgcctgccaagttctatgcaggtcacgaggctgtcccttctgtragccatctcttgtccagagcaggtagctgggaccnggcatctgctcagccctccgggctctccgtggtgggcagtccgcagcctgtcctccagggttcagcacgtgcattggcggagccggctccccggtggctcggagagcaggacggcccttgtgttccctggaaatcccytcctggcagcagtgggcacgtcgggtgttgtgagtgggccaggggcacagcaagtctgtcctmcctgcaggtggcctgtgagaagaccgtstctaccttgcaccacgttctgcagaggaccatccagtgtgcaaaaggtacggcggccgggctgcatgggctgcgtgggctcctggctcccgaagtgggtgggagagaagagctggcaygtgctggttttgaaggtgtgatcggtgtctcctgctgacctcacctctgggagtgggggcaacagcgggagcccctctgagatgggaactcagtgctctctgcctgccccgcagcccaggccggggaaggagtgaggcccagccccatgcagctggagctgcggatggtgcagagcaaaagggacatcgaggacccagagatcgtcgtccaggccacggtgctgtgagggccccsccgctygcccgtgacacgcagcgcgttggtgtctccgtgtttgtccctgtgaaaacatgtaacgtctgccttagagccatgaccgaaacttgatatttttttctttcatgagtgtccggcatctgctggtcttcattgtgaaacgtgccagtcgtgctttgtgaaaaataacaaagtggtcacagaaatttgtgatctgaaaacccggctcccttccccacaaggctcctgggcctccgggaagacgggcccctgtttgccatctcgggggtgttccctgtgggagggtgagtgggtgaggccgagcctgctgcgtgtggagcctcgagtgggccctggctgccactaccgyacagaggccgtgtcgcgctgggctgggcytgggtggcctctgtctttgcatctctgagaaggagtcgggtggtaacggttggggtcaggaagaattctgccaagtatctttactgtcattctgaccatagcctctttgttcccgcattcgaacttttggttcttactttgctgctcgtttagtccctggggatttcagatcttaggctgttgtttcaccgtatgggagggttgatgtgagcttgcttggagacacacggtgcagcatcagggaccttcccaggccccagcaaattcaagtcggtctgcagacctctcagctacccgcgggacctcttgtaacccatcggcatcttccaggaatccgccgagtgacttgaggaagatgctaacgcagtaaggtctgtgctgggccaagagcagctttgaagctccagagaaccaccccgtcaggttccttgtggaagctcccctcatccgtggtgcagcaggctgagcactgcgcgtttgccacgtgctgcccgtgacagcacattgagccacagcatttgtagacaggacagaggggtgcctgccccctgcccctgctggcacatttaacccttgtcccctgacctcagttctgtgccccaccaaatgcccaggggcaagaggccaccctggaagctgccaatcttccaaggtgggtgtggggcacggtgggggcgggcagctcccaggcccttgggcaggctggggtgacggcagaggccacagcaccagctctgacaagtcctatcatcctctgctcagcagtgacctccctggccccactttgcccagagtttggggtccccccaggtatagctataggcggcagtgcctgtccctggcctgccttgatttcagccacacccctgcagccctgcatcccagctctggggtgtgcagaggtttgtgtctccagggaacmcacggctggagagaaatagggagatgcaggaagtgggggcccatggggcccccaagaagcggactctccaaggggtacccccaccccgctaccttccccacggacgggcccctcctggagcccataccctcctgtgaggccattccagtgtcttctagaaagactcgcttgccaggagtgcgttctttgttgaaaaatgccctgaagcgaaaagatgcaggtttatatggaacccccaccccctcccccactctcccactctgttcgttctgaatgtcttcacgagcgtgcatcagggcgcctggctcccccacctcagccagtgagtcagacacgggtttcgcagccatgtttcctggctccgaggacacgggtggcaggcccgttgcagcccagagccactggtccctacagggcgccgccacaccagcaggaaggaggatggctgtgtccggagcctggcggggaggcggcctccccagtatgtgagtgcagggatctgccagaaccacctggccctctgtagggcgtttaactggaaataccctcactgccaagtggagactggggcgtgtgccacattgccagccaccaggaaagcttttctttttcttttttttttttttttaaacaccaagagcacgtatagcatgggggaaagaacctaaatgtctctctgtcctgtgagctggtgaaaaacccagcatgagaacgcagtgtcaggtgtgggactccttctgcccctgcagtgggtgttacgggcggtgtgccctggcgagcaagctttgattcttggttctttgagctcgtttcagaggctgagtccccacatcagctttagttcttggacttccctgtattaagcaagaattaggagaatggctgtccctgcaggcgcctcccgtaaatcctgagctctctggcgcaatctgaaacttctcttctgttttctttggctgtatcagccgaaccaggagaggcctgggctgcgactaaggagaaagaaatcgggggtttctgagagcagatggtgcctttgtgggtgcagggcttttgtggaaattgtcagcctctacgggcagagtccggcatcccctccccagactgcctgctgtcaaaccacggagcagctggagcctgccctgtccacggcccgtttccacccgggcatgttcgtctctcmtgacttcggcagaggcccctggtggccttcagtttcagtttctcatccaggaaggtaaccttgggcattggcagtgggtttccctatggcttggatccagattagaattgatctttgttttcactttccatagttaataacatgcaaaataatgagaagaatttattttaaggtgacagctatactggtccaacatcgcctgcttattgtcagggtacagaagtttaatactttcttaatccagtttttcaaacttctccctgtagaccgtaaggatgaattccacaataggatcctttttaaaatcgattttaaattgttgcctagtcctgccaaggttattatgtgcatctgttatttttccaatacatgtaaacagttgcagcatgatgctttgtttaatgtcctgttcttaagctcgttagagccagttttgaaacgtttggtcttaccgtgaacggaggctggcttggcttagccacgctgatgagtaagtgagggatgtctccatcttgagatcaccaggcaagagagttgcctgcaccaggtaagaggccaaagcccctggggtaacagtccccaccgctacccgaggtaaaacaataaaagctatgtggttgagctcaggcctctcgtgcctggtgtcagagaaggcagagcccacagtaggtgcasggtgcaaggccctgggagggcactggccagggaaggtggtatagatggccctcagattgcggggccccgagcagctccccactctgcccgtccaccttccctggctccagcctcattctctctttagtttaactatgcaaagagaggaggttgagagtgttctggcagctggagctcttttccttgtccttcctgccctccgatggggccacctgtgtcggggcagcagtgtccatgtttatggagatcagaggtgtccccactgtgtggctggactgtactctgctgcccgggtagccaggagtctctccctctctcccctgccgcctgcctggtctcatgggcctccttcacacacccctccctgtggatcgcctgcctgggcccagagcaggggaactggagtttgtgagtgagcagagcaggttatgtgcagacagggaaacgagaactttggacctggctttctgagtccaggtgagagctgtgtggccccccgatgccactctgcccgccggagggatgtgcctgctgagccttttccttccacgccgcctctcactgccaggccagcggcttccgctgagactcgctggagaggcggctcccgtgtccgtccaccgagcactcagatggatgctgatcaccagggccgagggggctcccagaaggaccccaggccctggggagggtggctgtgggaggccaagtccactgcccggaagtcttgtcagccctaagccagggaagcctggagcgtggcctggcgggtctgggtggacaccgtccccactccggactcccagcacaggggaggakrsswgagcctgtatggccctgtagccctgggcagagctgggcctgtcgtgtgttcctgcctggcaggtgcaggtgctggccatctgcaggtggaaggaggtgggaatcttggattttttgkttttttttgtytttttttttttgagrtgaagtctcgctctgacacccaggctggcgtgcagtggtgtgatctcggctcactgcaaactccgcttcctgggttcaagtggttctcctgccccagcctcccaagtagctgggattacaggcatgmgccaccacgctcagctgatttttgtatttttagtagagatggggtttcaccatgttggccaagctggtctcaaactcctgacctcaagtgatctgcccgcctcggcctcccagagtgctgggattacaggcatgagccagtgcacccggcggaatcttggaatttttatagacrgcacctcagtttctgactccagccgcacacctcctgcctctgccagcaggggttgccgccagaccagagccagggccaggtccctgcgtccatcccccccggtaggatggacgtgagccatccttctaggggacttttttcagtgtgcgactcgtctctgttaggtggtaggagccagtttgtgtggcctgtgccacgctccacagtgcgtggctgggctctgtgtgtggcctgtgtcccctgtccctgcaggacccagcaggcatcgtggcgtgacagctgtgtccaagccactgcccgggcatcccatcacccaccagggtgcacrgtctctcctgctgggggctttctgtcgcatgtgtgtctcctgtcgactctgcagtttgttctcagagcagaatgtttcctgttctcagtgcacaaagacactggttttcaatcggcgtctaaaaccacgttcctgcctttcattgcaacacggtgtgttcatttgtttaaaacagtttaatgagtaagtttagatgactggtcaatatcttaaaaatgtatattagtaagaagttcttcctggaatttttctttcgattctggcagaataaacaggtgtttttagttttcccactgtctgagccaagcagsaccctgtcccagagcaagagatgtccccttccatctctgacccttgcctgggacaagctttgatggggggccccagcttcaaggctgtggtgggaacagcacccccaaatgccagcctctcctttcttcccatccaccagtatactgcggggccatttctggtctttgtscaacaggaaacccatttctggtgggatatgccttccagtgccacagggccactcaccccatgcatctctgtcctgcccgtcagtgctgggacggacagcaagggcaagcccagtgtctggcrgataggtgggtgggaacagagaggggagaatgccgtcctaagcttctgcttggggatcccccacacgacctgggtactgcctgggaaacctgtcctaagtaaaactatggacctcgcctcgcccaccggcctgcraagccagcatctccgtgaaggtggatggaagcgcctttgtcctcaytttgagctgcaagctgggtcagcggctctgaagccctcgagtgactttctaacccaagacccagcccctggcaggaggaggggtgggtgcagggctggtgggacaaaaagaggcctcagcaggcctggaagacccttccagtacatcccacagcgtgtcgagcagctgggagaacctgtgtcaagctcgagccgtcataggtccccatgaggtgtctgaagccccttcttggtgatgggaggcagaggtgctgacgttctggagcatggacgtgagtcctcagctggctccgcgtgggcccttggagggtgccaggtgtgtggtgaccttctggatgcctttaacttcatggctgcgtcattcctgatttagaactttaaccggagcttcatctagtgattgcaaaactggaccaatgggaggacggcggcgcagcccgctccctccgtggaatggagctcagctcttcggaggcatcaaagcacctgtcgcctccgtggtccccctgcygagggagtgcggcctctgcaaggttcgggggtggcttcgtttgcctggagtggccggccctgyttgtgccatgtggatgtttgtgagcctcggtcctacagcactgtgtaggctgcatctgtttcgtgctggtcctgttgacttgtatgatatccacaaataaatattttcatggcggtcgtgttgaggcatgatggttccttcccatcccaggagctccctacctgtgattggctgaacacccagtaccctgccagccacgctagggattgctgctggaaatggtggcagctgactccctaaaaacctcccctttggaggaaagagcatgccttgcccctgcctgccgggcccaggccccctcccatcctgcactctgttttctgccttgggggctggcctgggtgccccggcatgggcttcctgcaggacttcccagggcagagccctcagggataggaggcctccctgtgcaattctgaggcccagctctgggtgttggccaagggtgtctgctcctcctgggatccacctggctccttcacacctgggtggtgacgttgtagtgcctctggctgggcagatctcgtgttccctgactcatgtgcacctgtgcgataaacccacagaccatctccagcaatgccaggctggttgctgtgtgccaagaacaaggagaaggcggaaccaggggctgcagaaccagcccctccccaatgaggaccccctctggacgcccctccccatggagaacaccaggagccacagaccccagaccacagagcacacaggggagggcacggggcggccggggcagggtgtctgctgcctcgtttatgggatttgctccgcgtctagcacactgctgcctgcagtgctcctgtcccctgcagtggctactctgggcctacgggcctaatcctggttggcatgaaaatgtcctgaggctactgtgacaaatttccacaagctgagtggcttaaaggaacacatttgttctcttacagttgcaggggccagaagagtctaaaaacagtcagcagggctggttcctcctggaggcttagaggggctgaatccgtttcctgccttttttagtatctggagggcgcctgcatccccttgcttatggccccttccatcaccaaagccagtagtgtcacatctttccacctctccctgaccctgacctccgccctttctcttagaaggaccctgtgtgactttggacctacctagataatttagggtcatctctcatttcaggaacctgaatttaatcccacctgcaagtcccttttgccaggtaaggtcacaaattcacagggtctgaggatgaagatgtggacctctttgagggccatgattcagcccaccacgtctggtgacgagggatggagtgtgttctgcagcagtgggggcctatgcagacctatcccgaagttcaaggaagcagagaggccgaagaaagaagctgcccttggccaggtgcagtggctcagccctgtaatccgagcactttgggaggctgaggcaggtggatcacgaggtcaggagttcaagaccagcctggccaacatggtgaaaccccatctctactaaaaatacaaaagttagctgggcatggtggcgggcgcctgtaatcccagctgttcgggaggctgaggcaggagaatcgcttgagccccggaggtggaggttgcagtgagccgagttcgcaccactgcactccagtctgggaaacagagcaaagactccatctcaaaaaaaaaaaaaaaaagaagaagaagaagaagctgcccaatccagtttctcagaaagaaacatttaatagggacttcggaacagaagccatgtctgtgtctggggcccacccatcacccmcaagcctagggcttatgtaccgtaggggaggggtgcgtgtggttcagaagggatgtgctggacagttgaagcagacagcatcccagtcatttgccctaagggcaggatttagggtaagtacctgcctttacacaaggaacaatagatgagctgaaaatctgagaggccttcctagaactggggttcatcagacaacaacagggtgggttagcctccaagctggaactgctgtggcgtgtccaggggtggggcatgtgctggcttggtcatctccccctccgagggtctgagccaaatatccagcagcaaacatgctcggccctgaagcctcagccattgtgaggactctggctgggccttcttcccccgatgggtgggaaaggccggcctcaagtccaggacctgcccttgaggccatgctggcttagggcttcaaatctgggttcctaggaaaggggctgggctccagtggcgtgggggtggggacggcagatggagggaggctgggaagggagagaaggaacctcatgggcagttaggctcccggggcttctctggggacaccaccagcagagtgtggttgttgacacctccctggggctcggggtcttcctttggccccagtgaacacctgtcacacactcgctgggatggactgaccttcagggtttgctgccacccgtgtcctccaccctggtagggcctttccaagacacttgtggggacaggccgggcctggccagcatccggtaggctgcactttccggaggcctctgggattacaggccacctcaccccagctggaattctgcctaaattactgcattgaggagattccctcacaaggtgcggactcaggctggccctgaaacagccgtcacctccacgaggccggcccaggcccctgcgcactgccctgctcatgcccccatccatgccagctcccaccaagcccgtgcccctgccaaagagctgggggaagggatgggagacagacttctctttccttatttctatttttttttttttttccagacaggttctcactctgtcacccaggctggagtgcagtggtgtgatctcaactcacagcaacttctgtccaagcaattggcctcaagccatcctcccgcctcaggctcccgagtagctggaccacaggcacaccaccacgtccagctcattaaacaatttttttgtagagatgaggtcttgccatgttgcccaggctggtctcgaactcctgggctcaagtgatccttcctcctcggcctcacaaagtgccggaattacaggcgtgagccaccactcctggctcttatttctgttttttctggtaacagctttattgagttacaattcattccatatgactcagccatttgaagggtacagttcaggctgtgattataaaggcagcactgttgaggacactgagcctggacaggtgtcccccccaaattcaatgatgtcctgcaaaaaggtccaccctaagcctggacaggtgtccccccaaattcattgatgtcctgcaaaaactcacgtccaccctgcacttcagaatgtgactttattaggccaggtgcagtggctcatgcctgtaatcccaggactttgggaagccgaggtgggtggattgcttgagctcaggagttcaagaccagcctgggcaacatggtgaaaccccgtctacactgaaaatggaaaaaagtagccaggcatgatgccgggcgtggtggcttacccctgtaaccccagcactttgggaggccgaggcgggcggatcacctgaggtcgggagttcaagaccagcctgaccaacatggagaaaccccgtctctactaaaaatacaaaaaattagcctggcgtggtggcacatgcttgtaatcccagctactagggaggctgaggcaggagaatcacttgaacctgggaggcagaggttgcagtgagccaagatcgtgccattgcactccagcctgggcaacaagagcgaaaattccatttcaaataaaaaaaaaaagtagccaggcatggtagcatgtgcctgtagtcctagctgctcaggaggctgaggtaggaggctcatttgagcctgggcgggggccgggggggagaggcaggggatgggcggaggctgcagtgagccgagattgcaccactggactccagcctgggtgacagagtgagaccccatctcaattggaaaaaaaaaaaaaaaaaaagaatgtgactttgtttggaaatgaggtctttgtggatgtaattagttacataaaatgcagtcgccccaggtgaggaccctaaatccagggcctggtgtactcgtaagaagaaggccttgtgaggccgtgtgaccacgagrtcgatcgatcgcagtgaagctgctccaggcagaggaccgctgacaccctggagaccaagacaacagctgcttcaaagcgagggtctgaggaccaggcatagtggctcacgcctgtaatcccagcactttgggaggccaacacaggcggatcacttgaggccaggagttcaaaaccagcctggccaacatggcgaaaacctgtctctactaaacatacaaaaattagctgggtgtgttggtgcacgcctataatcccagctactcgggatgctgaggcaggagaatagcttgaaccccggaggcagaggttatagtgagctgatatcgtgccgctgcactccagcctgggcgacagagtgagactacatctcaaaaaaaaatgttttgggttcaataacgtgaaaattgtgccttatccagcaagtggtgaatttcctgagctcctgtgacccccaccaaggaagagcagactgaacaggcttgggaaatttttctgtgaaaggggagggcctgggggtgcgagcaggctcacgcccagtgtgcactgggcatgctcaggtgtcagcagccgagccagcaacactgggatgacgccccctttttacaggctctcggaggtcgggtgggattcccaagacctcacaggtcacgatgaatggcctggctggaactggcttccacggacccagcatcataggcctccctcagagccgggccgggtccctgagctcactggaaggacgcgtccgcctggctgtgctgattgtttacacagacaccacctggctgattttctctgaacagtgtgaaagtgacgcagaaggctagtggccccaagttcacacccatggccctgagaaagcagttgtgtgtgtagcctcctcaccaccctctctgcgtctggacatgggaaccttgcgggcacacacatgcaaacacatgcgtacatgcgggcgcacacacacgcacacacggatgcacacacacgcggatgcacacacagacgcacacatacacacgcagatgcacgcacacgcaaacgcacccacatatacatgcggacgcacacgcggaagcacaggcacacatgcacgaacacacacactacacggatgcacaggcacacacactcgtggacacacagcatacacacacacagatgtgtccagacatctagttattcacgcccttgttactctcaggagcagcacagcgaccccgaggctggcctgactgtgtggcctctgagggtccagtcttcactttcccttgttggggggatggggcccccatgcacagtctgtgcctcagtgttctgagtgagggcaccctgtgctctgccccatgaccctccctgcctcggtgctacccttcctggaggcgggacacggcggctgatccctccctgagtgggagttgcgagtcctttgccttcttcccccgtctccggcttgtagccacaaaatgtgctgccctgggccctgcctcaggtttccctacggaaacggcacaggccacgctgcctcccctgctggcaccctagtctctgatggagaccgtggcctctccacccagaaagtgggccaggcctcaccatccctgagctctgtctgcctacgtctctggctgccactgaccccaccagcatcttggcctctcgacacaccccctccgccctgactctgtgtcatacccaggcctcacgacacactcctgggcaaggctgcgtcggcagcgccctggccagggctgtggtcgggccatggagggggccccctggctgagaccacaccctgtacccccaaaagaggtcatcctgcccgtgccagaaaccccgtcagggacatgtgcacccctggagtgtgggcgcagaggccggccacatttagccagttgtacattcattcaggctgcaattctttctta

SEQ ID NO: 95954 - DNA, 39314 bp, Homo sapiens
  misc_feature (1)...(39314): n = A,T,C or G
caccccaccccacacccatgccctgcacccacaccctacactccacagccacactccaccacacccccacccacaccctactccccacctcataccctgcacctcaccacactccacagccacaccccaccccacaccccacactcccacccacaccctacacccaccccacaccctacacccaacccaaacccacccamacccaccactcccactctccacccacacccacaccccttcctcacmccccacmcccccatcccccactcaccacccacgcccacaccccacaccccataccccggaggtggcactcctgctcccccccagggctggcagcccctcatcctctgctgcaggacgggcctgcgctgcagatcctgctcaggagacgtgaccccagcccctgtggagggggtgctggcccccagccccgcccgcctggcccctgggcctgccaaggtcagtgccgcaggggccctccatgcatgccggtgctgggggtggggaaccccttgggttggtgttgggggagcacatctcagggcagaccctgggtgccagcttcgagggcttgcaccagacgcactgaccatgtgctcattatctgtagaaaatatttcccctttaaaccaattctttttggcaacttaaatatagttaaaaaggaagctccccccgagggttggtggctgacgtcacggttggctgtgtggccgcctcacagcatgagcctgagagtcctgccagggctccctggtggggtgaagggagagcgggagcgcccggcctgcaggagcaaacccccaccctgtctgacccctccaggttgtctcacccccagccctccctggggccaggatccaccccactgtgtggccagagccctctcagagaggcaaagtgaccccgggtccagccagtagctcttcctgtcctcctgctccggggtcagagaggacctgggtggcgcggagacccctgactgctggggcggctgggcttgccctggagctgggtgtgggggaggcccgagtcgctgctgcaggagcctccgggggggtggcctcttgccctgaccgtccccagcagaggcctcctgagcacatcctggccaccgaggagcctttagggatcctggggtgatgacacgtcccacctgctccactggcccatgctctttcccagctgtgcctccgccccgtatacaccgtgtgggtgacaggccaccccggcgtggtactccccaggagggtgacagcctaccccagcgtggtactccccgggcaggtgacaggcttccccggcatgcaggctctggcctggcatggcacaagcctcagacccagccctgcccttggggcttttgtggaacagtggcgtggcccacagctgtcactgtccccttccttctagaagcctccctcctcacaccacccatctggagtcaggagcccagccgggcatatacgcagatgcccctccctaaccccaggcagctttcctgcaactgctcccgcagcgggtacctcgtcattaacctcctgggttctgtctctgaacagcagagacctctttcttgtcatcgtgatgtgaaatgtaacgccatgtcagaggaaaagttctggctggccttggcctcccccctcagcctgcccccttcctccagggtggttggacgtggccccagaccccatcctgagcagctctcccaccccctgggagcatccttaggaccggggagcatccaggggctttcccctccagaccgggcagcccctccctcagccatgcagggctgccgggcctcgcagcgccagtgttcacccgagtggaggagctgggatgtggctgtttggggccacaaatggggaattccacagggttcaatgtaatatggtctcctctctgctgggggtgcctgcctggggaccttctcccactctggtcgctcacctatagtgtgggctggccctggtggtgcttgtcgggggcgggggtggcatggaccaggcactttcctctctgggcctcagacttcccctctcagagtgggactccttgctggttccctgagctccctcgttttccccaggaggccacacagtgtggaggctgtctgggggccgtgggcagctggccgtgggcaggaccctggggaggcagccccagccccatcatgcccacgcagccctgtgcccccacccccartggagctgggtgtaagaattcccatctcagtgtgggggaaacacccccgcggcccctaggccctgcggcctctgtacccccaccagggctgtgggagttgggctgacctcttctctttactgggttccaggatgacactgccagtcacgagcccgctctgcacagggatgacctggagtcccttctgagcgaggtaacgcctcccctggcctcctggtgctcctccactccccctcccctgcctcagccggcacccaggctccccactctgggggaggactgccggcccccactgctcttgagccgtggaaactcaggctgtccctgctccacccaccaggagccccagtgctgctgagcacctggcaccccccacaggagcccccctagcccccttgcaggagccccccccggcccctccccctgcgggagcccagtgctgctgagcgcccccagcccctccccaacaagagcccccacacggcccctcccctgagggcctgcaccctggcaggcagaggctcgagcaccaggctcaagatccactttcccagggagggtggggcgtgggagtggggggggggtcccagaccccgtccctctaagatttgcttgcccctcccaactcaggcctctctacgctaagatgggcaggtagaatctgtggggaaaatgtgacttttaagggctctgtctgtttttgccaagaggataagctccttcagcctccacgggttctcctcagtgtctgatgtggcacccgggggtcccagctgaccatggggcaggggttctgccctgtgcagtggccgtgccccacacaccctgaccgtgcaggtgtctgcagagccccagggcctgagagtgggccagggggcccagcgctgggtaatggagctgcccctctggatggggtccccgggtatagctggagaaatgagcgacgggctcacagcctctcccgggtggcggtcttattctgctggcatcgtggggcccgtggccccatcctgtgggagcatcaggctcctgagcagaataagtagctggccccgacccccccaccctgaaggagccacccgaggaggcagaactgccatgaactgccatggggatgtgccctgggcttataggatgtggtgaagtacacaggacagggtcctcggtctggcctgtgccatggggaccttgggcctcagtttccccacctttgatggaatacggtgaagtgcacaggacagggtcctccccagactggcctgtgccatggggcctcrggcctcagtttccccacctttgacttagagggaaggttggatggtgacttcttgtaacgatggccatgattctgtggctgcggcgggggcgcacctggaggttctcaccgtcactctgtcccgcagcacaccttcgatggcatcctgcagtgggccatccagagcatggcccgtccggcggcccccttcccctcctgaccccagatggccgggacatgcagctctgatgagagagtgctgagaaggacacctccttcctcagtcctggaagccggccggctgggatcaagaaggggacagcgccacctcttgtcagtgctcggctgtaaacagctctgtgtttctggggacaccagccatcatgtgcctggaaattaaaccctgccccacttctctactctggaagtccccgggagcctctccttgcctggtgacctactaaaaatataaaaattagctgggtgtggtggtgggtgcctgtaatcccagctacatgggagcctgaggcatgagaatcacttgaactcgggaggtggaggttgcagtgagctgagattgcgccactgcactccagtctggtcggcaagagtgagactccgtctcaaaaacaaaacaaaacaaaaaaaccacataacataaatttatcatctcgaccacttttcagttcagtggcattcacatctcatgtaaccattgccaccaccatctgcagagctgttccagcttcctgaatggaaactctggccccatgaaacactcactccccattcccctcccaacccctggcaccctccactctactttctgtctctatgacttctccagggacctcatggaagtggaatcacacagtatctgtccttttgtgtctgtcttattttactcagcatggtggccccaaggttcatccatgttgtagcatgtgccgaaatctgcttccttttttaaggctgagtaatattccagcacatggatggactgcattgtgttcatctatgctttcctcagcagacacctgggtgcttccaccttttggctgttgtgagtaatgctgctatgaatatgtgtgtgcaaatatctgtgtgagtctttgagtaaaatcgctggatcacatggtaattatatttttaattttttgaagaactgccatcctgttttccacagcagctacaccatttcacatccccaccaacactgcatgagggttccagcctccccatatccttgaaacaattactattttctgcatttttctttcttttcttttcttctttttttgagacggagtttcgctcttgctgcccaggctgcagtgcaatggcgcagtctccactcactgcaacctctgcctcctggcttcaagtgattctcctgcctcagcctcctgcatagctgggattacaggcgcacaccaccatgcccggctaatttttgtatttttagtagagacggggtttcaccatgttggctgggctggtctcgaactcctgacctcagacctcaggtgatccaccccccccccccccccaccccacgggcctcccaaagttctgggattatgggcgtgagccactgcgcccagcctgtgtttttcttttatagtagccatcctaatgggtatgaggtggtacctcattgtggctaaaccatgtacgtttaagaatttacacacacacacacacacacacacacacacacgtgatgaagctgtaagaaaagggagagaataatgacccaaaatgtcagcacaaggatgcctcaggggtagacacaggtgtcttcttagcgccttttagcccacgcatatgtgcttgcgcagtctctcggtgtgttttctaacatttcacaattaaataaggagtagttgatattcacagccaccatttccaccgtatatgtagagaaaaatgctcaaatcctagcgatcagcccgctgagctttcacaaaccgaacacaccgtgcggtcacgaggcggctctcccgaacaccggctctgcacccccagggcccggggaaccaagacttccccaagggcccagcaaaagtgagggaggaggggaggaaaggagggagagggagggaggagtgctggctgctttccgccagcgcctcgtttgggtttcgctctgctgaggcctgaaggcgccctgagggcccctggggggcagggaggggcggtggctgcggccgacagcaaggaacctccggagaagcgaagccgggccagacgtgccaccggggcctcggcgctggcgaaggggcgcgtgcggccgcactggggccagccccgccctggtccccggccacatcctcgagaccaccggggtggaggggggggtctcactgctcagggcccgcgtgacattgcacaggtttagaaacgcacagcgggaaggtggccccggcgggccgagggcgcaggatccctgctccgtccagggtccgtcctgcgaggaggcgccgggggcgggcccggggcggggcgggcggaaggcgcgcgcggggcggggcggggacggcgacgcggcgcaggcggcgggagtgcgagctgggcccgtgtttcggccgccgccatggccgcggtggacctggagaagctgcgggcgtcgggcgcgggcaaggccatcggcgtcctgaccagcggcggcgacgcgcaaggtgggcgggggtcccggccgcgtcgcggcgcagggggtggagggcgcctccgccctggcctctccggagcgcccgccgagccccgggacccgggtctcgggccggcccggcctcccgccccggcctcccgccccggcctcctgccccgggtctgtcccccgctcttccccggcgcggtctccggcctacgtgcggccggccacgttctcggcctccgcctgggtcttggcgccgcccgcgccctgccccgggggtgtgtccgactctgggccgcggggcaggacctcccgaggagtccccgaggccacgcgagcggagggcgccggtcccgccacccccagagcctggcccttcctggttctgaagcgacccggggacccggtgcctcccgagggccggcgccaggctgcgggcttccgggacctcctcccggctgggcgggggcggactcactcccggaccgcgcctcctcctcggggccctcgcggccgccttccttgtgggtctagctggggaagagggcggtggggagatgggctgcccggggcattgagcaaagcccagttgtcacccttttcgcaggggtactggggaggcctcaggtggtggggactgggacttggcagagctgggtgggggtccggcctgagggcgtggtgtcctcgcacgctccctcccggaggcctggtcctgcccactgccggcctccagtgtctctggcctgacatgtccagtgtggcacctgtggcacaggacgccacctaccctacccctcaggaggagagaggagaggatttaggagaccagaagtgaggtgctgggttgggaaggggcccagccagcaccccaaggctgtgcagcggggtctggtctgtcttttagagttcagaaaatggttgagaaaatgcggacacacacccccacccagcttcaggcacctgaccctccttttccctatctggaagccaggaagaggcgagaaggaagccggccttgagygggaccaagccagggaggcaggagtggctcgtgggtgtcactgtctgaaccccggcctgcagagggggctccttcagacctggctgagccaggcctgtggtggctgcccacccgcccttytcacagctgtggcaagagcgggagctgctgcttgttgccggcyactggcagtgtcctggagccagtgtggctccacaagtcctgtcctgtgtggctctgggtcacgcctttcctgtgggccaggggtccgtgttgtcgagaggggagggygttgttcaaggatgtctwtttgcacaataacctgtgcaaaggtagctagaagacttgaagcaggccgggtgcggtggctcacacctgtaattccagcactttgggtggcctggtgggttgtgggcmcaggtgggagaggaggcccgtggccttggagggtgaactcgggaagctccatcccatgagattagacaagaaaggccccgagtctggagggcagacaggttgctgtggggccagcccgcctgcccacyagggaggcgctttcttggtgaggctggygaagccccaaagcccacctgtggytccctgaaacacagagggtccccaaccagcttccttgtttgcaaagtgggagcatcagcagyggagggttgggaaagttgagagcctggggtggcacgtgccccccccaccccctgccaccccatgcacagactaaacagagaaggggggctcrctggaggttgctgaagggccagcctggcaggtggttcttgggccagcggggaggggcacccagggtgacaggcggttctggatgctggtggaggatctggagatgggatgcccctcctggccctgtggacaggccggctgggtgggcctcccatctctgtctgagctgggggttccaactgctcagcctggccccagtgcctgatatggagtgggcagcgcttcctggctgcagctgggagggtgcccacagtgcacctgctggccgatcatggcatcccagttgggcctgtgccttcctctgcaaatgtcctcccttcccaagccccgtgcagctgcagcgtctctgtatgtgagctcccatgcgtggacagggaacaggtggttttctgcaagggaggaggactccacacacttccccagttcagggctggggctgattcrtggaggatgatctggggcgagtaggatgggaggaactgacattctgggcagaaccagagtcctgtttcatgagttcggaaaagcagtctgcrgggctctcccaggccaccactgctgctgccgtgtggctccccatggtgggtgctctgttttccttctcggggccccactgccttcctagaaaggctgaccctggycgaggggaagcctgtggcrtagtgtgcccttctctttgccctctatgtcagccgggcagcaggagagtggggactgggaggcactttctgccccaatgctgaagtctgcgtttgttggatgtatggaacagccagcctcaccatcctgccagtgttgcccagtcctgggacttctcgggccttgatttccccttctgtgaaagggggttggggacaagacaggccaccttgcaagttccttccagccagcccacaagtcctgtcctgtgtggctctgggtcacgcctttcctgttggccaggggtyggtgctgttgagcaggggagggcgttgttcaaggatatctatttgcacaataacctgtgcaaaggtagctagaagacttgaaacaggccgggcgcggtggctcacgcctgtaattccagcactttgggaggctgaggctggtggatcacctgaggttaggagttcaagaccatcctggctaacatggtgaaacctcgtctctactaaaaatacaaaaaattagctgggcatggtggtgcgcatctgtaatcccagctactcaggaggctgaggcaggagaatcgcttgaaccaggaggtgcaggttgcagtgagccgagatcgagccayggcactctagcctgggcgacagagcgagactctgttgcaaaaaacaaacaagaaaaaaccccaaaaatcagccaggcgtggtggtacatgcctgtagtcccagctactcgggaggcagaggcaggagaatcgcttgaaccggggaggcagaggttgcagtgagccaagatcccgccactgcactccagcctgggtgacagaacgagactctgtctcaaaaaaaaaaaacagacttgaccaaaaaaaaaaaaaaaaaaaaaatggcccggcctgcctatgcctaccttcatctcgccctggcctgggyacttttaattctctgggccctttgtctagtgccccctccctgcccctgcaggacaccgtgccctgcctttccctggctggtgtgtttggacgttggtttcctgttatcgcaggtgaggacttagcttcctggcccgccacgcctccctgacatggcctcctgtttggagccttcaggctcatgcttacatccttagctgatcattaaactttgtgaccatttcatgctcactgctttcttgccygggagctaatggtgaggaaaggtcactgggaaccagcgcaccaacctcagacatygattttgttccagccttttttcctgggcaggggtggctatcacctgctggtaggcagcggcaggcccactgtcctgcctgccctctgactgcggtgtcggcgactgctgcccgaggtttattttgagaaagaaaagccgattaaagggccattaaaaaggtcttttgaagattacagcttccaatgaggttaacagagaaaatttcctccttcaggccgcagccagtcccgttctaaaatccagtcccaacaacaaagtggccatgtgacatggccactttgttctcctcccaagggctcagcacaaagctgggttttggcagcttcattgtctccgggcgtcaaagcaggttttattttgcagagcaccctgaagacatttggaagtgaggggtacccttgctgacccctgatcctggggcccctttgccgttcccaggtcccctgacaagcccaccaggccccctgctgagatggctgtgaccctgggctgacccgcccagtggcacattgactccgcctggagctggggagaccagagaggccctgtggttggacggtggcctgggtgcgctgctcctgccctctccttgccctgcctcagctgctgcctgccagaggtgggcttggacctgtggtgggaccaggtctgcagggagggcgagggagagacggaggcttagcttcggccagctgtggctgagtggatctccctcactgcccccaactccagtgagggtgggggacagggcgctgcactcacagcaccaccttggacgcccagcctcaggcagcaggacttggctctgctgactgtttttggttgtcgggtgcttggggtggctcagctgtctggggggggctcggctgtctgtctcggggggcttggctgtctgcggggggctcggctgtctggggggctcggctgtctttctgggggagcttgtctgtctgtctggggggcttggctttctgggtgtgtgtgggatgcttgctgggttcccgccccagtttcagctgtagcagccgtgctcccatctatgtggggatgtgagggaggcactgttcctttagagacggcgttgcttgctcaagtggagaagctgccagtgtgggcagctccagctccctgcacgctctgtgctctgcccattctaacgtctgtgccccttcttctggatggctgccgggcttggctctggcccccctgttggatcccctggctgctgggtggggagagggccacctactgaacctgagggtgggtctgggtgagtcctggctctgctgccacctgctgggctctggaaggtccctcaccctccctctgggatctcattggattcctgtagtgtggggatggtggcagatactctggctgctacgtgagaacagtgtgccgatccctggggtttctcaaggcgtggcacctcacctcacacctgctccctgctgctgagccccacgccaagctggagagcggatgagaagcatgtgtaaccagggtagaggtcgagagtcctctcgtgggggtctccatgttcaagggagctgccgaggcttgagcaggagcccccagcaggtcagcacctccagcctctgcaagtacaggggggtgggagggcaggggcttttgaggggcacgaggcttggggacagaggacccgcatggcttagggatggatggcatggtatgggtgctgggagggaggcaggaagagcagggctggtcccaggggcaagcacaaactcaggcctgttacacggccccagacctcactcagarggggaccctggcygctggcrtgggtttcctcctctctgaagattaggtggtcttggctgccccttttgtatgaagtcatggatatcttttgagatgggggctctcgggaagaaggtgtggggtacattagcaccagcgtttcctgagtgccgcctcccccgttaatgtccctctccaggaaactggctttgccaaggcccccgctgggacrgactgtttctttcactgcagtcctgggagccgagggcaaggggacaggaaagaggaagtgacctcagagcctggtggcaccagcatcatgtccaggctggggggtgagggtccctgaggccctggggcagggcagtgctgttccctgggtggctgaggccggaggggctctgttctcagtcccccatctcattgyggaggaaggagcccaagccccttccagcaggtgctttcctcagtgcccagaggtgctccccggcttctccatccccrcgccgcagcctgaatgtctggggtggggccggtgtgggaggtgccggcctcttttccacctgccccactttttatcctgctctgtggtcaaggcctggccccgtggcctgtgagtgtgggggctccgtggcagaggttggggcggcggggtgtggagttcgggacacccacacatgcctgattgccatgctctgcatgggatgttcccagtttatctctgggcaccatactccaggtgctcggaagctgaagcctagagcytgctgggttcacccgagcctccacccgggggcccagggctggtcctcaagtttcctggcctggtgcctcctgagatggggagggtgaccaggccttccctaccccctgccctctgagatggggagggcgtcygggccttccctgacccttgccctcttgagatgaggagggtgaccagggccttcccccaccacccgccctctgagatggacagggtgtccaggcctcccckaccccctgtcctctgagatggggrgggtgtccagggccttgcttctcagygtgggactgacaggtttgccctgacctccacaggcatgaacgctgctgtccgggctgtgacgcgcatgggcatttatgtgggtgccaaagtcttcctcatctacgaggtaaggccaaggtgggctgtgtgtgtgcagggagtggggacctcctgaggcgcatgsngaggtgtgttctgtgtgggtcacactgggagacggggtggtcctggcctggaggagctgatgggtatgtggtcttggggagtgtgagggggagcytggggccaggccaaaggcatctgcagaaagaagacctactgccttgggactcagcccggctggaggctcagaggctgcagagcacgggcctgggggcagggaaggagctgggtggacaaggagtcgaggccctgcctacagtgatcgctgacgggccaggccccacccaccacacccctgcctggtgtcccccagcctggcccttgtcccgccccgaggcctctgtgagtgggggccagggacctcaccgcctctgcccttgtcctccccagcctcctgcctcaccacccagacccggggggcagccgctggcagcagctctgctgtgtctatgttcattgtgtccccgcaggagcagcggatgccctactgcctcagccccagtccccgtgggagatttggggctcgccctccgtcctgggtatttacacacccacacttgcgctcacacrtgtgcacacacaggcgcattcacacacttgggccacaccacgcactcacaggctgcattcttgccttgtcaggtggttttccacattccacaagacaaggtcttttgttattttgttgccactttttatgtaatatgtagctgtttatataaaatgtagcaaccccagctctgcagccccaggcactcagccccacccccctcactgctcactgctcgctgctgaccactcaccgccctgggtctcagttcccccatcttggccccagggaacagcagcctgtccagccctccctctgcaggactgtgtgaatgaatgagtgagtgggcagtctgtgctggcccgtcctctccctgtggccaggctggggtggggctggggccctgccagtattggattaggaagcaggtctcagagccctggggagctgggtgtgggggcctctctaggcaggctgggctgtgtccrtacaaacccctcctgccacctgctcgaccttcagtttcttcttctaagtggcaaaggggagaaattagggttttccggaacccccacacatttgtggttgggaaagactcctgtggcaaaagacagaaaacaggttcatcggtgcagggcgtgtcctggaaaaggggagaagaggcactttgccgtgcctagagtcctggcttctgcagagcccagcagagaccagtgcacatggagaagccgaggggtacagggacgcagcgtgaggccctcggaggtgggggaatgcaggagggtgagtttatgggaaaaagaatgaagtgggtgggcgcgggtcctggggctgtctctgggtcctgagggctgtgaggggcatttacatcctgtccaggcggtaacaggaggagccttagtcttgggatgctgtgtgctgctttcctctcaaagggaggcaaggctgagagcttccctgaatctgctgcctagtgggctttagctcagaaacatccacatctaagaggcagattttgagatgagacattctgatatagcggcccagggaagacttcccctccgtcccatgaaggttcttggaagaatccacttgcgaaaagcggattaatagggcagaggtgctggcattcattgtgaataggcatggagaggtagggcgaagatgctgacctgccctcctcccagggaaaggggcatgggcagcctggatgattctaggggggtaggawttttttttttttttttttttgagacagagtctcattctgttgcccaggctggagcgcagtggcacaatcttggctcgctgcaacctctgcctcccaggttcaagyaattttcctgcctcagcctcctgagtagctgggattacaggcacccaccaccacgcccagctgttttttgtatttttagtagagacggggtttcaccatgttggccagcctggtctcgaactcctggcctctggtgatccacccgcctctgcttcccaaagtgctgggattacaggcgcgagccactgtgcacggccatgaatggtttttaggggattcaatgggcttggacagcatctgttagccctggtgaccacctgcccaagtgtgttggcagacacaggtctttcttcctacgatgacctcagtgcatggaaactcagggaggggactggccgtcactgttcctttctccagcagctatgggctttaggcagattcgggggcttcagggagcagctgcatcctgagcttggaggaggcagagggtcgagaggcagaagggggaggtcagggagacctgcggctgcgtcagttcacatcagactgcattttgggtttctgagcccccagcgctggcttccttcagcagggagaccgatcccttctccttggggctattgttagggcagaaagggagggtggccttggaggtgaaaacccttctcagttctgacacaaaggagggctcagaacaggctactcttatccccccaggcagagcccacagcatagcagggagggccctgagcctgggtccaggcctgcaggggtgagaggagggggcggggctagaggggaaggaggggaaggtgagctgggcctaggaggacagagacggaaacagagtgggtagaggggggcaaacagcttctagaagattccaagggtaggaggaggttgtgtctgtgagactgattccagcagaactgagccactggccttgtggggtctctggggactgctgggctggccatacctgcctgcccctccgcccagtggggcaggggcctggctggcgcctgggctctgtattggatcctgagttttgcagacagacctgtgtttggtggcctcctgctcaggtggggctgtgggtttgggatcattttcctgttttccttgttcctagctcagggctggtacaaccagagggggccaggctggcctggcctgagccggaggaagtagctctgtggtccctcagatcagcccctgagatggggcaggggcacctgtcccccagcccmgctggtggggaagggaggctgtcaggctagaagcccgccatggccagagtggggatgttcaygygccccgcagcgcgcactatcccttgaccccctgcctgcttgaggcacttgccctcctggcccccagggccctgacacctggttggggagaaggcggagggaggagcagaagcccacagctgagctggcatccgccctggccgaggaatggctgctccactgcctcacctcacggcctggagaaggctgctgatgccatggagggaccggggctgcacggaggaggccgcccttctcctctccacacccttagtgaaatgcagtcatgagtgtccctcccctcaaacaacaagaaagggctggccgtgcagtaggaaacgggcacgtggcacggaggctgtgcaggtgccatctgggaaatcccaggtagaaccgcatgagaggcagatccacggtactggatggaaggcccagtgtggccggcgtggcgggacgcggagcctggagcccctgcctggggtgttgccggccctacgagcgatggccactcgggtcccctggacccaggagctccctcgggtgggggcccgcctgtagggaggtgtgtgtgttctcagcttcccgctctggcgggcagatggtagcctgggctgttcacacggccrccacacagcaagagcacgcgccgcacaccccgccggccgcatgcctgggaggactccagtggggacagaaggagccacgcacagcagcctctgtggtgtcatttctaggatgttcagaacaggcagacctaggatgcaccctcaggagctggatggcgggctccgctggggccttcgggacgctgaacttgcctgtgtggatctgggtggggtgagggagctcagacaggcccctgcaccaaagcacttgccacaggagtcacgccccgggacacayggactcaccagctgtgcagagggtgtctggagccccctagggggcacccggaccctgttacccaggccctgggatgatggtggggcctcacagtcagcaccctggtcctgctttctgctggtggggtgaaaatcctgctcccagaccacttgctgccggccgccatggggtcccctatctcatgcctgccccactcttgatttcagggctatgagggcctcgtggagggaggtgagaacatcaagcaggccaactggctgagcgtctccaacatcatccagctggtgaggcctgggaacgcggatgcatgttgcacttggactcgcagacagacacacagagacagacctgcacacacagacacacacacagagacagacacgtgcacaaacacacacatgcagacacacagacatgcacacagacgcacacacacacagatgtgcacacacacagatgcgtgcacacacagacccgtgcacggacacacaggcgcgcacagacacagacacgtgcacagacacacacagacatgcacacatacagacacacagacgtgcacacagacacacagacgcgcacacagacacacacagatgcacacagacatggagacagatacacatggatagacacatgcagacacataaatacacagatacacacgtagacacacagatgcgcacacaggtacacagatacagaaacatacagacatatgtactcagagtcacacacacacgtgccccatcgcacagggactcaggttcaggccsaccctgtcatctgctgccatggaattgttgggtcgcagggtcatggggttgccaggggccaggaggacctggagacgtggccgtgctgggtcctgggggagccctggctgaggctggctatgaggggccacgtgagcgcacctggagctgctgaggcttgagccctggaggccctggccggttccctgagttggtacagggcctgtgtgtgcacrtgtgcacgcacatgtgtgtggcaacctatgcgtgtgtgtactgtgctttccagtctccaaagccttccactctattaccttggggcttcccaagcccaggaccggacggacatcatcctcctctttgtctctccaaggagagaggcccagggaggtagggccacctcaggtttccagagaccccggggcttctgcctctcactctgcagggtctgccagccccttgctgcccagtcctggggtccctctggtgatccccaggggctgtctgccgcctgccatctctcctgaagtttctggtctcctctgtgcagggcggcactatcattggcagcgctcgctgcaaggcctttaccaccagggaggggcgccgggcagcggcctacaacctggtccagcacggcatcaccaacctgtgcgtcatcggcggggatggcagcctyacaggtgccaacatcttccgcagcgagtggggcagcctgctggaggagctggtggcggaaggtgggtctgtgcccggcgcactgtaggccctggggttttgttttgccgctgctgccaggcgtgggaatgggcaggacagagggacgagggatccctgggtgccccgaggcagaggaggggctgtctggccgttggccggggaggagtngtgtctgccagcacgagctcagatgtctcccagagatggaggtcagtgctcaagcctgagggagggcacccaggcagtgcatggggctggtggaggccggtgttgctcaccctacgctgcgtagacaagtcttctctgtgwttgatccgagtgagattctggacatgcatggtcacagtctgcagaaatagagttgaagttggggtgacataagacacagagtcccgagattgctgcttggaaagtggcctctcggagccatgtctgttccatgtccctcatgtgggggaccctgatgtgaggccttggccgctctgcaaggcaccccagaggtcccccgtctgcacttggccccagcggatccagccatgctgccacagggttccaggcaggaggaggctgagcctggaactccggggcccctgccgggctgcacgcctgggatgcgggggaaggggtggcaggagaggggtctctggccctgtggtggggccagtggagcctcagccaggtcctcctgctgctcctggcccaggtaagatctcagagactacagcccggacctactcgcacctgaacatcgcgggcctagtgggctccatcgataacgacttctgcggcaccgacatgaccatcggcacggactcggccctccaccgcatcatggaggtcatcgatgccatcaccaccactgcccagaggtgagtgaggctggcgccggcggccagcccagggcccctcctccccgcacggtggtgaggtggtctcagggtgacggccatctgcaagggcagtggactctggtagccccagcatccaggccagccgccctcagcccccagctgggggaacgcacagcgggctccactcccactctgccaggccgcggggggcctttgtgcagccccttctgaggggcagctgcttgccctggggtgtgacgcccccaaaggaagtcctgggctggccaggcctgggcttggcaaatgaccctcagcctgggaggagatcagtcgaaaccagcccaaaggctggaaggatcccaaggtatcttttagctcagagcctgggcatgagaaggggctgtcccctgcctgcctctccatccactgggtcccttgagcaccccgcagggaatcgggctggcagggccgtgtggctggcactgatgcatcctcctgttccatctccacagccaccagaggaccttcgtgctggaagtgatgggccggcactgcgggtgaggaggggcttcctggcccgctgggtggcccgggtgctgctggggaccgcagtgacaggtgtggcatatttattctagggctcagttaatgccatgggtgtgagagagccgggtgggggccgggagagacagagaagctgtggcccagagtcggacctctgggtacagggaagctcccctcaayggctgggtgggggtcctgagcaggcaggcgctcgctcctccaggtacctggcgctggtatctgcactggcctcaggggccgactggctgttcatccccgaggctccacccgaggwcggctgggagaacttcatgtgtgagakgctgggtgaggtgggtrccgtccagcctgctgggggccgcaggtgtcctggtgcactgggtagcgcccctggggttttgggaccagccttgaccaactcatctatcactcatgggttcatcagcagctkcaggtgccccttgggggcgggacacrcaaggagtggggggctacggggctgacctcagtgaggcacctgtggtcctgcccccagtgggcaggaggcggagagggtcactcaggctgccgccgccccaggctcagccccgtggtcagtgtggggagcttggtgaggctgcttactggggtgggactgctgagcctggggcggtgggaggtggttggttgtgagggagtggccccagcaaggtccagacggcagggctgtgggggtggcgaggccaggagctgggccagtggggagcagggccttcccctgagggcggtcggggcccrggggtgggttctaggctggaaagatgtgtcggaacgtggctgtagccacagggtggacaggaggtcccggaagcaggagagggtggggaggctgctgggaggccgagaccgcctctgggagggatgggggggtgcctggtggggaggggtgtgtctggagtgggggtgcctggaatgccgccctctggttcccttggggtggagttgggggctctggcctagaacaggctgacactgccctgtgraccctgagacccctcaactgggacaggtcggccccttggtggggtggggctcaatggtggaccagaggcacgggccattcaggctgtccttcgcccacacccgaccatgcagggcaaggccaggggcccccgtggctctagctctgtcctctgtgcgctgaggctgaggcaggaccactggaaccagccctgggggcagagggtgggtttgggactgacacggtatccctgtccccrtgtgaaggtggcagcgtcactcccatctgtgtggacactggttccacctccgcrtggctgtacagtgctgccgagggcagtgggagaggccgtgggtaatgacctggcttctagaaccttccccagtggagcctaggggccgggcggagatggagcccaacaggcgaggctggcccaaggtgcgggtcctatgaggggcttgctctcctagggcagggacttcccgggggttccggctccagtggtgaccttggccttagcttatgtctgtgactcacattgggccctcctggaagtggcctggatgcaaggtcggcccacctggttccttcctgctctgtgtgagcagctcaggccctcactgagagtctgtttccccctgtaacatgcgggttcccgccttgcccaccacccagggtgcactggggcagggagggtggcacagctctcctgctggacctgcagcccatcttccgggtgtctgacctcacctgcactggcgccacctcctccaggtagccctccactcccaccacacccgggccctgtctgagctgctccaaccctgtccctgtaggaggcattgtggcccgtggtgggcaaacatggggcttgtggctcagagcgagtcccacaaatgttggctgggtcattgaagtggacggccgaaaagctctttcagttcccagagagctgggccgcggctggtgtgtggtgctgaggcagcagcctgaggctggcagaggggatggtgtgtcctatgtgcaccagtgtggacccacagtggcttcagggtgcagggtgtccggggagccctggctggtgccagcgatgcggggcccctggttataaggatgagcagatggaagctcacaggggccccaggtacctggcccaggctagcccgggcaggcccctctgccctgtgccccgtggagctgcagccctgtgcgtcttcccgcctggaaggcttcaccagacacaagggcccagccccagctgtgtgtgtgctgggcccagccccgagggcccccttcctcccctgctgcccttcccaggctttcgggcagagccctcttgttcaccgcctccaggagggcggggsgtcctagtgggcccagcctcatctctgccctcgcgctccaggcctgctttcctcctgcygggtggggattgtgccctggcccatgtgggttgggaatggtggccccagggagggctcctggcacccgggggctgtgtccggggcaggtttccctgcctggcagctgagccctgtcgtgtctttgacccagactcggagccgtgggtcccgactgaacatcatcatcatcgctgagggtgccattgaccgcaacgggaagcccatctcgtccagctacgtgaaggacgtgcgtgtgggcctsggggtggccactgggcacctgctcctctaggccgtgtgggctggggctcagggctggtccttcccactgtcctgcagctggtggttcagaggctgggcttcgacacccgtgtaactgtgctgggccacgtgcagcggggagggacgccctctgccttcgaccggatcctggtaagtggccatcaccctgccctgcgtacgtgcgtgggtaagcgtggtgtgtgggtgtgggtgtgggcagtgtgcacgcgagcatggcacgtgcactgtgtccatgtggctgtgggtgagtgtccgtgtctgtgtgtgggggtgtatgtgtgggggacgcgtggtccttgtgggtgtgtctgtgtgtgtctggtccgtgtgggtgtgtgtggcagtgtgtgtgggtgtgtgtcagtgtgggtgtgtgtgggtgttccctcaagctgttgctcctcctgggggagactgaggcctggcttctccgttcccctgcaggtatagggaactcagacctggggaccatgggaggccccccaccagcctgtgcctcctggctgttctgacccccaccctctgccagcccaacgtggcagcagtcagggccaggggcaggccctgggagaggggctgggtgggcagagggtggtgcccatggcgcctgtggcgtcacagtctgggaggctggtgctgggagggagcattcggggtctggcctggcctcgccgtccttggtcctgatcaccgctgggtctcactttgtcctctgcaaaatgggaatgaagttggagccaaatggagtgggtctggggccaggaaggcaccatggtaggcaaaatgcctgtgtatgagggtggtcaccctctcaggcagggccagagactgtcagacaggtgggacttgtgctgagggagaccaggtgactgcgcccagccctgtgactgcacctggccctgtgactcgtgtgctgwgccgagcattcccagggaacccacacagctggacgagggccactctatagaggggaggcttcctcagagaggggccccgccgacctagccaggcagctgctgtcccctctgtgaggcctcaggctcactctgaagagcctcttgaggggccggggacatcagggcaagccagccgctgctgagcctggggtgatggaaatgccgctgctgtgaccgggccagccatgcactcccagcctgcaggctgctgggttttccagccagtgtcttggatgcctgatgccgggtgtgaaacaaaggacagttgatcgcccctagccgcggctgtcacccagagcgtcagcattcttgtgctccctgagcccgtattcccactgggtgctgcgaaggggccaggggaccctagcacgtgcagtggtaacctgcacttttccaaggagcctcatcctgcatggggggtgtctccgaggctgctccctaaacagcgtcctggagagactgcccagaataaggtgccgcctgtgcctcacttgcaagatgaaaaaacctgtgtggaacacggagggctgtctgtggccccgggggtccagctgctgggcttctacagggctggccactggtggtcatgggacggccacggcaaccgcaggcctggctttcttgtccactgtggcyggttccyggggtggggctggggcctgcctttgcagtgtgtccctggggggcagctcctggatgtgtcctctgcccagccctttggccggtgcggacacacaccagggaagtcacgacatgagggcctccacgggaggatccatcgcagcggatggggccctggggacctggctcccgcccttgccttgcgcgcctagcgatggcagcgagcgacggtgggtgggtcgcattgcatggcaccctgcagccagcagtgcaggctgggccttccagcagggcagcgaggactctgtgaaatggtgtctggtgtgccgtcgtgaatgctggtcagacacgtttccatctctgatgccacctgttctggaagcttccgtcagcgtggggggctctggaagctggggtttgcacatctacagaggatgggcatgtggcttggggtagagggaccaagtgggtgtgccagcctgaacccttccccacagagcagcaagatgggcatggaggcggtgatggcgctgctggaagccacgcctgacacgccggcctgcgtggtcaccctctcggggaaccagtcagtgcggctgcccctcatggagtgcgtgcagatggtaagccctgggccccccccatcagaaccgcctggcccctctccccagtccccactcacaggccccactgctctctgggggccccagcactgtgagcaccggagggcagggcctcgtggctggcccagggcatcccaggtctccagggaggggagggatgtgagcacatccctgggtgggacgtgggacctgggacgttccccaggaggtgtgtcggagctgcagggagcctggtgagcatgggaagtcacaggggtccacggccactgagctkctgtaggcagtggtgggagttggggttacgatgggayggaggaggaggggccagtgatcagagcagagccctgggaggagctcaggcaggtgatggggaacactggggtggctggagcagggaccccaggagaggaggtacggggaaggcagaggcgagggggccgggtgtgggggctggtccagccctggctcggtgggtttggaggcctgcaactggggcagagtgccctgcctggagctggagctgctgagaggtgaggagggcagctgggggcagggtagggcctcctggtctcagccagccccagaagagctggccttggtggtgaccgctgttcctagggagaggctgccaggcctgggccagggtcaggagatgccggccagatctgccctcgtcaggcccaccagacagggcagtagccatgggtgtgcgggccaggctctccatagtctgtgttctgtttctcttccttaagaccaaggaagtgcagaaagccatggatgacaagaggtttgacgaggccacccagctccgtggtgggtaagccccctcagcagacccctgcactcttacatggctgggtcccggtgccaggcagcatgtgctgcagtggcgctatgcacgcctggcctgggtcatccttctaggcaccgcgtctgaagatcgagggaggaaggggcctgcgggtggtacaggaggcgggctgggaggtgtggtaccacaggagaccctgggcggtggcacgggcagggcccagtgcacagggatctgggcatggcgaggggatgagaagctgtggatacaagcccaggacatggggtggccccgcgggggctgggaaggctggcagatgttgggtgtgggtaccacccccctgcaggcgtcctggcggccgggtcaggctggattggacgtctgggttcccatgcgtgcctccacccgctaccaaggtggccaaccctcccttgagctggatgccggccacgtgctttgctgcacgggctggcgtggcctcgtgttgtgttgggggtctcgcaccttctgtggaaggtgccctgcctggcatgcgcggtgtctgctgcctcatggctgagcttccatcgggccgtgtgcctgtgaccagcctcctgggctctgtcacggctgcgctgtggctgtacgccgtggcgctgcagggctgtgcatggtgtgacccgaatcccttccaggagcttcgagaacaactggaacatttacaagctcctcgcccaccagaagccccccaaggagaaggtgaggcagggagcsgcgcccacagagggaggaacgggctcagttattctgcagcctcttcacgctggccccgtggctgggcctgcctgcccccaccttccctcctgctggggtccgagctgtgagctgggagggtgggcctgacctctgcctgggctcaggcaccactgtggctggcaggtcccgggtgctgggaccctggctgcagggctggctgttgcttctcagtggtggatggaaatgaagtcaggccacaggcttaactcaggagaggagaagccattgtgtagaaaatgtcccccggggccaggctcacacctgtaatcccagcactttggaaggctgaggtggccagttcacctgaggtcaggagttcgagaccagcctggccaacatggtgaaactccgtctctactaaaaatacaaaaattagctgggcgtggtggtggcacatgcctgtaatcacagctactcaggaggctgaggcaggagaatagcttgaacttgggaggtggagggtgcagtgagccgagatcgtgccattgcactccagcccgggcggcaagagtgaaactctgaaaataaaatgttcccaaacagctgaaaacctcaggaaatgggatctctccaaaataaggatgaaatggcttgtttctaaagtcctgggggacgagggtcctgtagagagagtcacggccagtgaggtcctggctcccaagccccttgagccacagccggagctgcaggccggggcagacagcgtggcccagcctgagtctggtcctcccttccrtggacatctttgggtgtccctgctgctccagcctcctgcttatccccagagctagtcagcgggctctaccctccgtggtggggcaacctggtctccacgaacccagaacctggcaggggcgtgactggctttgtgggcagcagggctggctcgtaccaggacccagtggggccatgtggctatggagcccttgggtgtggctgctgccaagtgggatgtgctgcacgtgacaggtgcacgccaggttcagagcctcagcacggtgggtggaggggaggtggtggcggccgtcactggattcacatggatgtggtggggttttgggtccatcaggttaaattaactgtagtcctgatgggactgtctccatgtcttttcccttcccttaacgtggctactagaaaacaggatagccagggccccttccttactcgtggctgtgcaccccccaccctcccgcccgctgccagccccttgtgtgggcactgacctgtgttcccgcccgcaagcctggcttcacaacagtgctcgccccytctgcctcctctgttgcctgcgtgccagggggccaggcttgcaccgtgtctcttttggtcttcaccagaatcttctggaattagaacagataccgtattcccagggcagttgggcggtgtgctgggcagcgtccaggctgctggcagggcctggcccctttttccagaacctgccggcctgctgacctcctgtgcmggttgggggtcccctccccggctgtgcctcacgctcatctccccttctctctgaagtctaacttctccctggccatcctgaatgtgggggccccggcggctggcatgaatgcggccgtgcgctcggcggtgcggaccggcatctcccatggacacacagtatacgtggtgcacgatggcttcgaaggcctagccaagggtcaggtgggtccggccggggcaaacaagtgaggacttgggccttctgtgtgcacacttggggcatttcctgtggaaggccggctgctggaggtggaggcygagacctgggtccgcgtgtcggtgcccacccgggcctgggtactcagctctgcctgcagcgtgatgcccaacactggctggcccccgggcacaggcccacccctggggggaattggccagaggctcaggctggcccctgaagctgcatctcctcctggcaggtgcaagaagtaggctggcacgacgtggccggctggttggggcgtggtggctccatgctggggaccaagaggtgagctgcctgctgcgggtacctggggrcaggagggccagggcgcagtatccaggccctgcaggtgggggcggcaaggggaacccagcccggggccctgggctcggcccctcttcctgctggtggtctgcccagagcaggcttcacgcctcctgcctggggcttcctggcctgagctccgctgtgtagggcaggctgctctggcggccccatgcccatggtgggctctccgtggcaaggaagctggcgagcgtctgtccctgcctggccaggccaggcagcctgcactgtcagcactctggctgaggctatgggcctgtctgatggcttttgtcccagggcctgagacccttctgtgggcatggggtgggcacagtccccctgtgtgactacaggggaagttgctgagtcctgagccactgagtggctgcaagggccrgaggaagcatccgctcctgccgctgagtgttgggcgagaaagcctcgggcaggaasgggttcccacggggagcccagcggggtggggggttcactcggttgcctggccggtgcctggtgatgctgagtggtgcccaggcggctcacgctgggcctgtgtgtccctctccgtgtggagccacagcgccacatcccgggcattgcagcgactgctgactggctcggggaacggccaaggcaatgcctttctgtgatcagatgcaatctggacacgcgtccccgggtgctgcgtgttcaygcggatgtgtctttgactgcaggacyctgcccaagggccagctggagtccattgtggagaacatccgcatctatggtattcacgccctgctggtggtcggtgggtttgaggtgagagctgcccacggacgaaaaagccccagggcacaggagacccaaggtgtcctcccgccgagggggcccatcctgaaaacccgtgtgctggctgggccgatgcaggggccgagagggtcggggttttaagtgctgtgtgtgggctcgggagggcacccgtgtgccagctgggctgatgcaggggccgagagggttggggttttaagtgctgtgtgtgggctcgggagggttctttactttctccggaaagcttcacaaggttccgattaaccccagtgctggggaggggcaggggaggaaggggactcggaagctggaggacgagaaagaagggaggcggaggaggcagaggtgtaggtgctggacggcatcgctgaacgtggtgtcctggcactgggcaagctgtcactaaataatgaataaatgacagcccttcccccttgccctccatggagtggatctggggtcagagtgggttggaggagactcctgaccctccttagagtccagtttccctggtaggcatcctgagatgacaccaggctgactgcctggcccagccccaggggattgagcaggtgggtcctggcgtccagcacggggcacatgacaggtcagcagggagcagggctgggcggccgccggcagagcctgtcccyggcccaccctggcctcggtgctgcccttgacctgccccgtccctactgctgcaggcctatgaaggggtgctgcagctggtggaggctcgcgggcgctacgaggagctctgcatcgtcatgtgtgtcatcccagccaccatcagcaacaaygtccctggcaccgacttcagcctgggctccgacactgctgtaaatgcygccatggaggtacggggctcctggacacckgcctgccatgcccaggcccttgtggggtggggctgagcctacggaggctgctggaggggayagtgtgtggtgagcacctgggagggctgccagggttggggtttgtggggcacaggcccgggtgaaggggctcasctccctgccatagccacytcyaggtccaggggggccctgcgttgttcctcgctactgtgatgagctcagatggggagactgaggcgggaatgtccctgcgccccagtgctgggtagtctaagagcagcgcctggcctctgtccaagggtgccagggacacccctgcccactcacagccagtgtgtgtgcaggctgctgtccactgtgccctggggggtggggtcgcctggttgagaacccctggtcctgtggggcccaggtgggaggtgggcccaagcctggtgctgctggctgtctgggtgcgtcagccccaggctggctttggagacacagggctccctgcagggtagccatgccgacggcctacagggaagggtgggcacgtggaggacccccgacccccccttgtcccccagagctgtgaccgcatcaaacagtctgcctcggggaccaagcgccgtgtgttcatcgtggagaccatggggggttactgtggctacctggccaccgtgactggcattgctgtgggggccgacgccgcctacgtcttcgaggaccctttcaacatccacgacttaaaggtgagcccagcccagcccctgctgcggcagacctgccggcatgccagcctgggccccagacactcaggccggccagcgcagggcagggcccgggcaggtgggacgcgtagcccagtgctcctgcnggccccggatcgccggtcagcctggaattccctccccacagtcctccggctcatccgtgtccrcccctcccgcaggtcaacgtggagcacatgacggagaagatgaagacagacattcagaggggcctggtgctgcggtgaggctgccrtgggtcccnggccacagctgcgcktccaactctcggggctggggtggggctgctgaggagcggctgggcaggagaaggcaggaggggtccttggagagggtgggccagggcggctttcctgggagctgccactccctctcccaggcctggcccagcggggactcaggatsggggggagacctgaactcgttcccgccgactcaggccctgctgcccctctcaggaacgagaagtgccatgactactacaccacggagttcctgtacaacctgtactcatcagagggcaagggcgtcttcgactgcaggaccaatgtcctgggccacctgcagcaggtgtggggcaggggtgaggctctgagaggcctgcccctctttcctgccaccatctgtccccggccccaggggtcccagccctcacgggcacccacgggcactcccggcaggccctcgggcacgtgtgcccttccccagtgaggggaccgaggcctgtatctaggtgaggtctcatttcaagaaggggtggggctggggctggagccggggcccgagccagggcattcacatgctgagccgagctccccacccctgccaggcctcccgcggccacttccgccgaacccctcacctagatccccgcatgctccctgccttatggtggccctgcaggaagcccgcgtcctggggttttctgagccagggaggggagtcagggtggctgggcatggggcccgaggtgatggggcccgaggtggggccgctggctgccgatgcagggcccaggagtcacttgacttggccaggggcagccgactgccggcctcgggaggcagcttctggcctggacttggagctggagagagcaggcagggtcctcgatcgggaacagacgggaacggtgcacgggttggaaggaatgggtgttcacaagctgcctgggaggctccccgtggggatcctgtctgcactggcgttggccttggcccaggcagcccaggggagtccagggaaccgggcctcacctgtttccagggtggcgctccaaccccctttgaccggaactatgggaccaagctgggggtgaaggccatgctgtggttgtcggagaagctgcgcgaggtttaccgcaagggtaggtggtgggtgcgacccgaggcctcactttgccctcccctggctccctggggcagggcctcaccatggagggctgccacgtgcctctgtttgcaggacgggtgttcgccaatgccccagactcggcctgcgtgatcggcctgaagaagaaggcggtggccttcagccccgtcactgagctcaagaaagacactgatttcgagtgagttccaccaaagcctcgtggaggcgggtggggctgaggggtggcccagaccttccctgaggcmggtgtgccagrcccagccccactggcaccctgaccccgcaaggcctcctgggcccccatgcccaggtccccgccaggcygtggagagcagggaccatgcccaagtcttctgagcacaacactrggcaatcctttcgggtgggcatgggggcacagcgggtagccaggagtgggcacgcttgagggcggctgaggctgactctgtgctgtgcctccgagggatggggaccccagacctgtcccagctccacggataccgagatgttcagacagaggggcatgcacaggctgcagggtcggggggggtgggggggctggggacgtggctgaagagctgccctgacccctgactccccatcatcctcccatccccgtcctgcacaggcaccgcatgccacgggagcagtggtggctgagcctgcggctcatgctgaagatgctggcacaataccgcatcagtatggccgcctacgtgtcaggggagctggagcacgtgacccgccgcaccctgagcatggacaagggcttctgaggccagccatgcccacgcccctccccagcccccacccatgccagcgcagcgccagggctcagatggggcctgggctgttgtgtctggagcctgcaggcaggtgggggctgcgtccctgctcagcccatcccctgcctctatccctggccacctgccaggcctccctcsggctggtgtcttgagaccagcctgccaggccctccagcaggaggacagagtgccctggggcatccaccttcctgcccaggggacgtggcgctgtcggtgtttggaggctgctgccccctggctttggcgccccatgggccctcagcgtctccccatgctgggctcactacatgggccagcccttgctctacctggccggtaggctgctggcgcctaggttgtgttgagagggggatgcccctggccctgcctcactgtgacctgctcctgcccacgtgcagcacctgtcmccttttctagaaataaaatcaccctgactgtggggtgcatcggtctccggagagcacagcctgcagaactcctcagagagaggggggagcagcaccgagcggccagcccagtgggcagcagccccaggggtggagggccctctggccagtgcctgggccaggtcaaagggacatgtgccctgagaggccacaggtgctctycaggactccctgggggccaccagggtgacctgagcccctcctggtcctcccctgggggcagaagggtacagcctcactcctctgtctccccaacctcagcctgagtgggggtctccaacctgcaggctggtggctggcttgagccagtatccaggagacattgatggtggacacgcaagaggggaaaagaaggcagcgcagagctgcgcccaccaggggctagggctgagtcctgcaggcggctacggggtggtggacgccctgcttgcaggatgcctgttaacctcagcgtcgaagcctgcgctctgcatcatgaacgtgggaggtgcttgcccaagagggctgcttcctgcccgcagtgccaccctggggatgtggttttgggacacaggaggtgtctcaagggagaccctggcttggaggggcctaagggccactttgagggcccctgggcagtctcctggttgagctcaggccagtggggtggcctagggacctggtgaaggggctggggaccctcttgccctcgggcaccttgatattcccaagagcccctcactgtgttggccctagtgccggaggcctccagattgcttaactcgagctggggtggaggggcccacacctagtggccttctagttcattctgagctgggccatcctggggccaggcccaggagtggacagttgtccaaggacagtgctccggggtctgcagctctgtctcaaaggaagagagaaacaggttcataggcccagggaaccacacaggcatgctctgggggcctccgttgtgtcacaccgtctgggatcaggactcagttctgagtagaccccctcggcctgccctgcctgatgaggtgttagaacctgttcagctgccactcagctgctgcacccaggtggtcgcctgtggctgatgcccgggacagtggctgcctccctcctgggcgacgtggtgtggcgagcgcctgcgtcaggcccacttctggctgcgtggagttggcgtttctggcatttcgggcagagtgacgcgacctcctgggcccttggtcctctcctgtgaactgggtgaatgggacagagtgtgatgccagtgctgctcggcttgagaacccatttttggggtgacttggggaggagtggagtgggactgtggggtgccccgggctggacgtgcttctggctgtcctccatggctgggtgcattgggtgaggaggtgccgggaggggaacaggcaggaggcggcaatggtggggacggggtagggggaaccgtggggctgaaggcaggcagctgcccccacaggtcccacccaaggtgtgcatgatgtggggcaggagggcgctggtgtaagccccgcatgtccacggcagcccatgtcgggggaagtggaagggactcaatttaaaacgacctcaaccattccaacaaagcgctttactgagggcacccactccacagtcccaaggaggcagacacaggcctgaactgtccaccctctatgtcccgagtggtgactccactccccactgctcagagatcacaccccttctggagagcttgcatcccttctggagagcttgcacggatgagtgactgtcttcaccctgggcttccccaagtccggcgacagtggctgccccagtgctgcagctggctctggtgacggtggcacggcatggccccgagcttgggagaacagcggcctgcacacacggtcacgcatcaccgctcggcggaggatgggaatatctcatggagatctggatctcaaccccacatgggacaagggcccagggacctggctttcctacacaccagctggaaggctgactccccatctcacgtgaatgcttccttggttttggggggcactaggaaggtccccagggccacgggtcactgcccagattgtggcatcctcataagacttgcgactcttcccagaggaaagaaaacccctctcagatgctccaaggactcccctagtctagctgcttcctgtgccaggcccggaccccagggcgaacaggcctgttcatccacaacctcacagctgagggccctcctgcagttcttcacaggagagagaaaggaaggcgcacctgcccagcccggccaagaaaacaaaactctctcccatgggtgcgggaggctgctgcctgcctgctgagcagctcagggcagatgtcgctatgggtgccagcattctcgaagtctcccttgcccaacagaaatctatccaaggaccaagggctggaatcggcaaagccatccgtgaagacctcctcattctgtggagaaacggcccttgctttcaggaagactgtcacaaccatgccttgggaaacgtcacctccagatcaaccttgggaaaatcttttattagggaggacagcctgcaaaatcctccctttaagagcccaggccagcctagaacctccagaccacagaaggggagtcctggggacaggactggtgtagacaggcatctccaccgccccggttagccagtacctaacacccactcctgccctcggccgatgtggcaaaccggggaggcttttgtgtggggccggggctgcggccatggcagccaccctccagctcccgggggctggggaagacgctggggtccccgtggaggctggagcggcgttcaggtcctgcggtcactcggcgtgctcctgcacctcttccccacgcagggcctgcagccggctgcccacagtctgcygcacggcctccagcccctctgcrtccagctcccgcagcagcagcaggatggcagtcaggacgttctgagggcagaggggtgcggactaagcccacccggcacrgcgaggctgcttccctccacaagggctggggcctggccagcggtgccccaccacggagcgactggtcccgggggtgtgggccgtccaagtgactgaccggcacactcggagaatctgagcagaggagccccgcctgtggacgcgtgtgtggcacctcttccacgtgactcctgttgccctcagcccagcagggcccgggcccacattccacagaccaggacagcaggagaggctgaggggccaggacggctccgtgcggggcacgtgttacacgtgtgtgcgcattcacagacccgcacacgcagctccccctggggcacagctcttcaaggccctgtgaggctccatgctccctccccacggggccctgtgaggctccatgctccctccccacggtttctgtgcagtgggtgcagtgggcagaggcagccgcggcccctagcggcccgccactcaccctgcccytgtggctgctcgaggcatccctggctgagagggaaggaaactggccccgggaaggcggcttcaggccacgttcatcctgggcgccgctgctgagagggagacaaaggcgtgtgagggtcagggggctcgtggcaccgggggggcctctgcaaaccctgtctgcgggtcgcatccaagcaaaggaggggctcatacaaatcccacctggcacacgggggcaagagaagggaggcaactcctgggaggtcaggggctacagatggcagctcctggagagcccggcacttacttcacctgtggggcgccctcccggcaccctggggctccccagctgtaacaccttccacccagggcttcaggggcagggtggggggcacccgaacacacaaatgccgggggagagctcctgaccatggggtcaggccctgtgccggatggcagatgcctaacagagatcacatcccgatgcccccaccacaggcaccagcagcgggtgtgatctgccaagcaggagagaagtgcccagcttctgtcaaatgcgttcgtgacccgctgccaactgccctgggaggcgccggcgtctcactgcagagtcagccctgtggcccctccacggcccccaggcccaaggccatacgggcactgatggccgtgcccacaaaccattccagtcactgtggccctaggccaccccccccaccaggggctccctgcacctcacgagctctggtgctgtgagccttctctgtgccagggcacggggcctggctcaccccctctcctgctccctggcacatccgctgttgggcaaaacatggacctgccactgaaatcactacctgggcactgagtcactcccagagaatatggatgagaacagacactccccccggataatccctgtccctcacttcccagagacgcagctcacgggaagccccattcactccccgtgggaggaccctgggggacagggatgggctgcggagtccccgctgccctccagcctcacgttgcctcctcctcgctgtccagcgggtcccggccagtctcagcagcggagctgagggagctcagtgtgcagcatagcttggggccgcygtggcctrtgccctctctctctggggccgcagtgatctcctctccctcactcagtgcacgggacagctcctcctccgtcacagctttgggatgaaagacagaagacagcatgagtggcctcacccacgtgcaggccacatgcactgcagctcccgtcctcactgtggcttcaggcacagtctgcttgtgaaatgcatgcacgtgtatccacctccagggacaactcccagagtagcagccggttcctcactgtcccatccccagcctggcacaggctgacacacaacagatggtggagggctgctcaggaatctcaacaccagccttggccagaagcaaatactcctcaaaacctcaactacgacacaatagaaaaaggaacagaccatattgaatttattccatttctctcatatatcaatttccctgaagtttatattattaatatcaataaaattgtctgggagaaaatagtggtgtccgtatacctgacaaggatgagacactagtgtgctgagaatgccaaggatgaacaaacagcatgaaaccacagcctggaaaactgtgtcggtgctggcgctggctagaggaggcacgagcgcctccaataggtggagcgcagcagcaggcactgcggtgctgggacggcccctccccacggcaggggcgcgatggcaccgccaccctaggttcacagtggcccgtggagcctgcccagtccctgtggaccagtgcgatgctgcttgccagatactgacgcccccgctcgccatggcgcatggcgatggtcagagcagggctgctactcacagaagcaaaagaaggaacccttttgctttgctaccaggtcctgcggtcgttgggggatacccaaactgtcagtcccaggagggaccctacgctgcgctgctgcattcgggtggcgggatcaagaggagacacagaagccaggggaacagcctctggaggagacttcacaggacacatctatgtcccgccagaccaggtatttgcagaaaaggagaagagaaaagagggctggggacatccccytccagggattgttttgggagggccggtgactccgctgcggccacctaccctggttgtccagcttctgtaggygcggcagggtgcgcagcacggtcatgcggtagcggtgggggctggtgccgcagcacgggttctcggccagccacagcacccgcagacgcggcagccccttcaggtagaagagctcagccaggctggggatgcggttcctccgcaggtacagctcactcaggcgctggcaccggctcacaggctccagggtggagatgctgttgacactgcacggagaccagcacagtcagcgagggacgtggccagggcccccagggccacctctcaatccccacccccagtaaaaggcactcatgggacctgtgtccctgccctctcctgagay

SEQ ID NO: 95955 - DNA, 29137 bp, Homo sapiens
tattcaaaagtgatcttgagagaactggatagtaattcgcaaaagccatggcaaacactaaaattattccaattagaattaatacataaaatgacttaaatgaagacatgaaatgatgaaatggaaaaaatgaaataaaatatccaaagaaaataaaggtgcatgcttataccatcttggggtgaagaggaactttttaaatatgttaggaagaatggaaatctaaaaaaagactcgtagacagggccaagcgcagtggctcacacctgtaatcccagcactttggtaggccgaggtgggcagatcacgaggtcaggagttggagaccagcctgaccaacatggtgaaaccctgtctctactaaaaatacaaaaaaaaaaccagcttggcatggtggcacgtgccgggaatcccagctactcgggaggctgagccaggagaactgcttgaacccaggaggcggatgttgcagtgagcagagatcatgccattgcactctatcctgggcaacagagcgggactccttctcaaaaaaaaaaaaaaaagactcatggacctgactaaatgataatgtaatatgcttgcatagaaaaatgccattaaacattaaaatagattaacaagctgaagaaaatatttgtgacttatgtatacgaggattatatgagtcaatatctttaatatataaagaggctttcaaattaataagaaaaaaacaagcaagggttacaaagaaaatgaaaggaacagagaagagagacttaagctttgccagagatttcatgtcatagttcagtagcattgggggctgcacaatccagcaccatttcactgttcccactttgcagcttttgaatattgagctatgaaagtatgtgacatatgcgaacatcataaaactcgtgttttccagaacacaatttcgtacatggcttttataaatgtaccataaaggaaatttcctttacttagtaggtttgggggaaatggtggataatttaacgggtgaagcagatgtagtatttcgggattctcagactctaatacaaaggtgccaactgtgaccacagcgtgtccctgactatctgaccgtgttcaccgtggcagctctggaccgggctcggctaggagcgctgtggttcttcaatggggagcctcagtgaaccccaactatggcccgggaagaggcttcacgcacccctttcagccaggagagggggatattcggtcatttttgtgggtggccccgggaccttgtttttgtgggagccacgatttggaagtggccttattttttcactcgttttattattgtcccgaacagccttgtctgaggcctgctctgtgaggctgctgacgtctgcaggagagaaccaggacctcactgtgggcgctgggcccactcccaggcttgtctttctcaatattaaagcatcagcttcatccaaggttgagagagccgcaggcctgggtgtggcgctggagagcagtctggggacccatgggccctggggcgccttgcagtcctctctagatcaggagacgcaagagctcacgccacctctaactccagcggcactttgtcttcaggagaaaaatgaatgtttgctcattcgttcattcactccacaaacacaaaacgtatcaccccccaccccactacagctgtgactcgatgtggccactgaatgtggaggggtcaccacgtccccttcgcctgccgtgatcaccacctcagtctgcccctcagaggcccaaggacatgagtgtgtctccagatgctgggctttggctcctgctgtctatagattgatcaagcagaggtgagacagtgtcttccgcaccatgggctggagggcagagggcacacggtatggggtccccrgggctccccagcccccagcgggccatcggcgccagtcctcgcactatcacgggctcctggagagaagatggtttgcacggtcttcccacttctggagtgcgatttcccacatgggtgttttctgaaagtttcccgtgccatttataaatgcaccatcaagggaaggctctctgcagaagcagctttggaagagatgggggcttccattgattaagggtgtctgtcctatgtgcttctcagaaacttcacgcagggatgtaaatcacaaccctccaagcaggtgaggggcagacagtgtgtcccaaacaatctgactatgcaccctgttcccaagcacactcatgacagtgccttctggagggtgggagaagcggcagcccctgctggggtccagtgcattggccatcaggtctgggtgaggcttcagtgaccacccccaggctcctggggcttccacagtggaggctgccatcctgtcctttcttcctgaccctcatggccctggctgtatgtggccaccccgggtccagctgggcccaggccaaggccaggttgagtcacaggggcctttccagacccctagggtcaacagcatcagaaatcatcgtgtaggctgggcttagtggctcacgcttgtaatcccagcactttgggaggccgaggcgggtggatcacgaggtcaggagatcgagaccatactggctaacacggtgaaaccccgtctctactaaaaatacaaaaaaattatccaggcgtggtggcgggcgcctgtagtcccagctacttgggagaatgtcgtaagcttgcagtgagtggagatgcgccactgcactccagcctgggtgatagagtgagactccgtctcaaaaaaaaaaaaaagagaaatcaatgtgtagtgagctgtgggtcaccccatcaagccagcacacgggtggcttccaggctggagaggacatgggagctcatgcagaaggaagactccagatgcatccatgagtgccaggaaggggcagccacacagcggggactgtgctccaccagcccccgtagccctgcttggggagctttaaggcccaccctgccacgtttgcgtccttggggctttctggggcatggagagtgaggccagaggtcccccagtgaccagcacctgtggtccgcatgctggtgggtatatcacaggggccgatgccagtggtggcctcagggactgagctcccagagagctccccatgagaggccagcttttctggggcccatctgtagagcaccgggcctctctcctgctgagaccgctctggtctctgctgagcagcagtggggtgcacggggactgggggctctgatggatgcgaggggcttcctgtcctgtggcctacgccagggcacccgccctggacagaaccttcctttactgcaggaggttctggggtgtgaagttagaaaactgcccttccggaagccgggcgcagtggctcacacctgtaatcccagcaccttgggaggccgaggcaggcrggttacctgaggtcaggaggtcgagaccagcctggccaacagggtgaaaccccgtctctactaaaaatacaaaaaatgctgggtgtggtggcatgcacctgtaatcccagatactagggaggctgaggcaagagagttgcttgaacccgggaggcggaggttgcagtgagctgaaattgctactgtactccagcctgggccacagagcgagactctatctccaaaaaaaaaaaaaaaaagaaaagaaaagaaaaaaagaaaaaagaaaactgcccttccaggataacttgaggtcaggagttcgagaccagactggccaacatagtgaaccccgtctccactaaaaatacaaaaattagccaggcagccggggcgaggtggctcacacctgtaatcccagcactttgagaggctgaggcgggtggatcatgaggtcaggagtttgagaccagcctggccaacatggtgaaatcttgtctctactaaaaatacaaaaattagccatgcgtggtagtgcacgcctgtaaccccagctactcgggaggctgaggcaggagactcgcttgaacctgggaggcagaggttgcagtgagccgaggtggcagcactgcactccagcctgggcaatagagcgagacccccctccccaaaaattagccgggcatggtggtgcgtgcctataatcacagctactcaggagggtgaggtggcagtgagccgagatcacgtcactgcactccagcctggcaacagagagagactctgtctcaaaaaaaaaaaaaaaagaaaagaaaaataggctgggcgcagtggctcacgcctgtaatcccagcactttgggaggctgaggcgggcagatcacaaggtcaggagatcgagaccatactggctaacgtggtgaaaccccatctctactaaaaatacaaaaaattagcctggcagcccgggcgcggtggctcacgcctgtaattccagcacttcgggagaccaaggtgggcagatcacgagatcaggagtttgagaccagcctggccaatatggtgaaaccttgtctctactaaaaatacaaaaattagccatgcgtggtggtgcacgcctgtaaccccagatactcaggaagctgaggattctcttgaaccggggagctggaggttgcagtgagcagagatggcaccactgcactccagcctgggcaatagagggagactcctcaaaaaacaaaacaaaacaaaacaaaacaaaagccgagtatggtggtgcatgcctgtaatcacagctacttgggaggctgaggttgcggtgatccaagatcacgtcattgcactccagcctggcaacagagcgagactctgtctcaaaaaaaaaagaaaaagaaaaagaaaaacaggccgggtgcggtggctcacgcctgtaatcctagcactttgggaggccgaggcgggtggatcatgaggtcgggagatcgagaccatcctggctaacacggtgaaaccccatctctactaaaaaaaaaaaatatatacaaaaaattagccgggcatggtggcgggcgcctgtagtcccagctactcgggagactgaggcaggagaatggcgtgaacccggaaggcagagcttgcggtgagccgagatggcgccactgcactccagcctgtgcgacagagcgagattccatctcaaaaaaaaaaaaaaaaagaaaaagaaaaaagaaaactgcccctccttggagccaaaaccagcccccaggaattctcccctttccacttgtgctggtgggaacagccctgcagggcaggggaggttgggtgtggggctggggtcaggggacagatgggcctgctgctcccgctgtctccttctaatcactttcaatcccgtgagctcctgaaaaacaaagctctttggaataaaaggaggagaaaacaagatcattttactcaaacacagggaagtgatctcactgtcatcctcagtattctctcccttcactttttttcattaaaaaaagtaactatgttagaacagctttaaagttatacaaaccttgaggcgctagtccagaactgccgcaacccccacccagccctcaggcccccatggacactgtggttacatgaacaaacctgcagacacaccaacttagagccaaggagccacattttattcagatttcccactccctaccgcccctctctgtcccgggatcccatgtgacacttcattgtcgcagtgcctcagggtccccccgccccctgccccgctgtttttcagactctcccgctgggcggcctgactgccccagtgaggagggctcaggcactgggccgcctctgctccgacccagttcactcctggagaggctgggctgtgggtggggggagaaagccccggtgcggggcacccacccaggcgaatcctccccgagacgctggcctgggccaggggccaaggggtcatcaggctgcccctgtgtggtcacccctcatgcagtacttgcagaaggaagtcaccaggcccagcccacacttcaggggggttacctcccgcaagggtcttctcccactttcgaccagcacaattgtcctgtggctccagccctgcccggcggtcctccgccccctgctctgaagcccctaacctccctccaacaaagtcccccttcccaacccaccccgcacctcccacactgcccctctgcccaccccaccttcctgctcccttccctgcttccacgttccacccccaccctgaacctacccctcccagctccccaaccccccacctgccctgacattccccacccaacaccccttaccccatcctccagggccttccctgtttccttctctcccccacagctgccccccaaacctggggctccagactgagctcccaagcccggctcctgaacgcccctccctctatcccgccagaggaccacctcccctgaacacccccatctcctcctcaccatctacccccacccccactcccatcccaaccgaccctgagatccctgaggcccatccccaccccattctcacccctatcctgccctaaaggccacctcccctgaaacccccatcctcggcctcacacccccattcctactttcaccccgtctctacccttgccctgagccccgacccccgccactgagccctgccccggagtgcccaccctcaccctatcatcacccccatcccgccaaaggaccacctcccctgaaggcccccatctccaactcagcatccacccccacccccactccctaatcccccaacagatctccctaagccccgccctccacccacccaccctgccctgagggccacctccactaatcctcacccatctccacccagggggccaactccacctaaccccccgccctgccctacctccaccctccaccctccaccctccacccctccacccctccaccctccaccctcatccctttcttcacccttgccctgaagcccacccctatgaccttcctaaaccccacctctgagcgccctgcccctaccccacagccacccctatcccccaccccaccccaagggcccccctctactgaaacccccctcatctgccccatccccagtcctcccatctccacccctcccctgaaccccactccccactgaggtccccaaaccccacccctcactccaccctgagggccccatcctctgaaccccaatcccccagccccactgagctcttaaccctccccacctgagggttccctttccctgcccgtcccccagcttcctagctccccaccccaagtgaccccccgcagctcctcgcccctcccactgcaaaccggcactgaagggctgccccgcccccgcccctccccgcccccgcgggacacgcccagattctttgcccccatagcctggtgacctctggccacccgctgtcccaggtgggcctggatccttccagctcattctttgcctgcgccgtccctcgttccatggcccagtcctccccggggaccctgagcctggaagccccggaccactggaaccttgaacccaccagctggctgtacccggagccgtggcagcagccctgtgagtctctttcctactccctgaccatgctgccttcaagggtryggctggccaagaccatccccaggggtccctgctgggcctgagggacactgtaggaggctggggcatgggagtccctgaggggtcgaaggctgggcccagaggaaagcaggggctgcagcggccattggccccaggtcctcatgagggccctgccctcccctttttgccccatcttccatgttgtaacagggccaggcaggtggggggcacgcctcaggggacccttgagcccctctcagggctggcactggccttggctgtcctgcccctcatycctgggttgggcaggtgggtgtcaccgygggggttcaggtggccygaactagtcaaggtctgctcagcaagctgcttcccgtgctggggtgcatcagggatctgagcaggggctgacggctttctcacatctgtgtccrtgtgtcctgacrcagcatccccatggcggccatcccagccctggacccagaggccgagcccagcatggacgtgattttggtgggatccagtgagctctcaagctccgtttcacccgggacaggcagaggtgagggctcatctgcttattggaccagtcacttaggatgctgatcccaggcctggatgaggtctggagttccaggcttctggagtattcatgcattattcaggcacccgggctggggcaggaggttccccacccacagtcttcccccaggtatgggcgtttaacacaccaagataaggtgtgagggcgggatggcaggggacctcaggctcctgtgactttggaaaacgaattgtgatgctcacttcctggccgaatttaaattaagagatcagaggaagaagaaaggggctacttcttatcttcctttccagatcttattgcatatgaagtcaaggctaaccagcgaaatatagaaggtgagtgtttgcatactggcccacaccagacaaaagagacrgggcacagtggctcacacctataatcccagcactttgggagaccaatgtgggaggatcatttgagcccaggagtttgagaccagcctaggcaacatagtgagactctgtctctrcaaaaaaataaaaataaaaattaaccaggcatggtggcatgcacctgtagtcccagctactcaggaggctgagttgggaggattgcttgagctggggaggtcgaggctgcagtgagctatgataacaccactgcactccagcctgggtgacggtgagatcctggaaggaggcagtggacaccactgtgccacgtgtatcccttctccccctcccaaggcccctgtagcttcatttaaagcatatagtttaatgtattttagtttatttacagagtcagcaaccatcatcaccatctaattttagaaggttttcatcaccctgaaaagaaaacccatgtctagtaacagtcactccaaattcccccttcttgcttcccttcttttaactctaggcaaccactcctcgactttctctcaacrtgggtttgccttttctggatcctttgcatttccgtatgaatttaggatcagcctgtcaactcctgcccaaaagccagctgggattttgagagggctctgcagctccatttggggactcatgctattttaacaatattaagtcttcttctttttttttttttttttttttttgagacacactctcactctgtcccccaggctggagtgcagaggcatgatcttggctcatagcaacctctgtctaccaggttcaagtgattctcctgctcagcctcctaaagtgctggaattacaggcatgagccaccacacccagccaatgttaaatcttctgatccatgaacatgggatatctttccattttgttccatcttccttaacatcttccaacaatactttgcagttttcagtgtataagtctcatatttgtttggctaaatttattcctaatcgtctgctgtatttgacagcactgggaaaacacagtgtgctttgaatgtttcctttagacatctgcatctgctgcggaagtctccaggttcacacacagcaccctctgtttgagggagggatctgcgccccatgtaaggtaggcagggaggctgggggtgactccctcatggcctcagagcagggatgacacaagccagccttgctttgctccttccaaggacaagttcctggatgccctcttcctgtacgacgatgacgggtaccaatcctactgctccatctgctgctccggagagacgctgctcatctgcggaaaccctgattgcacccggtgaggcgaggggcctgcccaggggggtgaaggggctgaggacacacccatcctttcagctrctcattctggagtgtgggtggattttcytcccaaatggatgatttccctgagagcttctgatttctgtctccaatgcgtcatttggcatagagccctgagctatgggaggcgggtgtctacggttggcgattgtgatttttcttttcggtgttgatattgccacatcrctgtgcaggggagcgatggaaaccccacaccccaggctgccagtcatgaccggggtgacaaggggtatgctcacccctcagtcgttactccctcgcctcggctccctccgtgggctcctctcctcggtccttctgggccatcctcgtatttacagctccccactcctcaagttctctcccccagctgctgttgctacatttggttttgctgggagtccctacgctgtttctgcaggctcgagtttgggggcagacaggtggcttagggggttccttggatctgtcattgcctgtgaatccacctccctgtcttctgcacctggctcggctcctgtcactctgcgtctctaggaaggaccgtctccctcttcccagtccaccacctggtcttcccaaagggagctccagcgtgacttttccctccaaaacaaggctcaatcaggcccacctctgccatcctcaggagaggygggctgtcatgtccgctgctgtggttttctgtctggccttagatgctactgcttcgagtgtgtggatagcctggtcggccccgggacctcggggaaggtgcacgccatgagcaactgggtgtgctacctgtgcctgccgtcctcccgaagcgggctgctgcagcgtcggaggaagtggcgcagccagctcaaggccttctaygaccgagagtcggtaaggagcccgtggaggggcagcacccggcagcagcaggccctgacttacggccttccctcggttcccgctgcagaatgcaggcgcgccgacgggcaccacggctgcagcctcgggagcaaacactctttcctgggttcctctccgatagtggcttccactcgatggtggctttgggtaaactgctttggcagttttgttgcttccaagcctaggaacgaggccctggtagcagatgggagaggggccgggagagggtggctggcacgtctcaaagtccagtcctcaggagcaagtgcctgggcttctgctggccaggtgtgggccgttttgggagtccagccgaggagccaggggggccggcaggaacctcagacaaaggcagagaaggtggaattttgtccctctgagagggacatccaagtctccatcccttacctgtgaatgtgatcttatttggaaacagggtttttgcagatgtaatttagttaaggatcacgagatgagatcattccagatttagggtgggccctcaatgcagcgactagtgtcactgtaagagatttgggaaatggagacggagaagacagtcacatgatgatggaggcagagactggagtgaggtgtccaccagccatgggtgccagcagccccaggagctgggggagaggcctggcacgtccttgcctggcgccttctgagggaggcacgcctgccggcacaccttcacttcaaaacctctggcctcctgagctgtgaaagaataatttctgctgtgccaagtcccctggtctgttttttatttatttatttatttatttwtttattttttttttttttttgagacggagtctcgctctgtcgcccaggctggagtgcagtggcgggatctcggctcactgcaagctccgcctcccaggttcacgccattctcctgcctcagcctcccaagtagctgggactacaggcgcccgccactacgcccggctaattttttgtatttttagtagagacggggtttcacagttttagccgggatggtctcgatctcctgacctcgtgatccgcccgcctcggcctcccaaagtgctgggattacaggcgtgagccaccgcaccggccttgttttttatttttttatttttgagatggagttttgctcttgctgcccaggctggagtgcaatggcaccctcttggctcactgcaacctcggcctcccgggttcaagcgattctccttcctgcctcctgagtacctgggattacaggcaccgaccgccacacccggctaattctgtacttttagtagagacagggtttcaccatgttggccaggctggtcttgaactcctgacctcaagtgatccacctgcctcagcctcccaaaatgctgggatgacaggcatgagccaccgggcccagcccctccagtctgttttaatttgcaggccagccacgggaagctcctacagaaggggtgtggcccccggtgaggcagccagcggggagcaagggacccctgagctgaccatgaaactgcactggcctccagctcacatttgttaaggttgaacgaagtcatctctccctgcctagcaagcttcagcctgctccaattcgaaggaaagggtcagatgggaaggtattttataggaacagagcctagcactctgaaagccgaggcccccgagttttgggccttggggrttggccctttaacagggagcatgtgaggctggagctggctgcccgcctagcccatcaggttggcagggtcagggaaaaccacaggcctcacctgccccgaggctcacctctccccggcatctctggccttggggctctcttctccgaggttctggaagctgccaggatgagcaagaccagcctggccaatatggtgaaactgtctctactaaaaatacaaaaattagccgggcgtggtggcgggtgcctgtgatcccagctactcgggagggtgaagcaggagaatcgcttgaacccgggaggcggaaagttgcagtgagccaagattgcaccattgcactccagcctgggtgacagagcaagactccatctcaaaaaaaaaaaaaaaaaaaaaatcagcaaacccctccacacctactgtctctcggctggagacaggtcagagcgggagactgaggctggagcagggggtggagttggccttcctgggggggcagtgctggtcaggacaggcccagtcagcctcagcaggtgtgtcttatgtgtgtctccggtgagtctcgagtgagtgttcatccagggaagaattttcattgtaactcaagggctctgtagccaagtagccggcacaatgtcctgttttggttttttaataaataggagaatccccttgagatgttcgaaaccgtgcctgtgtggaggagacagccagtccgggtgctgtccctttttgaagacatcaagaaaggtgagtcagtgatgtcccaaagacacacatggaaagatgcctctaaacacctgactgcccctcaggccacccmccgggactccccaccccctcccctagaccggccaactgctgatgtcctgyacccttccccaccctgggcccatgctaaccctgcactggggcctttggaaatggcacttgtcttctgggccccgcaggcacagccaaatccatgaagacactccctctcctctggccgttagggatgtgtcccgctgggacacccactaaggcccacaagtgtctcagagcggcctcatgcgggagcacatatctgccccatgcagccgatcaggagcctgatcccgcagcscctgcacagcctgtccaaggtcttgctgcccaggaggggctgagaaagccrgggcctcctccagggccgttccagggctctgcagctcacaccagctgcagagtggagtggactccactgctctgtggatttcctagccagaggtgacatcgcatcccagaaatgcctggtgctgtaatacagtccttgacatcctttttttttttgaggcggagtctcgctctgttgcccaggcttgatctcggctcgctgcacctctgccccccgggttcaaccaattctcctgcctcagcctcccgagcagctgggattacaggtgctcaccaccacgcccagctaatttttgtgtttttagtagagacagggtttcaccatgttggccaggctggtcttgaactcctgacctcaggtgatccatccgccttggactcccaaaatgctggaattacaggcttgagcgtctgtgcccggccgtgcttgacattcttaaatcaatacttggcaatgtttgcttgtttagcttgttgtgagacaaaaacctccatccttaatcctcctgccacgtcattaaaaagataaagttgggcggggtgcagtggctcacacgtgtaatcccaacaatttgggaggctgaagtgggcggaacatttgaggtcaggagttggagaccagcctggccaacatggtgaaaccctgtgtctactaaaaatacaaaaaaattagccgggcgtggtggcacatgcctgtagtcccagctactcgggaggttgaggcaggggaaccgcttgaacctgggaggcggaggttgcagtgagccaagatcacgccactgcgctccagcctgggcgacagagggagactccatctcaaaacaacaacaacaaaaatatacagttggctccttaatggtaggagggtcctctgatcgtccgtcagccttttcgagtccctgtaggggcacaatcyacgctcaccctctgggcccttctggtctctccccatccagagctgacgagtttgggctttttggaaagtggttcygacccgggacaactgaagcatgtggttgatgtcacagacacagtgaggaaggatgtgagtaccgccgtgaactctcagacactgtagtgggagcgggggtgcgagcttcctcagaggaaatgccaaggatgaggcgggcaaggaggyggcagcaggggctgggaggagtcctgaacacacgggggcctctcggcagcctggtggggatcctgggtctgacaggagtcagcccaaccccgccggcccagccaccactgtgatgccccgcagcggagggctgagcagcacgttttggtggtcccagcattgcccagagcccagagcccagagctcagagcagggcagttgggcaaacatcttgtccaacatcttgaaatctaagtagccaaattccactgcctgtgatggggcgctgtccggcaaggaggggctgaacccccactccaccctctaaaatgrggaggccgagccttgacctggacaactggtcactgtttgaaagcatcctcccgctgctggaaggaggtgacacagctccagtcgtgcgttccccctgtaggccagattccccgctgccttggtgccttcccatgccactgtgagagaagcatgagcagccacctgtgtacaggtcttttgggggctcccggcctgggaccagcagccccccctcacctccgctgtccccaccccaccatgccttttcggcactcggagaccctcaggttgcacctgccatcaacagttaggtttatccacttgctacatcgtggaaggacacaaaatgatgccccggaggcatgaggagtttggggctaatgggattcgggctgttatgtgatttgagggggtccagggaagtggagtccattgttgactggtgctatcaggagacggggttctgrtacttgactatcttaagttttggggggcttttttgttttttgtttttgagatggagtctcactctgttgcccaggctagagtgtagtggcacaatctgggctcactgcaacctccgcctccagggttcaggcgagtctcctgcctcagcctcccaagcagctggtattacaggcacccgccaccatgcccagctaattttttgtattttttagtagagacggggtttcaccatattggccaggctggtcttgaactcctgatctcaggtgatccacccgccttggcctcctaaagtgctgggattacaggtgttagccaccacgtccagctgttaatttttatttaataagaatgacagagtgagggccatcactgttaatgaagccagtgttgctcacagcctccccttggtcactttttgtgactgaagggcatgtgttcaggcaagattgttgggtggctgtgttttgtcttcttccagctcggccatggaatagcctgtggggacctactctgtggtccccagggagctactctgtgggggctgtttctgttcagcagggaaggctctgcccttgctgttagctcctggagggctgcggacggcacctgctgtgttcacagatgacagttacttccctaggtagtctgcatgttgggcctcccaggactggttctctaagggcaatgtgaggacagacagaaaaaccaaattctgccaaagtttttaaataggtttattctgagccaataagagtgaccatggcctgggaaatacagtcttaagagatcccgaggaagtgcacctgaggcggtcagttacaatttggttttatgtatttatttatttttattttatttatttatttatttgtttttgagacggaggcttgctctgtcgcccaggctggagtgcagtggcgtgatctcggctcaccgcaagctccgcctcccgcgttcctgccattctcctgcctcagcctcccgagtagctgggactacaggcgcccgccaccatgcctggctaatttttttatatttttagtagagacggggtttcaccgtgttagccaggatggtctcaatctcctgacctcgtgatccgcccgcctctgcctcccaaagtgctgggattacaggcgtgagccaccactcccagcacaattggttttgtacatttcagggagatgcgaactgcaggtggaatcagaaaacagtacacgggccgggcgcggtggctcacgcctgtaatcccagcactttgagctgaggagttcaagaccagtttgagcaacttggtgaaaccccatctctaccaaaaatacaaaaaagttggctagtcatggtgatgtgcacctggggttgctcagggggctgaggcaggaggattgcttgagcccaggaggtagaggttgcagtgagccgagatctcgccattgcactacagcctgggtgacagagtgagaccccatctcaaaaaatcaatcaatcaataaatcaatacatagaagatgtgcattggatcagccccaaaaggcgagatatcttgaagcttacaggttataggtgggtttagggattctttagttggcagttggttgaaagagttgagctttgcctaaaaactgggagtcagtagaaaggaatgcttgagttaaaataaggaggtctgctgtctgtcatgtggtgccatggcagagtcacaatataccaggtcaaaaacacccattccacaagcttttgtggtttgtaaggcgtgattcccctacgctccttagaaaggaatttgagcaagaaaaaataaaggcagaattcagtccccaaatgcatggcacagagtcttcacctcagacccggagctttctcctctgggctccaggcaggcagcccctgaggctggtggtggctgtggatggctctgccctagtgggctccactcctcagcttgccctggcmtgtgggccctgcgagctgagcagggtctgccctggggtcatctcgtgctgccgcacgcgaccttgcccactgctgctgcctctcagtgcccactcccctctgtcctgcaggtggaggagtggggacccttcgatcttgtgtacggcgccacacctcccctgggccacacctgtgaccgtcctcccagtgagtgatgcttcagttctggcagcctgtccccaccacccctgtctcctctcctctctcctcacacctccatgccagggcagaaactgcaaattgtcagcatttttcaaaaacagctttatcgaggcaccactgacatacagtaagttgcacgcattcagtgtgtcygactggatgagttctgagctagctccacacccatgcacccctcatcagagtaagagagcaacagagtaagagtccccatcactgcaggcttccctgtgcccccaagcctcccgctgaccccatgcagcccccagcgtgcccacatcactgcagctcacgtgtcctctggagcttcctctaaaaggcggtatttgtgccgcggcacgcgctctgygtcagctcctccctcggggttgcctgtctgtctcttccccactctaggcctgcctgggggaggaggggtccatgcacctctgtggccccagcactgggcagggcttcattgctgctggagggacaggggcagggggatccctcagacccaggccggtgcgtcccctcgaccccctcagcccttctctcaagccccagtttcyttaggcccctgcccagatgcacytgaacagcgtccccatgaccagcccccccggccccccctcagccctgccccctcaccccactccaggctggtacctgttccagttccaccggctcctgcagtacgcacggcccaagccaggcagccccaggcccttcttctggatgttcgtggacaatctggtgctgaacaaggaagacctggacgtcgcatctcgcttcctggaggtgcgtgcagggctgcgtgggccgccctctgacccctgcccacgtgagggaggggcttttctggtggagctcagtctacaccccaggctccgggcctggctccttgcggcccctggtttccaggtgtgtacagggcccaggagagctgctgtgcagtccgggcagggactgcggcctgggacacaaagccccttcaaggacagcatgggagggcagtcccacctcgcaccactcctgtgctcacagaacacggcctcgggggctcacctcctgcccctgccccctcagtctccacccacacacaygcacatcacaycacacacacaggtgcacacacactgcagtgcacagtcactgtacacatgcaccacacacagggacacacttgccacacacacacaggcacactacgtgcacacatactcacaccacacacatacagccttttcttcacacgtctgaatcctgattgtcagagcagccacttttggactcagcggatgggtcccctctggggctgatgggccgggtgttccagacacttccagggttggggagggacggccacacctcagccacaggagacaggcgtgaggctcaggagggggaatttcctcatgctctcaggttccatggaggggccacagccagcgggggcccgacccaccgagtgggcagcacctgtgggccagagcctttgctgggggtccaggtggcgttgaggttcctttggtgctggaatctcgtggagtggctggaatgcaaatccagctattcagaaggggagcaaacgccatgagctgaaaatcacaaagtctgtgcttttagaacaggagactttgtttctgtaaaggggcacagcctgcaaggtcccgtcccccaggctgggaagcacggggcctccaccaagaccagaggagccaggaggaggcacttcgaaggggaggggtggctggggcaggagctccgtgctgaccgggttggctaaacctgtgcggcaggttatggaggagcggtgaatattcatgaagggggtcctgctgcgtgcgtactgaacaaaatccgtggaacttacgacctctgttcactccggggtggagtcttatcatgtcagtgtgtcgcaatgaggccctaaacctcagaggtcttctcaggacacaggccctcaagcgcacaacctctgtaaaccrgccggagccagtctgtggtcggggtcccttatcaggaggaggttcctgaagtcagtctcctgcccagtcagagctgtggtcatggctgtggaacgtggtcagttggcatctgcaggtggatgagctgcagtcatttgaaccttgctcatcctcatcgcrgggccagtgcgtgtttagccgctgcagaaaaagcagcagctgtggcgtgagggcagagtccgtcctctcagtgtagggcacgcggctcggctcgacccttgcctggcgcrgcctgaggtcctgtttgtaatttgatatcttattgccacagagtctgttctgtcagtttaaaataattcatcagcatttttctccaaaggtgattcataagaaaaaaggacgtagggaacacagtcgggctagaaagtccattgaccactcagggccattggcggctgaggccagtgggcctgtggggggcgcttaccgtccaggtcccctgacccacggccgaccctcccgcccccagatggagccagtcaccatcccagatgtccacggcggatccttgcagaatgctgtccgcgtgtggagcaacatcccagccataagraggtatttcctgggcagctgaaagygttcagggtcaaggggaacatggacccagaagyggggttcactgaggaaatggggtctgtctagcagagccaagcccagagcagcctctgcgccccagtgkgactgcggtcggccttcggggccaccctgagaccctgaagacaccgaagcctgaggatgcccctttccccttggggagcttctccagcactggctctcagcttctcggggtccagcccctggacacccatatgcgccatggcggcctggccctgaatcggctgcagcccccaggctttcattccgtgtggcctccccacctcccttgcacacccacaagctcatgcgtgctcacactcagccacactcacatgactcacttgcacgctcatccatacgcctgtgtgctcatgtatgcacacacacacagtcattcccacggtcacgctcatccacacacctgtgtgctcatgcatgcacacacagtcatccccacagtcacgctcatccacacacccacatgctccctcagtcacatgctcacacaagcacactcacgactaccacctgcatccacacgttcacatgtgctcacaatcacacaggcacacacgcatcagtctcacccacccacacgcttgcaccccctgcggtgcactcctgggctgccctccccaccttttggggccttgaacacatggcctttccccacgtgccctctctgcggctaagcamccccttctgctgcccccacagcctctcccagctgcccccgcccctcaacagcctttccaggcggcccagacctcaygacctccagccaaccgcccatccatcccctcactcccacactcgcctggcgtgcctcgctcatacgtgcattcgtgtggaacgagcgctttctggctcagctgagtcatgatctcctcctgcctgagagtgagttctggaaacttactccctctcacctccccggttccagcatctcccacgtcaccaccgaggcacgatcctgttgcctggcacctgccaaggcatggcacctgcaggtcttgctggcctggcttcccctggatttgagtttgggtggggctgagccgaagcacttttccagcatgctttctcttcagaagccctctcacctgcatgccagccttcgcacagcctccccctaaccctaagcctgttccccgccatgtcacttcctgggaggccatgccaggctctgtggggctgggtgagcgggggtgaaggtgggggcagacccagcaacacctgtgtgcattacaggccatgcctcacctgctgcctggccccagaggctccttggcccccggaggctctatgcgtccacacagcagtgagaacagcgccccatcagggttcttaagtggcaggtgcagccagacccagggttgctgctccacaaaaggcacctccctctgctccagtggccacacttgtggcccctgcaggcttgggctgtgggctggcagctgcttcttcccagcccccctttctgagcgaggctccacagagctcctcacagggtttcgagggctggatccacctgagccgtgatcctggggtcacctggttcccagaaggaggctggcagttccttcccacaggtttccctcccaggctcctgggtgtctcaacagtgacatgagagacacccactcactgaaaggagaaatccttttgcagaggtagccaccatcacccccaggatggttaaggacagtccccactgccctagggagggtgcctgaggaggaggaggaggagggggacactgtatctggcacttcactcgcagtcttcaccccaaaataaactgagaaatgttcctggcctccagtggggtggctgggagcaggagagggggtgttggtgccaagtctgcaaagcccgtcttcctcaagggctcctcacagcaggctggcaggggacctttcctctcaccacctgccctcctgcacccagggctggggctcccggcacaggcagccccaggaacccaggggacggcctttgtgatagaattccctgggaatgctcgctgactctgcgagggtttggccaacttttgcccagagtcctgtcctttcctctgcgggggtgctgcccagggatggtgacatcctctagcgatggccctggagctcgctgttcacacggagtgacccccagcctgcttcccaggggaccagcccccggccgggggaggcgggaggcaagggagtcatctggtcccctgttgctcactccacctccatgagaaaaactcccagaatcaggcgggggttccggggggggggtcttaggcacctgggacaactgagaggcaggctgttcccctcgccccctcgcagcgattccttcccagccccatctccggggccacccagtgggcgctgcgcttgctcacaaccttccctcccctcctctcagcagcaggcactgggctctggtttcggaagaagaattgtccctgctggcccagaacaagcagagctcgaagctcgcggccaagtggcccaccaagctggtgaagaactgctttctccccctaagagaatatttcaagtatttttcaacagaactcacttcctctttataaatgagtcactatactgtraagaaaaagacttttcctagaacaaaggcaactttcctcacgttgtctctttcctcttcggattcttgtttttttgcgtctccgtcgtcactgcagacccacgttccgttgggttctggagactcagggtctctcccccatcacgctggctcatgggacggggcgaggcccacgccgctgcacacaggaccacacgtggtggtgcgcgatgtacttcctgaaagcatttctgtgttctagttgagaagttcgagtatatttattataagatagttattggtcacgtctggtgttttatgtgtaggcacagccatctgtcaccctgcagggcagggggtggaggccagaagtgagcaggaggcgtcttcggagcgcctgcaccgtgtcccgcatgatgcactttctgccggggccttccccttgagaccgctgtttgcgttcatagagaaaccacgcaccctgattgtagctgcaccaaacagcctggacctttgcaaaagtacaggacctcagccttggcagacaaaggagggacctgctgaacagacggtgcggaggccaaggccagatccacacacaaaagtacaggacctcagccttggcaggcaaaggagggacttgctgaacagacggtgcggaggccaaggccagatccacgcacaaaggatgtcacttgtgggtcctaccccaggtggtattgcttgcaaaaagcagggctcctcctggccctctgcagtctgagtctcagtgaggataaacccagcagaaagctctgcctcaggctgtgctcgaatcacaggaaatgaatcttacaggggaactttggggtctgcactgggactattagtggtacgtaaaatgctttgtggaagaaaggttaaaattggaccctttgaaggttaaaaaggtgtatctggaagtagaatagaagccttcacttgagtgaacatgactgaacgcctctcccatcttgggacagtcctggatgcttacgacacacatctcacgtccagggatgaatttagcaagctctgtaatgaccccggggttcctgaagccacagagggagcacaggtgagggcatccaagtgcaaatgagccctctggggaggcctgcttgagctgacacataaatggggttgaagccattgtgagcccatgggcacgggccaggcagggtggtgagagctccagacagggcgggctgggctcaggctgtgtccacccagggaaccagtgtcatgggcccaacataactcgtggtcagtttctgtgagggctgcttcaaagcaggggcccaaggctctgttaggggctttctgccacccaaaatgcactttccttcttttgttctctccccaacactcagaactgtccacaccaccttgagattctctatgtattttattttaaatttttattttttgagacagggtctagctagtcccccaggctggagtgcagtggcacaaccatagctcactgcagcctccgtctcctgggctcaagagatcctccagcctcagcctctggagtagctgggactacaggtgcatgctaccatgcgctgctaatttttaaaaattatttgtagagatggggtcttgctctgttgcccaggctggtctcaaactcctgggctcaagtgatcctcccaccttggcctccctaagtgttggaattacaggtgtgagccactgtgcccgacctgccaagtatttgaattttatacacaggacctgtatcatgatcccatgctcagctgaaccaccctccaaaggatgcccatgtccccattcccggatcctgtgaatgttacctcatgtggcaaaggaaggactttgctgacgggattaaattgaggtggaaggcctccctggatcatccaggtgggttctacgtgtcatcccaaaggtcctcataagagaggggcaaagtgaggcttgaccacacagagaagccacatggccactgaggcggctgctggagctaagcacagggatgcctgggccacccagagctgggagaggcaggtaggatactcccctagcgcctccaccaggcaggcttccgctctccagggctgagagagaatagactgctgttgttttgagccagcaagcgtgaggtcgttagttccagcgcccacaggaaacgaacatacagtcatgcaccacataaccttcggtcaacaagcaatgccacagtgctcccatatcacagcgcggtatttttactgcacctgttctatgtttagatggctttagatacacaaataccagtgagtcacagctgcctacgctattcagcacagtcacctgccgcgtaggctcgtggccctggagcagcaggctgtgacacacagcctcggcgtgtagcaggctgtgccaccagggccagtgtgtgcactctgtgttcacacaaggacaaaatcacctaaggacgcatttctcagaaggaatgtatccttttcgttaaacaatgtatgactgttccccgaagagaaaagatcttccttggaccagaagttgagctctcagcatcagcggacgcccatgctgtcaaacgcaggttgctgtgccagaccccaaaaggacccgggcctggaggtgcatcaaggtggagatcagaagacccccacgccctcgaaacggcagagcagggcggcctggggctaggggcatcaggcagctgcttcctgcttaagcactacgactcgcacccagagcctcgaactccaggctgcacaaatacgattcctgcttggttcccagttggccctggacgctgccaaggggccctctctccacacccctagaacaaaagcctatcctgccggcccaagaaacagtcacggttgagggggaaaacgaaaaccttcctttgactacaggaaacttcccaaaggtttccctgtttcttcatctaaacccatctaagtgttgtgacacatgtgccggtgtgctgtgtgcgttcacttacaacagccccattcatgtatatgtcacacgtcaggggatgcaggcaccaaggggctaaggaactttctggggtcacacagctccggagttgggatctgaaccagccaccgcttaccgtggtctccgaggttcctgggctggtcctggcaccctcccccgcggccgcctcggcctgcctcagtgtccccttctggcccagctgccttcctgcccctgcctggctgtggcctccacgcggcgtcccctctctcgggggggcgggggggggctgcccgcagcacttggcttgctggggtctccggcgtctgcccgggaagcagagcctggacctgccccctcggccacagcacggcgggccctgcggtgtcggcccctctcccaccgcccccgggcggcactggggggctgcggggtccggacgcaccgacagggcaccttcccttcgccgccgcggatgaccggccgcgctcttgggaggccttaatttgggaggctctgctcccccaggacccattccccatcctcccaaagcccccacgcggtatccgggggccgtccccctctccgcagtcccgcgggtggaggggattcaggtgcgcccggccctgggggtggagcgctcggcccggcgtcagctcatcggcgcggcgcagccccggacctcagccgcaggcccagaggcgcgcggttcccggccggtcaatcagggagggcctccgggaggaggtggcgctgcccgcagcccgcccggctcacctgcgccctcctcacctgcgccctcctcacctgcggggccatgcggtcccttaccagcagccgcccgccccggggcgaggaacctcagcccccaacatcgccacccctccagcctcgccggtcctagccggcgtccctgggcgtgtcccgggaagcgcacgtccacgctggcgctggaccgggttttctgactccagggacgggactcgtcctaaagagtccggctcagatgcggttacgcgcctcacctcacccgggtgcggaccgccagtgcctccgccctgcackccgcgggccctgcccagctcttcccgccggagggcaggtggcccccgccccgcccctgccaggcgcgcgattttaaatccccccaacccccgtctctcagcgtggcctgggagggggaagccgcccggcttcagggcttcctgcgccttcgccgccgccctccctgcccttccccgccgccgtcccccctatccccccagcccgtctcttccgccttcttattttgtgcctgggctctctgctccgcaaaaatgttgacttcccacgggcagaggtttcagaatttttttaaagcttttgtccacggcgttctctacatcttggttgaaggaatggcagcctgcggggtgccgtctggggcccccgtctccctgcgcttctcgcctcctccatgcgcaggaggcggtggggatccgagcctcagcccagaggcgggggctccgggaggagggtgccccgctgccctgtctagcagcctcacccaggcccttccggaggtgcctctgcagaaagggagtcacgtcccccctgggcctcacctggcttgcagggatcagggagggagggcggggtgggctgggtgcggtggggaaggagcagggactctgggtcccaccctcggttgcgtggtgcagcctttcccaaaccagctgccccagactccaggccagacgccactgccaaggctgacgagcccagagccgcaagcctgcctcggtttctcggcgggggatcctcagagccagtgttaagcaaagaggctgcgccagcgcccttcacacccctagaaggctaggggagcaaggctaggtgggggcgggctggggctggcccagagggtagagcccgcccactttccctccctccttccattcatgcatgcgttcattcagtcattcattcctcagcagtcgctgagctcactcgccttaagtcctggagatcatcggagcgcagccggccaggggcctggcgctctcccagccttggggcctgggtccccggactcctgctcggggagggccgcaggaccggcgcattgtgcgcggcgcggggaacggcccttgcctcccacggtgccctccctcgctgcgccggcacccgcagcacccctggccaccttcctgccgggtaccccccacccctgcgcttcccagggcacctacggcgcccaggtccgcgtccaggcggacaggccgacctgcctctgtcccgcctccggccgacgggcacacgcctgggcagagccgaactttccggagccgccgcgcagcgccccgcctcctgtcccggggcggtctcggtcgccagaggagccaggccgggggcggggcggggacggggcggggacacggctgcctccagcacaccgcgcgctgggcgctcagagcctcgggcgcggcgggagcgcagttagagccgatctcccgcgccccgaggttgctcctctccgaggtctcccgcggcccaagttctccgcgccccgaggtctccgcgccccgaggtctccgcggcccgaggtctccgcccgcaccatgcggctgggcaggtgagccggggaaggagcggaggcgccgcggtcaggggcggggtggctcggcccgcgcgtccccagctcggctcggacgcggggcctgcggggctcgcctggaggtgccgggctggcagtgcgggtccgaggagcgggcggcggaggcgccggggcggccggcggggcgtggacggcagtgggcggcggggcctggcaccgggacccatggcaggacgcacagccgtgcgggggcgggctcgggggcggggtccctgccagggaaggaggaccgcgaacgctggaaggagggagggaaggcgggcgcaccctgcacgccggggcacgggcgctgccccttccactccctggcactgctgatttcctagaagaagggagaaggagggaggtgaccggccgagcgctctccaaggccagctggtgcccacggtctgcggacacgccctcccccacacacgtgggattccccgcagcccggcagccgatccacactggggaaggcggggctgcctgaaccaggagtgacagcttcctcctggatttttgcgaaaatatccaaaatatactcttcgcaacccacgttgtagggtccgcagcctgtgctcccctgggtgaacctgtgaggcccctgaccccagggatgcctcccgcacagctcagagctgggccacaccggagtcacactccccaggtcccctccccattaga

SEQ ID NO: 95956 - DNA, 37367 bp, Homo sapiens
gcttgtgctggaggagtcctttcagagtttgtcagatggtcccttttgtgctgactggtgtatgtgtgccctggcgggggagtggggtgggatgctggggctgagagtgtgggggtggtgggaaatgagcggttctggaaggctcggtggtctgcattagcctttattttgtttttccagcttcatgtgtccagccttctctctagtgtctttaagttgctgatgactcacaaggtgagggccattcagaggggaggtctctggggaaggtgggacggggcagggaggaatgggaggacacagggtggtgggaggcgcttctattatatggttcttgttttttgttgttgtttttcttttttttgagacagagtctcactctgtcgcccagggtggagtgcagtggcgcgatctcggctgactgcagcctctgcttcctggcttccagtgattctcttgcctcagtctcctgagtagctgggattacaggctcccaccaccacgcctggctaatttttgtatttttagtagagacgggatttcaccatgttggccaggctgatctcgaactcctgacctcaggtgatccacccttctcggcctcccaaagtgctgggattacaggcgtgagccactgtgcccggcctattatatattttgaaagcatttttagtaacaagccatttgcaacaagtgcttcgtagctgttagtctatctgtcaagtcagtgcagtctaagtatctgtgacatttaaatgtagaaaagtgtatttaaaaatgtagaaacagcctacctctggcttttcatgtctttccctccttggttcactttcatgatgcttgtgttaatgtaagtcatgcttagctctttcctggtggaatgaagtcctggggtccagaggccgctctagagggtcatgccttgtgtcctggtgctttcagaggccctagcgggactgctgtggcccctgcctggctgctgtagtccattagagggagctggcctcatggttcatcttagcctgtgccccggctctgtcgccttgtcatggagcctagtctccggcactctttaaactaaggctgctggccagggacaagcagtgttgaaggtggagaagggaggacctcgttggaagatggccttttccattgcattacttaactatatgacatctattagtaaccaatttatcccctcagtcttccaagaggcaggcaccaaagccgagaggccgagcagctcacctgtggccatgtgggccaagcccccgcctgctgctgggtcctcccgcctccgtggctcactctgagcatctgctccccacacagtttccagcacggtgggtgaggggccttgagtgtttgctgctgctgctgctgttcccaggatggaagaggagacagagggcctagggcagctactgcactccaagcacttcactaggcacttaagtttgaaaacatttacaaatttttcattgtgatgaaaaacacataaaatttaaccccccaaccctctccagatgcatagtgttagcattgtgcaacagatctctaggtctttctcatttggcagagctgaaactctacagccattgaccagctccccattcccctctccatccggccctgggaaccaccatgctgttttacgtttccatgattttggctactcttgatatttcatataagtggaattataaagtatactgtccttttgtgattggcttgttttactcaatataatgtccccaggtttcatccatgttgtaacatgtgacaggatttccttttgagacagggtctcactgtgtcaccgaggctggagtgcagtggtgcaagcttggctcattgcaacctctgcttcctgggttcaagcaattctcgtgcctcagcctcccaagtaactgggattacaggcaagtgccaccatgcccagctaatttttgtatttttagtaagagatagggtttcgtcatgttggccaggctggtctcgaactcctgacctcaagtgatccacctgccttggcctcccgaagtgctgcgatgacaggcgtgagccaccgcgcttggcctgttattctgttgatgctgttgatgttcacgtgggttgcttccacttcttggttatagtgaataatgctgcagtgaacatgaatgtgtaaatatcttttcaagatcctactttcaaattttagaaaagttttaaaaacatttaatgtagccagtaaggtctatacattgtgttcttgctttccagtttttaaacatatgccccaaagtaggttttctggatcatatggtatgtttttagtttttgaggaacttccataggagctgtaccattttatatgcccaccaacagtacacaaggggtcgtttctctcatcctcaccaacacttgtcattttctgttttgtttttagtggccatcctaatgggtgtgaggtgatgtctcattgtggttttgattgcatttctctactgattcatgatgttgaacatcttttcatatgccaattggccatttgtataatatatcttccttagaagaaatatctattcaggtagcacttaatttttttaaataaagtatttgacagtaacacagagataaaggaatctaatccacactaagaaccccccacccagcttcagaatgaaagcattcccagaggtgttagagccctgggttcccacccggaccagagcctgtgtggccaatctgccaggctggaactccacaagctgctcctgggagcatgctgctgcttctggatccacctgaccccracaaccttccagcccttaacggagacaaatactctttaatttctaacaaagaatatttcccatgattcaaccttccatttcttgaccttctgtccacttaaaaagcagattcctgttcttctaggtttacatctggctctattcctcctcactcagtggccttgagcaagtcattgaacctctctgagccacagcttctttctctatagaatggggataacgatgatacttttgaagaatagttgaagaatccatgtcaattgctattactactaatctggctctgaagggacagctgtaccctgtttgagcagtcaattgtgtgttgtctctgattttttttatttttttgagatggagtttcactctgttgcccaggctggagtgcagtggagccatcctggctcactgcaagctctgcctcccgagttcaggccattctcctgcctcagcctcccgagtagctgagaccacaggcgcctgccaccatgcccggctgattttttgtatttttagtagaggcagggtttcactgtgtcagccaggatggtctcgatctcctgacctcatgatccgcccgcctcggtctcccaaagggctgggattacaggagtgagccaccacgcccggcctgtgtgttgtctcttaaaaaggctattgtagaccagctgacatggctcctgcctataatcccagcacttggggcagccaaggtgggaggattgcttggggccaggagttcgagatcagcctcgtcaacattgcaagaccctctgtttacaaaaaagagtcccagtctcaggaggctgaggcagaaggatccctgaagtccaggagctcaaggctgcagtgagctatgatcttgccattgcactccagcctaggtgacagagtgagaccctgtctctaaaataaataaataaatacatacatacataaaggttactgtaggtttcgaagaattacctgtatttaaatgtatagtttctgggatgtgtgtgaaagatttatttggtcattcattcatacacacatggacacaaacctagaaaagtatattccgcacccctagatttttccttagtgtgtccagtagatgggaggctgggcgagtaggtgagatggttggggagatgacgcggtagagaagagaatgtcaggtagatggtaaacatcccgtgggcaggtctgagggaggctgagagtggacagcaaggtgattatccagaacacacgtccctgtatcagcatgttctgagatgaactgttctgtttttctgttccaggtaaagcttgagagcaactttgcctccattgtgtttgccatcatggtgttggaggggcttggccgctcactggaccccaaactggacatcctggaggcagcgaggcccttcctcctcacgggcccagtgtgccccccgtgatggggcagtggcctctgtgggcccttgtcaagagctggaggccactcccaagagcctctcctatggcagctgggacgttttaaaattgggacaccaatttcaaatgtaaccctccagtggtggaaggcacaccatggcttcctctgcttggtttgagggtctgttcaaaagctttgggccaattagggagtaaaaggagggaaggggcctatccattccattgtggaagctgggccaggtgccagggacactctccttcagggaaaatgttatgtggaggaggacgaataaatttattttgttttcctgtttttctcatttcttgacccgctatactccctggtcagatgggtactgctggtagttcccagactttgatattcaggttagaaaatgccatcaagtcctactgatctgtggcatgtgcacacacacacacacacacacacactctttatgtataaatatcatgcaggtgctacctgccagcataatatacacttagggcaaatttcattgtacttcaaattatcttcttggtaatttttaatagattttgctaactccttggtaacttttattacaaggtaaaacaaaactgatgaaagtggctgacataccggggacgtgagcagaacggcttggccacttccttaacatggccccgggttcacccgctagtccggaactacagtttctctgccacagtgtctgcgcctgtccacttgcaggcattaattttggtgaatatgaagagagttaatataaccagtgtgtcctcttctccatggcagcgcccagggacagacctgcagtgaccaccacctgcccctctctgccaggcccaaccacgggctttcttctcagagctgagctgatgtggccgtctggctgactaggaggggcccggggtcagcctggagggggggtatttgtaaagcttaatttctctttttttttttttttaggtaaaatcacagtttatccctgcaccttcatagattatgttgctcgtcttagagaccaccaggcagcgaatggagtcaagcccttgcgctctccgagagtcctgccctgactacaggactagtttctcccattctttccttctccaggataaagttcctcattcctgtcttttagtgagcagtatggtttaggtggacagagattcctttggtgcagtttttttcaaggaggtgatgttattttttccttcccaggtcttgaggggacattcaaagcaggcagagaggggttgggatggctccagatggctgggagggagaacaccagctggtcacgcagcccctcgtgccagtgcgcatcaggtacagtgtggaggcgggaaagggacaaaaagacggcagtctcttccctgagcctatgccaacccagccttaaagccagtggatcgaatcaagccatttgtggcattatctattgctgcgtacgaacttagcctggcacaatgcctgtaatcccagctactcgggaagttgaggcaggagaatcgcttgagcctgggaggcagaggttgcagtgagccgagatggtgtcactgcactccagcctgggtgacagagcaaggccttgtctcaaaaagaaaaaaaaaaaaaaaaaagaattatacaccactcagttttaggaggggcagaacacggggagagccctacaggatcagaggggcaaccaacaagctgtttcagaaggcatggggcagctcagcaaccataagttatgcgtgggctttgctctcgggagagaggtttcctgcagccgaaggactcacagctaatctgggtcaggagcggctgccggctcccccactcctggagatgagcgactctgtgacgtcacgggaggcgcggggcggagcgccggggaagcgaagtaggcagggrcgaggcggctggggaccgcggggcggacgggagcgagtatgtccgctctgactcggctggcgtctttcgctcgcgttggaggccgccttttcagaagcggctgcgcacggactgctggagatggtggagtccgtcagtgagtgtggggctggggatgggggcctcgccggcctgtagcggacagcgcgggtccctgggacgctctcaccttractggggcgcctgaagaggccgcgtcccgaggcatgctgggacctgtagtccgcgtgtctcctgaagccgcgactcgaggagagggaccccgctggccggagggagagggagagacttcgctgggcagatgggacaccgtgtgcagggccgtcatggtagtaggggccgcctgccctcgggagacgcacgcgtgaatgcggagcgggctgagccagtcggcgccggcgcgggcggtccaggcggaggaagcagcgtgcgcggcgggtgtggacgctcctggagcgaggcggggggcggcggcggtgaggcctagggagggcgcggtccagggtcccggtgcctggctgcggaatttagggtagagtctgttcggcagcctttaatcggagacktcacgtggccgctttttaatgctgaaaaatcactctggctgcagggagtggaggctgtcgcccagagagagcgccgtcgggtgagaggagcagaaagccggaagccaacgctggggcagcygtggcgtttaggagagtgacaggcagagccgccygcgaggtggcccgagacgcagaccggagggcggagggctgggggtgcgaggtagggagcgggtgcgaggtagggagcagctgccgaagccgagttagtggtgtgcagagattccgtaagagcaggactggaaaagagtcatggatgattccaggtcccttagatcatcagctacactttaccaagaggcagtgtggggtcgtgattccaagcgggattctggccgcacagtggctgggttcaaatcccacctctgccacactccagctgtgggaccttggaaaagtttcttattctcttaatgcctcagtttcctcacccatttggcgtccatttgcaaggaactaaatgagttactgttatctaaagcgtgtttgtgtgttttaggagatggggtctaactctgtcaggcaggctggagtgcagtggcgcgatcctagctcactgcagcctctaactcctgggctcaagtgattctccagcctcggcctcccaaagtgttgggaatacaggcgagccactgcgcytggtctcactaaagtgtttaaaacaattgctggtgcctgctaaggaccgtacaagtattctttaactgttgttgttattaaggaactgaggcccaggaaatgaaaggagtgacttgcctgaagtcccacatggatgaagaatctggagctggggcaggtgtggggtgggcagaaggcaaagccctgtgtgacttgggcaaagacagtgatggagagccatgagcgacagcccttggtcctgcatgaggagatgggggaatgccgatcttccctgaggtgctggcttgttcgtaacacacacttgtttcagagtgtgtgataattaagtgcataaatgtttatggagcatcttctatrtggctgctcctttctaggtgctgaggatatagcagaatacgagagagaatgaagtgtacattctggagaggagagaccagtagaaaagaaagaccttttttgagtactgttaagggttatgaagagaatacagctggggattaatatggagaatgcgtggtgtgggagtagaagggatattgtatttggggatggcgtgggaatgcctgggagtgtgatttgaagcgggacctgagggatgagaagtcagccatgcagagacctcaagggaagagcccggtggacataagagggcagaggaggcatcaggtggagaggccagagcccgcagggttggcaggaggccaggctggagtggagcgtaggggaagagtgggagagaccaggtcacagggacaagtgtgggggccggattagagggggctttggaggactcggaattttattctaagaatcacagggagccattggagttttaaagcaggaaagtaatgtggtctgatttattttttaaaaatgtaactttgtccaggcgcggtggctcacacctgtaatcccagcactttgagaggctgaggcgggcggatcacctgaggtcaggagttcgagaccagcctggccaacacggtgaaaccccatctctactaaaaacacaaaaattagctgggcatggtagtgtgcgcctgtaatcccagctactggggaggctgaggcaggagaattgcttgagcccaggaggcagaggttgcagtgagccgagatcgtgccactgcattccagcctgggtgacagagtgagaccccgtctcaaaaaaataaaaataaaaatgtaactaatagagttatggtgcatttttgtttttaaacttgactctcaaacatttgaagttggaacagccattatttccttggatgttgtttcttccccattctctttccttcttacaggacttgctgatagtgtcttacttccttatgttttttgatcttgagcttgttttccctggaatttctttgagatcgtgcttctcttagtctcttgagggtgccaccccaattcaggctcacattaaattctcggcttggggtttttggtccacacaggtccaacgcaggtaatgtgaatttgggtgcaaatctacctgaggactggcttctgataacaaattcttgttcccttgtccatggaaggtttatttcttgttcacccttttaccatatggggttgcagctttattcagtgacctcgtcattagccttcccaccttgggtgggccccaggctgcgtctctttccccacacctcatgtagctatcctggtggaggttcaagggctcccggtgaaggcagcttcagtgattgattgcttagcttccaggccttgtttttacttgaattttgctcttggtggattccttccttttgtgcctggtcagtgatgtttgtaaaaatcttaaaaatctcatctagcagcagagttgttaatttggagggttgttcagggtatctagtttgccacaatgcagttcacaacctggtttggaacataacattgtgaattaggtgttgagtctttgcattccttaatcatggcaatccttgtcattgttcctgtgatataattgcagactttcaaatctttgttccaaaaggtttccattttgcagtccctacttcaggttatgattaaaacaacatgtcactctagcaataacgaagcgtggggagctgctaagatgggtttgaactataatgctggcatcggcattactcagatcttttttgtttttttgatacagaatttcgctcttgttgcccaggctggagtgcaatggcacgatctcagctcaccacatcctctgtctcccaggttcaagtgattctcctgcttcagcctcctgagtagctgggattacatgcatgtaccaccatgcccagctaattttgtatttttagtagagacgaggtttttccacgttggtcagggtggtctcgaactcccgacctcaggtgatccgcctgcctcggcctcccaaaatgctgggattacaggcataagccaccgtgtccggccttcaaatcttgttttaatcagttttactgctgggcacttatacctagattgtatcaaaaagctatcaaagaagaaggctcttggccgggcacagtgtggctcacgcctataatcccagcactttgggaggtcagggcaggcggatcacctgaggtcaggagttcgagaccagcctggccaacataacgaatccctgtatctactaaaaatacaaaaattagccgggcatggtggcacatgcctgtaatcccagctactcgggaggctgaggcaggagaattgctcgaactgggaggcagaggttgcagtgagccaagattgtgtcactgcactccagcctgggtgacagagtgcgactccgtctcaaaaaaaaaaaaaagctcttgttatactatattgaatgatcctgcatggtttatttacataatgtaatatctatatgcacagctagatcctgaatgaataatataattggtatatgaggacattacggaaacagtatgctacgtcattcaagttgtaaagtggcgatatttggtaggaccttttaaacatgatacttaaaaaagtacatatatacacacatctgcaaaaactaaaaatcaccttattcataattagttattaataccttaaatagagcattccaaataaaagtgttaaattttggatgactatttagaaaaaaaaatggaatttatcatttcaatatggtaacattggttttatcatgctggttggaattctagttaaaagttatgtctttgattaataaaaggagaaaattgttaatggtgtgtgtctgtaggcaacagcttaggctttgccatcacacagcatctcactggtaaatcattaataattacaggccttatcataacattatgaaaattaaatgarttaaaacttataaaatgcttagtgtggtatctggcacatggtaaacactcaataactaccagtcatcttttagagtgggggaggataaaaacagtctgccagcctggcaacatagggaaaccctgtctctacaaaaaaaatataaaaattagccaggtctgggggtgtacacttgtatgtaatcccagctacttgggagggaggctgaggcaggaggattgcttgagcccaggaggtgctcagtcagcagaaggatcgcttgagctaaggtcacgccactgcactctagcctgggcgacagagcctatctttaaaaaaacaaacaaaacagccgggcrcgtggctcacgcctgtaatcccagcactttgggaggccaaggtgggtggatcacctaaggtcaggagttcgagaccagtctggccaacacggggaaaccccgtctctactaaaaaaaaaacaaaaattagctgggcatggtggcgtacacctgtagtcccagctacttgggaggctgaggcaggaggatcgcttgaacccaggaggcggaggttgcagtgagccaagattgttccattgcactccagcctgggtgacagagtgagactctcgcaaacaaacaaacaaagaaaacaaacagtcctagctaacatgtatcaagaaccactgccctgttactgttcacgaatctgtgcattatgaagacaagatattttaatgcacttttcctacaggtacgaatttctgtgctacataaaagagaatatggtttacaagctgattcttatctagatgaaattggtaaacatattttatataggaattctcttaaaaattttttatccacttctgtttattagcatatatatggctgatgaataggttttaggaatagccccagtaggtgcaaataatttaaattagatgcaacgtataatatttatactccaactgaataaattgactataactcttatggactctgtgccacaacttgtcaagtgtctgaatgaaaagaagaaaaaagaaacacgtattcaaacttactgtttaaagttctttgttcagagccattagcatatttaataggatttgcgagtcctctctcccatatggttgtcttttaataaagattgtaataggcagaggacataatttgcctcaaatagatagctaaacaaagcaaaattaatttatttttctgagtaagttagtgacctgctaacaagttcacagtcccttaactaaaacctttggggctrgcaccccagaatcaacacattcaaatttctagtgcaaaataatgaatcttcactaattgaaaaccaaaattagcctcttgtcagttttggtcagtttttgctgctacacatgaagcaagcttagtaaaaagtgagtatttcaagggattgtgaacttctgtctatatttcagtggagatgagaaacattagcgttggttctaggatgtarctcagaggagttttggatgacttaacgctttgagaatgtagcacgctgtctgccatgttgttttgtcttgcagtgccggtggtggtgtgcacattgagccccggtatagacagttcccccagctgaccagatcccaggtgttccagagcragttcttcagcggactcatgtggttctggattctctggcgcttttggcatgactcagaagaggtgctggtaagtgcaggagaagagcacttgtcgttttttgggtkggggagggaggatgtattaatagcttgtttatttttctgttgtagaccatttttctgtctggacatcgccctttgccaccactttttccatatgtatatacaagaatcctgttatttaatgaaacatgttatcttctcacctttttttacacgaggatgtatatttaggtggtccgtttcttatggtttctgttaggttgccatcttagggagactaaaagctcattttttttttttttttttttgagacacagtttcactctgtcaccaggcaggagtgcagtggcacaatctcggctcgctgcaacctctgcatcccgggttcaagtgactctggtgcctcagtcccttgagtagctgggactacaggtgtgcacccccacgccggctaattttttttgttgttagtagagacggggtttcaccatgttggtcaggctgctctcaaactcctgacctcaagtgatccacctgactcagcctcccagagtgctgggatcacaggcgtgagccaccgcgcctggccagaaatgaattcttttaccttctgaactagcggttcattggtaggttaggtttcacacttaaattcctttaaatgatgaatgtcttctggtctgtccagaggcccagggcagccaggtttgggtgggatggatgtgagttaatttgtcttgagaagggaagttagttttagtgattttctattttatttatttatttttgagatggagtctcactctgtcacccaggctggagtgcagtggtgcgatcttggctcactgcaagctccgcctcctgggttcacgccattctcttgcctcagcctcccaagtagctgggactgcaggtgcccgccaccactcccggctaattttttatatttttagtagagacggggtttcaccgtgttagccaggatggtctcgatctcctgacctcatgatccacctgccttggcctcccaaagtgctgggattacaggcgtgagccactgcgcccggccagttttagtgattttctaacatatcattagcctcaactgaggttttaccacatttgcagaccgttctttgggaaattacgtctttaagacattgaaatctgtgcttgtttatccaggatactttgagttgtagtaaatttgggtttgtttccaggataggaaaaaaatcttaagcagtatgtaagttttagaagcatcaggttgcttcatatcccatttctcttagaacttctctgtgccgttgtccttcagtaaggagctgcctgggtgtctgtgaactgtccacacatttactatttgaggtgcccctgcctcactgtaggtcagctgtccggagtatgtacagtatgtatagctgttaggcctgagatgatgatgatgcagccagataagcccttagatcaggattggagatgaggaagtccacctgaggcttctccatttcacagcagtaatgttaggagagttggaaacatattttgccaggactttgccaggatgtcaggaacctttgaaacctattgcctccacttccccctaccctccctctatcacagacacgtaccattggcttaggctggtacctccaaatggggaggcttttaaaattcagaccagagcccatataatgaacaaactaaagaacaggtgggccatcgaataattaaagtagaatttgttcctgtggtcaggggctgagccatattgtttttttttttttctttccaagatttatttaacaatttaattagttgcacagaatgtaaattcttgacttttctttcttttaaatggttgtcaccagggtcactttccgtatcctgatccttcccagtggacagatgaagaattaggtatccctcctgatgatgaagactgaaggtgtagactcagcctcactctgtacaagtgggtgtgctccaaatttctttatgtcatatttaccttttttcataaacattagtttttactttgtgcctatgatggacttgaaaaaactgcatattctaacagcatgaagttgagttaaccatgtcctgtatctgcttttttttttttttttgagacagagtcttgctctgtcgcccagactggagtgcagtggcgtgatctgggctcactgcaacctctgccttccaggttcaagtgattctccttcctcagcctcctgagtagctgggattataggcacatgctaccacacttggctaatttttgtatttttagtagaggcagagttttgccacgttggccaggctggtctcgaacttctgacctcaagtgatctgcccacctcagactcccaaagtgctaggattacaggtgtgagccaccacgcctggccatgtatctgatttctgccttaagttttcacatttgctttggtctcttcttccttttcattgtatgttttattttatttacattttttattttgtagagacagggtgtcactatgttgcccaggctggtcttgaactcctgggctcaaatgattctcctgcctctgcctcccaaagtgctgggattacaggcatgtgccaccacacctggcccattgtataataaaaaaaaatttttttcctaagttaggttataattttagggtttcatttatccatccactgatcaaagatatattaagaccaattctgtgccaagcacaggcctacagtggtgaacaggacagatggagcttacagtaygtagctgcaaaactacagtgtcctgctctcaacatttaaatagatccagcatatgggagtattactatatagaactatatgaaaactaactctttaaacagtaaagggttatggctttttcattttccaggtcaggaagtcaagartttttcttctttaaaaagggaggtactaagaaggttccctttcctcataaacccctaggggttaatatgtttttatttaacatgcttttattttatattttattttattttattttattttagtttgttatgttatgttatgttatgttwtrttttatgttatgttatgttatgttatgttatgttatgttatgttatgttatgttatttgagacagggtctcattctgtcatccagactggagtgcagcgtgatcatggctcactgtaaccccaacctcctgagctcaagtgattctcccgcctcagccttctcagtagctgggactactactcttggctaatttttgtatattttgtagagatgaggttttgccatgttgcccaggctgatctcaaattcttggactcaagtgatccacctcttggcttcccaaagtgttgggattacaggtgtgagccagtgtacctggccaacaaatttgttttaatgactggactgtaaacccttgagagaggaagggtgattttgcttctcttgtctacaaggctgtcacatgatcagtgctcaataaatacttgaataattgaataaatgaattatggatttgaattagtgaatataaaagtacttaaagctttctacttttgttttcctgcaggagccaggtgagaatttcaaggattatcgacttcatattgcacattaaagttacaaattaaagtggcttggtcaagaatgagaatggagttgtggatcttttttttgggggggggtggggtggtggagaggtggtgsgaggggggcgggggacaaatctcactctgtcacccaggcttgagttccgtggtgtgatctcggctcactgcagcctccacctcctgggttcaagcaattctcctgtctcagcctcccaagtagctgagactacaggcgcctgccaccatgcctggctaatttttgtatttttagtagagatggggtttcaccatattggtcaggctgtgtcaaactcctgacctcaggtgattcacccgcctcggcctcccaaagtgctgggattacaagtgtgagccacctcacccggcctggatctttctgataaaggcaactaccctttatggattattattttttccaactcccgcgcttagtggtttagtgccctttcagccgatcctcttaggtaccccattgacatagacaggcattagctccatttatcaatgaagactgcaaggttcacagagatgaagttacttgcttagcatcacaggctggtaggcagcgagatgaggactccagagctcacccttagctgcagggctgtgccgccaccacctcagctggtgtcttagctgtgtgtcggcacttcctgtgaaaactcttgccctttgtccactgcactggattcttgccctgagtacacagaggttagaggtcagtgcagtcgatttatgaagtagctcctgtggactgggcagttgtgttgaggggccgttgtgcaactcttaaggcatacttcttttttttttagtttttatctcaagttttaatgaacaattagaagacaagtagtttgacctttatgactaagtttcaatatattcttacagtttttatatatttaatataggtttagaagcattttttacataaaaatattcacaaataacatttctaattatcatttaagtaataaatattctaaaacatatatttaaactaaatagtggaaatgcaacacagttatgagtattcttatataaaagttaagctctaataaatggaaccagagaaagttgtataggaaaacaatattttcccaaccgacattagtttagaaactaatgttgattcttaaggtattaaatgatttctgagtcatataattggcaaattgtctgtggcatggtgtgccataaccattatcacttgttaatgtgtaaaaatattttaaattggcaaataaaaagcattaaatgctttcttgaatatttcattttttgccacttcaaccataaaatttatataataaaatatttacagaaaatgttattgtcaattatatgaaatattagaaaatgacaaacaacatgttagacttagtggtacagagtagattgcaatgtaattcctgataactctaaccatgtcaattggacaggtccacaatagtagaaaaggatttttaattgagcagtattaaaatatttactatcttggagactaggatcatttctttttaatcaggactaattcattagcaaaacttttaaaaagtattaatgtggcaactttccaagttacagttttcatatatgtcttatgaatgttcctgagcccttttcatattttattttcacagtgtatttccttgctcataatcttctccccagggatgggagcaccattcttgtaagacaaattctgtgattattcctcttgaaaaatctattatttttagtcctgacacagagcaggtactcaaatgtttgctgaatgcatgagcaaatccagctttatctgctcttgtctataaaggaaaccttttcaatatagtaactggggttattcatattttttaaagctctgatatgctaataattccactccaatgacacatattacattaaattgcaaatatatttcaaaatactgttaaccacaaagctttatcaaatatccttcctactacttttttttttttttaaattttattattattatactttaagttctagggtacatgtgcacaacgtgcaggtttgttacatatgtatacatgtgccatgttgctgtgctgcacccattaactcgtcatttacattaggtatatctcctaatgctatccctccccccttcccccaccccacaacaggccccagtgtatgacgttccccgtcctgtgtccatgtgttctcactgttcaattcccacctatgagtgagaacatgtggtgtttggttttttgtccttgtgatagtttgctgagaatgatggtttccagtttcatccatgtccctacaaaggacatgaactcatcattttttatggctgcatagtattccatgctgtatatgtgccacattttcttaatccagtctgttgttgttggacatttaggttggttccaagtctttgctattgtgaatagtgccgctgtaaacatacgtatgcatgtgtctttatagcagcatgatttataatcctttgggtatatacccagtaatgggatggctgggtcaaatggtatttctagttctagatccctgaggaatcgccacactgacttccacaatggttgaactagtttacagtcccaccaacagtgtaaaagtgttcctatttctccacatcctctccagcacctgttgtttcctgactttttaatgatggccattctaactggtgtgagatggtatctcattgtggttttgatttgcatttctgtgatggccagtgatgatgagcattttttcatgtgttttttggctgcataaatgtcttcttttgagaagtgttatgttcatatcctttgcccactttttgatggggttgtttgtttttttcttgtaaatttgtttgagttcattgtagattctggatattagccctttgtcagatgagtaggttacaaaaatttcctcccattctgtaggttgcctgttcactctgatggtagtttcttttgctgtgcagaagctctttagtttagttagatcccatttgtcaattttggcttttgttgccattgcttttggtgttttagacatgaagtccttgcccatgcctatgtcctgaatggtattgcctaggttttcttctagggtttttatggttttaggtctaacatttaagtctttaatccatcttgaattaatttttgtataaggtgtaaggaagggatccagtttcagatttctacatatggctagccagttttcccagcactgtttattaaatagggaatcctttccccattgcttgtttttctcaggtttgtcaaagatcagatagttgtagatatgtggcattatttctgagggctctgttctgttccattggtatatatctctgttttggtaccagtaccatgctgttttggttactgtagccttgtagtatagtttgcagtcaggtagtgtgatgcctccagctttgtgcttttggcttaggattgacttggcaatgtgggctcttttttggttccatatgaactttagttttttccaattctgtgaagaaagtcattggtagcttgatggggatggcactgaatctgtaaattaccttgggcagtatggccattttcacgatattgattcttcctgcccgtgagcatggaatgttcttccatttgtttgtatcctcttttatttcattgagcagtggtttgtagttctccttgaagaggtccttcacatcccttgtaagttggattcctaggtattttattctctttgaagcaattgtgaatgggagttcactcatgatttggctctctgtttgtctgttattggtgtataggaatgcctgtgatttttgtacattgattttgtatcctgagactttgctgaagttgcttatgagcttaaagagattttgggttgagacgatggggttttctagatatacaatcatgtcatctgcaaacagggaccatttgacttcctcttttcctaattgaataccctttatttccttctcctgcctgattgccctggccagaacttccaacactatgttgaataggagtggtgagagagggcatccctgtcttgtgccagttttcaaatggaaagcttccagtttttgcccattcagtatgatattggctgtgggtttgtcatagatagctcttaatattttgagatacgtcccatcaatacctaatttattgagagtttttagcatgaagggttgttgaattttgtcaaaggccttttctgcatctattgagataatcatgtggtttttgtctttggttctgtttatatgctggattacatttattgatttgcgtatgttgaaccagccttgcatcccagggatgaagcccacttgatcatggtggataagctttttgatgtgctactggattcggtttgccagtattttattgaggatttttgcatcgatgttcatcaaggatattggtctaaaattctctttttgggttgtgtctctgccaggctttggtatcaggatgatgctggcctcataaaatgagttagggaggattccctctttttctattgattggaatagtttcagaaggaatggtaccagttcctctttgtacctctggtagaattcggctgtgaatccatatggccctggactctttttggttggtaagctattgattattgcctcaatttcagagcctgttactggtctattcagagattcaacttcttcctggtttagtcttgggaggatgtatgtgtcgaggaatttatccatttcttctagattttctagtttatttgcatagaggtgtttgtggtattctctgatggtagtttgtatttctgtgggatcggtggtgatatcccctttatcattttttattgcgtctatttgattcttctctcttttcttctttattagtcttgctagcagtctcaattttgttgatcttttctaaaaaccagctcctggattcattaattttttgaagggtttttgtgtctctatttccttcagttctgctctgatcttmgttatttcttgccttctgctagcttttgaatgtgtttgctcttgcttttctagttcttttaattgtgatgttagggtgcccattttagatctttcctgctttctcttgtgggcatttagtgccataaatttccctctacacactgctttgaatgtgtcccagagattctggtctgttgtgtctttgttctcattggtttcaaagaacatctttatttctgccttcatttcattatttacccagtagtcattcaggagcaggttgttcagttgccatgtagttgagtggttttgagtgagtttcttaatcctgagttctagtttgattgcactgtggtctgagagacagtttgttataatttctgttcttttacatttgctgaagagtgctttacttccaactatgtggtcaatattggagtaagtgtggtgtggtgctgaaaagaatgtatattctgttgatttggggtggagagttctgtagatgtctattaggtccgcttggtgcagagctgagttcaattcctgggtatccttgttgactttctgtctcgttgatctgtctaatgttgacagtggggtgttaaagtctcccattattattgtgtgggagtctaagtctctttgtaggtcactaaggacttgctttatgaatctgggtgctcctgtattgggtgcatatatatttaggatagttagctcttcttgttgaattggtccctttaccattatgtaatggccttctttgtctcttttgatctttgttggtttaaagtccattttatcagagactaggattgcaacccctgcctttttttgttttccatttgcttggtagatcttcctccatccctttattttgagcctatgtgtgtctctgcatgtgagatgggtttcctgaatacagcacactgatgggtcttgcctctttatccagtttgccagtctgtgtcttttaattggagcatttagcccatttacatttaaagttaatattgttatgtgtgaatttgatcctgtcattatgctgttagctggttattttactcattagctgatgcagtttcttcctagccttgatggtctttacaatttggcatgtttttgcagtggctggtactggttgtccctttccatgtttagtgcttccttcaggagctcttgtagggcaggcctggtggtgacaaaatctctcagcatttgcttgtctgtaaagtattttatttctccttcacttatgaagcttagtttggctggatatgaaattctgggttgaaaattgttttctttaagaatgttgaatattggcccccactctcttctggcttgtagagtttctgctgagagatccgctgttagtctgattggcttccctttgtaggtaacccgacctttctctctggctgcccttaacattttttccttcatttcaactttggtgaatctgacaattatgtgtcttggagttgctcttctckaggagtatctttgaggtgttctctgtatttcctgaatttgaatgttggcctgccttgctagattggggaagttctcctggataatatcctgcagagtgttttccaacttggttccattctccctgtcactttcaggtacaccaatcagatgtagatttggtcttttcacataatcccatatttcttggaggcttagttcgtttctttttattcttttttctctaaacttctcttcttgcttcatttcattcatttcatcttccatcactgataccctttcttctagttgatcgaatcggctactgaggcttctgcattcgtcacgtagctctcgtgccttggttttcagctccatcaggtcctttaaggacttctctgcattggttattctagttatccattcatctaattttttttcaaagcttttaacttctttgccattgatttgaatttcctcctgtagctcggagtagtttgattgtctgaagccttctctcaacttgtcaaagtcattctccgtccagctttcttccgttgctggtgaggaactgcattcctttggaggaggagaggcgctctgatttttatagtttccagttttcctgctctgttttttccccatctttgtggttttatctacctttggtctttgatgatggtgacgtacatatgggtttttggtgtggatgtcctttctgtttgttagttttccttctaacagacaggaccatcagctgcaggtctgttggagtttgctagaggtccactccagaccctgtttgcctgggtatcagcagcggtggctgcagaatagtgtatattggtgaaccgcaaatgctgctgcctgatcgttcttctgaaagttttgtctcagaggagtacccggccgtgtgaggtgtcagtccgcccgtactggggggtgcctcccagttaggctactcgggtcagggacccacttgaggaggcagtctgcccgttctcagatctcaagctacatgctgggagaaccactactctcttcaaagctcagttggaaatgcagaaatcacccatcttctgcatcgctcaygctgggagctgcagacgggagctgttcctattcggccatcttggctcctccccacaaggcatactgctaactagtttttggggccagaggaatgggtgaagcaggagtttttactttttctaaaatttgttgcaaagcactttccaactctctgagactggacagaattctcctctacccacagatctgtatctatgtatctattttgtagagatagggtctgtcttagtcacccaggctggaggggagtgatgcgatcctagctcactgcagcctcaaactaacttctgggcccaagtgatctgcctcagcttccccagtagctgggactacaagtgtgtgccaccacacttggctaatgtgtgtgtgtgttgacagagagtctgtgttgcccaagctggtcttgaagtcgaggcctcaagtgatcttcctgccttggcttcccaaagtgctgagattacaggtgtgagccaccgtgcgtggactccctttttttctacttaggtttttgatcactcaggcgttgagaatctggtactaaagaagataaggttctgttctcagagaacttattagaaagggtagacagtcactaaccaagtgagatttactaagtgctgtggaggaaatggcactgggtgaggtgctagagatgggcgagaaaagcaaattgaacttttgactggtcagggagggcatttgagctgaaagcggaacaagtaggaggagccagttgtgcgagggtgargagtgttctgggagtaaggaacagcaggaatcaaggtctcgcatgggaccacagtcactcccgtgtttaaggaacagaaagtccagggcatctcccactggtgaggagagggtgggactagatctcataagcagaccagggccacaggtttagattctgggttgaatgcagcgagcagcctctggcaggctttaagctggggtatggtatgataggctttcctagtaactgggtttccagtcccactttggttctctttggatgtcacagagcaggcaccatggcaggaaaagctgaagcaagtggaacagttgcaccctcccctgctgacagcttcagcagtcctgtccctcttgcaaggggtgctggggacacttctccggttttgtgtttactcacctgtgtgtgagctgcctgagctgatgaagtgatgtttaaggtctttacttttaaaaccatcagatctctttgtactttttaggtttcatttttccttgtcttccactcacccccaccccatccctcatgaccgcccactccccaatatcaataaaagtttttttggaaagaatacaatctacaacagtgaactcaggataatctcattagccccattccttagaaatcagttgcttgatttaaaagataactttaaaaagagcattcttttgtttaaagaataaggaggccatattggaatcctcttttccacatgtgggccatggagggaattgttccaagccttctcaaaggaatggacctccacccgctgtatagcatatgggaaaatacttaacgtgggaggagtcccaaaaggattttaagtacaacatttgaytgatgatggcaatatatagttacaggaaataataatgaaaacttactatgggccaggcactgttgttagcacttaatgtgtaaatttatcaaatcttcayattattatttccactttataggtgaagaagttgagctatagatgggttaggtgctttgccaagctcatacctgagattcagatcctgctgtcttgttctaggcggagtcagatgatctgagtcaacacagcttggtgtcagcctttttgatcacagtttaagaatttcatattacctagcatataaatatacttgtgtacacatatatcaaaccaaaagttcacaaaacagtatttaccatgatgcacactattttcattttattctacatactaaagaagaatggccagttgagacctcctaaactgattttacagcctactaagttgtctcaatctgacatttgaaaagctggtgtaatgcttccagaactcaggctgttggagtcagacttgctggatctgactaggagctctaccatttgcttgctatgagtttgggcaaataactttgatctgtaccttaatgtcctaatttgtagaatggattaaaaaggttaaatgagttagttaggtaaagctcttagaactaggcctggcctgaatgaaatactctctaaattgaatcagttgttatttctagaccattggacctaagctaagtgtagtgaccctgggatcccagtttgatttttatagaaaaacttccagatagaccagattgtaaacatattccagcagacgcagtgccacccctcccgtcaaaaatatgccaaagcaaaaaaacacatttacagtatctgttcctctcttcctgatgagcagctacaagtacattcaaagttaagttttagggtatggcctcaaatggcaacagaggtccagtgttaaattttagcacacacgtttgtaactttgttagtttcctagggaaccttaatgtaaataccacaattagttgtctaataaagtttgagatgagaggtgttgcagaagaacagctgttatatgcatgttataggaagatacagaagtcatcttggttccaattgcccctagaactattttatagaagaggttgaccctgtcgcctgctgcaaccatttcaccaggagcaatggtgggaaacaccaacgtgcagtgtcagggaaatgggagctccctgaggtggcgtgtggacctgcctcagcaggtgccttttgtttacactagcagtgtcttcccagattggtgatgacaacagtagggacaagtggagcatgcctaacacaacaaccatttctggctatgaactcactgtcatggagtcaatacccatttctatccaaatctcgttacagccatcgtgacaaaattatatatctgtaatatatacctatgtaaaatgcatgttacagatcttgggtcctggctacataagcctagcgagtcatatcctttggggctgcatattcagcaactgataggagaggagttggaccagtttttttttttctctgaaacagggtcttgctctgccgcccaggctgcagtgcagtggtgcaatcacagctcactgcagccttgacctcccaggctcaagcagtctcccccgacctcagctgggatcacaggtgcgtgacaccatgcccagctaattaaattttttttttggccaggctggtctggaactcctggcttcaagtgatcctcccactttagcctcccaaagtgctgggatttaggcgtgagccattgagcccaactcagtgttaagaacactttttgccctaacattttgagtctaggagaactatataactcaaaagacagtaggtccaagtgtcacagcccctgataaaatttcagaagagctagtgtggtagagttctttataatacaactttataataaccaaagtgtccatagttctgggctaaattttaaggaaaacctcacatatatggtatagtatgttcttaaagccacatctactctgttgtaatcacacatgaaggtttagaaaatgaatttctatgatgtttatattatagaattaccattttcagaagagaaaaactgcagttcataggaaattaagtcttgacatttatttttatttttagcgtgggtgtcttgctatattgccctggcttgcctcaaactcctgggctcaagcaatcctcctgccttagccttttaagtcttgataacattttattgtttgggaggaggggtgaaaccagattcctcaggcacaagccctttttaggcttttctgttccttcatattattctcagacataaggataaacaggtgaagtgttttttttgagacagagtctcgctctgttgcccaggctagagtgcaatggcgtgatctcagctcactgcaacctccgcctcccaggttcaagcgattctcctgcctcagcctcccgagtagctgggattacaggtgctggccaccatgcccagcttttttttatttctttctgagatggagttttgctcttgttgcccaggctggagtgcaatggcacwatctcggtcggctcactcccgggttcaagcgattctcctgcctcagcctcctgagtagctggaattacaggcatgcgccaccacagccggataattttgtatttttaggagagagggggtttctccatgttggtcaggctggtctcgaactcctaacctcaggtgatctgcctgccttggcctcccaaagtgctgggattacaggcgtgagccaccacacctggcctaatttttgtattttttagtagrgacagtttcaccatgttggtcaggctagtctccactcctgacctcaggtgatccacccgcctcggcctcccaaattgctgggattacaggcgtgagccactgcacctggctgcagatgagttttaaaacggtttacttcctttctggaaactctgcccagtaatttgatatattttgtctgaagatactctaggagtttttcagacttcagtgaattttatttggggaagggtcatgaaatcaaatgcagaaaatcaactcactgaggtaaccagcataaaaaaaaatgaagtagaaaacatgagtgcatagtttcaagtaaatgttagcgtgcgtgtgctgtgttgctatagaaaatgtaagctgtcaaaagtttgaaaaaatacaattctaaggtgagtttctgcagataaactttaaacatgactaaagtagagcacatactccaactgaaccacatggaggaaagcagtggtttgaaactaaagatacatcaggtcacaacatctcaaatatttaagggtcatcaccaacacctgacaaacgactgttgccactgcaagttgtatagcacgtataacctaccatgcatgaaacttgacaacttacttgaacttctacccactaagcagtaaccaacattatgtatgaaacaaaatgtacatttctcagtctctccattgtctagaaaaactgttaaaactgctgactacttttgttactgaatgtaatcgtgttagaaaaatagtcttgatgaagacttctccatgcagtcaatctttattatagcagtattcgcatattcacatcaagtacatagaactttttttgccttttatataatacagtttttaaataactttacacagaaataaatttcttcaatctgaatttcagctatctttttttattctccatgctttctatccaaactgaacaatattttctgttatacaaatttacatgagaaaaactccaaagtacaaatgaagggacctgagcaggaaagagaaccaaagtatcaggaagtgggtatgggggagaattaaaaaaaataataaaagattcaagcaaacattgagaataggggaaaagagggagacatcatccatttgactgaaaataaatgtcttttttatgaattgaaaaataagctttaaaaatagttactccattgtaatttttgcaaagcaggtatagagaggtctgtggacaattaaaaagtccccatcttttcactgggcacgccccagactccacgagaaccttttcaatgcttgagtggaactgaagtgtactaaacccgaacctttggcagtaacagaaaagaggaatgtgtgtgtgagtcgccataaggtttggagtggtgaaacaggaaccgtgaattcactgcagttcaaacaggaagcatctccctttcctctcccttacaggagtcatgtcctcaaaccaaggaatacatgaaaaggggggatttcctttttcttggtctaaaccaaagagcaatgacaactactgaataaaattcagagacacatgttgatgaatgatcaaattcaatcccctgatcagttgtatgatcctatcttaggaaaggcagcaattgccatgttgaggaaaggatcagatgtacaaccaacaaatgagattaccacaaatacatatcactgtgatacagtcctcaaaaatcaggcgatatcatgaaggccaaactgagtctatatatgtggcatggccaaaggaaacacggaggacccatggatgcattttaaaatgaaggcaggagaaggggacagcacagagacatacacccctgtatgtaaactaacataacatgaagataaataagacataaaggctagccacttacgttggtcattaacatgaataaaaaggcattatatgttgatatagctggttttaatcagctatggaacatacacaaatgtattaggaaggaatgattcttaaaaaaaccgttcacagcttagaataaaaagcatacttattgcactcttacatttgatttcaggtaattacagtttatttcccaccctcacattaatttttccctatcctagatttactgccacctcaccccattttggtctctgttctctacatctgtgcctactcygtgagctttgttgtttatgctagtttgcagtgacttccaactcatactccaccaaaacacacgtgggttcaaaaacttaacacaaaaatgcaacgcagtaattttcaaaacaaaaccaggactaagcaacttcatcaaaacccccaatcccacccgtcaacagacccttcctttgcggcatctcttcacaaattttctgccaactctcccgcatatgtgctgtacatgagaaccagcggtcacggtgctggagaatgaactcggctggccgggagaagcagatggtttgtacaaacattttttgatactaccatgaataaacatattttagttgttttcagagcacttctatctacagaattctttaaaaaaaaatgcacctctaaaaaatggatacactggcttacattggctgtgtcctcatacacactcgtcaagtcactataattattcaaaatagctaaataaatgtcaacattttaataaagctgatttagtaattaataaaacttaacagytgaagttgtggatgttaaataaaagtactttagtcactcattgagttgccgactaattgccccatgcattttttttttttaaagcactgttaccttaatttaagattttaggagttgggtttctgtccttttccacattaaaaatacctgataggaactgttaattaccctttccacaattaacaaaaattagaattgaatttcaatttaaatgtctttgcccaaacaaaagtgaaaataggttatttgaaaacaacaaaacagagcttactgtctagtgtactaataaaacaaacatcttaccagtatttttaattttaccagagctagcaacatggaccacagatatactggtgactccgctctcctctggccaagctacaaatcatcacctgaggcagagatgctactaccctcttctggggctcaactaccgatgggcatcagtaatccatcccagtataacatttyaaggatgtgctggagacaatacatggactttctctttcaatggtgaggaatgaaacaagatacaagaaccacagcatggaatatgttttcttttacatccaatggccaggtcataaaggatgccttgagacctccaccctggcccccacagcgctttgggacaggatgactaacgcagtccagcttcatgtgcaatcaagtcccgggaagaaatttacatttcaaactctgaaaaatcagtgtctaggttggcagcagtactctggaaactgataaaaccaaattcggtcctatatttcaatttccccttctaagttaatacmtgattgctgcccatcatacagtacttcaaccctaaactacagcaatttctgtcaacatttctgttgtataaaagttccatgctttgaagagcctatgggagtagaaaaagtttctctagaaatgtcactgaactatatttgcaacctagttgctctatgtgataaatatatctgactatactagggattatgtgctttaaaaaaataattttgttcactgaaaatttacctgtgtgttttctcattgttaaatgtgattttggctataaactctttagtgcatttacctatgcagtctaaattgcactctaaaaattattaacacagctgagttaaaccagagtggctgctctcttcacaaatcactgatttctgctaaaatgttagcttttttattgcatcatgaaggcacrgtaagatcatttggcaaattgtcaaggtatttttctagagcctcacctacaccatttcaactcatgacctgtaagctatttgctgttcatactcacagtaaaccttccatctctggctatggtgtttatagcctaatggttggaatctgctcgtctcaaggtgctggtattcctagcactaacaatgccaacttggacaaagaagagaatcttgcaaaaagagtaatcattctaccctcttagctgggtggtctttctatgaatgcctgtgcatgtgacaaagctgcagcaaactcattaygaggatgtactgtcatgccaagcctactgaaaattaaaattacatcactgttagtgaagtgataccacagctatttaatttcatgcaattgactcaaggttaagattctgaaacgtacccctaaaccggttctggcaccactttcaacaacattcagatattccgagcaacacatttttttacagtattactgcttaaatgtataatgccctttaggacaaaatgagagtgctcaaatacaagtacacaaaaaagttaaaatcttaaatcatcgtcatgttctagagctcctgacttttcatattttaaaataaataactattcattacctcattctgaagaggtagttttttgtagaggtcacctgaaccctgcaatgtggtttcgaactaaagctagagatgaggtttgcaagcagctggcgggtggatgtacagtggggacaggtgagatctgaggaggatgtgcagcagctcgcactccgcctggtgaatacaaggtaacatcctgtgatgaaagtgctgtcaccgcaccaaaccagaagctaggaaatatttacaaagtttcaggttgacagtgctgcagtcttgaattatttctttatatactgctctttcttctccaacaccaacataaatatagcatatatcatttgtatgggattttatcttctaaaatgccccagtatgccctactagatctcaaatacaatcaggggtgagatattcgggaaccagaatttgacagctagacagaatcttcttttaaggtgcacattaacaacaaatgatcacactgaattttctattcacaaatcccttttataaactatttttttggtcaatattatttcagtggcaaaagtctaggtccttgactctaacgatgaaaaaagtccatcaggaatactacacagttacaaacaatcctctgtagttgctctcaaatttttcagaaggcttcacctctccctaccaaaaataaaacacactacagaaggcactgcagccactttacagacaagactgttacacccttacaagatgatcagtgacgcagccacatactgtctatacaattactcataaagtgcttttcacaaataaggacttcttcctcgtttttttaggagctcagtaagtctaactgttgtctaagcatcaaaaaataaagcagataaaacacaaataaaacctattttcatgtcatttgtaaactagagaaaaaacctatttcatagaaaaaggaagaaaagagaggtttaaatattttattttttaaggtatctataaaaatctcaatatgctaagcctggctcctgggcacagcttcatttgagatcaagtctgctcccccgttcaaatgagataccagcctattctaaaatgcaagggaagaaaaagtgtatcaccctgaatattgtttaagaaactgaaatgctaagcttcctccctaatggtaccgcccctgcccctgccccacggaggcagtcccggacccaggctgcacatgttctacctcctcagcaggacatgaaacacatcctcttgttcaagcccaggtctctctacctgcggaaacttgaagccaatcttggtaaagggaacacagccacatttaaaagcatctagagatatatttaaaaagaaaaaacagccaatgcttttcaagagaggcagtattattgcacagaagatgttcttcaaatcagcgtgaattatttccacctttgcaatttctgaattttgtaagacactgccctgctgatgtaaaacttaaaaacaaatttgcttttcaaactgattaataacttaaggatcttttccattttactaggacaaccttttacaagacaatgaaaatttcaataggctttcttctgaatacatgtatgttagcaaaaatctaatggtagtgagcttttagtggctgcaatatagacagcagggcctggagttacaatctgaaatttttaaataacaatttctaattccttgatttattctgggtcttgtttaatttctttcaagtccttggctatagcttggttggtctgatttgatttgtgttcctaaattctgagtctagattcctgataagggaggttttccattaatttgccattaatacatccgctttctttgctatgactgtgattgatattaccctttaataaaggccaaaggaagctataactaggttatattttccatttgtgcaaagataagatttaggttcttaatgaatgccagttctttctataaaaacaactgatgacagctttcccacaccctccctcagtcctaatatccctaaaattgctctattctctgtctgggaattcagctgccaaattgcccaaccttttgaagaccaggcttgggaaaaaaggaagaaggagaatgaatggagacgccaccatttttattttaggttgcatattctagataaaagactagaaagaagatgtgggatatagtgttaggaatcagttggaagaaacaatgagattattagcaaagatgttagtgtggatccagcaagtaccattaattgaaaaattataaatatttgtcattatgctaagactcctcatatttaggtagagaaaaggataatgatctttcttaaaagttgtttatataacaaaaatacaattttcaggatatataattctggtgggaagtattgtttttttccaattcaattaaatctgaaaattattttctttttaataaaaatagaaaagaagaaactcagaaattaaaacctgtaccttatatttaaattatctaaatttctcacattcaaaactgttattaagcagttttgtgggggtttagttagatactgccacggcattttgtgccctggacaaagtagccgcataagtagttggtgactggaagagcataggaggaagatataaactgtatttcctgagaatttgctacattgtggaggaaaaaaaaaaaacccaaacacttatcttcattgctggacccaatgagaaagaaggcaatgtgtgccagcactatctagcctgcttggttagacagacccctcagtgagcaaggaaacaaaaggccagagaccccggaggtcaggaagaagatgcagcatgcccttttcctccataccaagacacatctactcaccactcagcctccatttaaataaaatagtttccttttgataaaatctgtcaaggcctgaacacgcaccacatagaaagggcaagctgcatttttgttccatccctcagaaactaactggtggtcactaggggaaagagctccaaaacaaaattccagaacaggaaagagaacgatgcttggtgattgaaactgccccatcagatgatcagccacaaattgatctggtggttagaagggcaaagttgactggcagactttccatagcaaatctcccaagctgtagcagcagtttctttccatcatgcctgaccatcaaaaggtcagaattcagggtctctcctctttcttcctgggactgggcagacttgtatgctcgtggtatttttgttgaagaaacactggcagcagagaattctggttcctaaaacattctttcctcttttgttggatgggaaattccattctgttccacatcagcttatgcattggaaattttgtatctttaaaaaaagatttgaggaacagaactgtgttttgatgttaacaaattgtacgaacacaagrcttaagaaataagagcagatgctgccatgatggtggctacttgaaggctgcaaattctcctgtagagggaggacaagagctaattttaaaaaagtcatctcaaataacctagagacacagaaaagcctcatttgagcttcactgaaaagtaactagttatatatttcaagtctagcaacagcattgctaatttaaaagcaaaaacggctgaaacccatggaagaacacaacatatatagtatacagaatatggttcagctctatcaattaaatagcaagtctgcagaattttccagttgggttttatgtatcatggttctgatcaagctgaaaacagttccaatgaacaaaatttctcagaaactgaatgtaaagtagtaatgtcaatttgtagaatacttccacctctgaattatcaactcattttcacctatcatattattataatgccactattaggaagagagaggcagtagttatcctcattttgctaaagatacaattaagaggtcaactgatttgttcacaccacacgtttgacagagaaagaaaatccagactgcctattttctagttaatttcaccttcaatctaacaaaaaattaaatataggcacatcactgaacataattatcagcataaagaattctttaaaccacaaagtacctttgtgatatcatgctcctttagcttaatgaatttgggggcttcatgccattatttttttctttttttttttttttgagatggaattttgcttttgttgcccaggctggagtgcaatggtgcaatctcggttcactgcaacctctacctcctgggttcaagtgattctcctgcctcagcctcccaagtagctgggattacaggcatccgccaccaggcctggctaatttttgtatttttagtagagatggggtttcaccatgttggccagactggtctcaaactcctgacctcaggtaatctgcctgcctcggcctcccaaagtgctgggattacaggtgtgagccactgcacccggccgccattatttttcatctaccattttgtccatagtttctacttgtaactaaaggccaattcctgttatacacaccatagttaatttctggggattagttaataactgacaattaacaaaatttagtcagccataccactatttttcttttttttttgagacggagtcttgctctgttacccaggctggagtgcagtggtgcgatctcggctcactgcaagccctgcctcctgggctcatgccattctcctgcctcatcctccccagcagctgggactacaggcacatgaagccacgcccggctaatttttttgtatttttagtagagacagggtttcactgtgttagttaggatggtctctatctcctgacctcatgatccgcccgccttggcctcccaaagtgctgggattacacgcatgagccaccatgcccggccagccatatcactatttttc

SEQ ID NO: 95957 - DNA, 21823 bp, Homo sapiens
actggttcacacattctgaggtcaaagggtagacaaggggtagctgcttgcaggagactgtggacagacttgggatggcctgatgggaggtccacatggttccacacaaggccccttgcagtccaagatggtgtcaggggtaggaggcaaagtgggcccagctgagggccagtggccaaaactacgtccccctacaccatcacattctggtgcagaaccctgaggattccaaataaaatacaaatctgaacctggccttccaggccattgtgaagtatgtatttgtcaatatatttgtcaaggtagaagaacagaatatattttgtgtaacagtttgttagcctgaattatacttttttttttttttttttgagatagctctgtcgccctggctggagtgcagtggtgtgatctcggcttactgcaacctctgtctcctgggttcaagtgattctcctggctcagcctatcaagtagcagacatgcaccaccatgcctggctaattttttttttttttttttttttcacagagtcttgctctgtcccccaggctggagggcagtggcgcgatcttggctgacggcaagctccgcctcccaggttcatgccattctcctgcctcagactccggctggaactacaggcacccgccaccatgcctggctaattttttttttgtatttttagtagagatggggtttcactgggttagccaagatggtcttgatctcctgacctcttgatccgcccgcctcggcctcccaaagtgctgggattacaggcgtgagccactgcgcctggcctaatttttgtatttttagtagagacagggtttcatgttggccaggctggtcttgaactcctgacctcaaatgatccacccgcctcagcctcccaaagcgctggggttataggcatgagccactgcgccgaccctgagttatacattttaatcttttttttttgagacagggtctcgctctgttacccaggctggagtgcagtggtgcaatcatagctcactgcagccttgaactcctgggctcaagctatctcccactttagtctcccaagcagttgggactacaggtgcacaccaccatgcctggctacttttttattttttgtagagaagaagtctcactatgttgttcaggctggtcttaaactcctgggctcaagtgatcctccagcctctgcctcccaaagtgctgggattacaaggcatgagccaccacacccagcccattttaaatatttaaacacaaggtttgagggcctctatttgtactcctgccgcaggtcctacatatgttagagatgtgtctacataaaaacaaaccatttaaacagagatgaatgtgctaagaagaagaagggcagggtgctatgaaattttcttccacgaagacatactctaatacaaagccagaggggatgcatcacagggacaggttgcctaagaaagtcatgctaaaccaagactggtcaggtgaataagaagtgaccctgcctggaggtgtggacagggtgggaattccaggcggcagaaacaacatatgcaaaggttgtgaggcaggaaagatgtagacatgttcacaaaactgagaaaagatccacgtagccagagagtagaaagcctggaaggtgggaagaacagtgatagctgaggctggagaagtcagcaggggccagatcatgcagagcctgggaggtcacattaagggtttgggctttattctaagagcagggagaagctactgaagggttttcagtagagacatgatgtgatcagatttgtgttcggaaggatcacgtatgtcagcactttgtgtttgtggaggaaggcaacaatgaaataagagtcagattagaggactaatgccgtaaccaagttgagcctgaggaatatttgcaactggaagcacactctgagacagaaacttgtgtgcaggtggtttactcggggggggggggggggcacggggggggactttcaaagaaagagtagcaggacccaagagagggaacagttgaatggcactgcagttgtaatcagctgagcctaaagagctctggggctgggatggaccttcagagttgtcccaaactgagacaaagggctaggcctctgtactttataacaaccattcattggatacatactgcccccaggaagcgggcattgcatttggtgagacagctccctttggccacagatagtgctcaaggaagtactcagctgtgagctatcagcagccaacactcagcagctggaacaatgagcatcatgatcctgaagcgggaatctgggctacacaccacagcatcactactcgggctgtgagacttcagggatgaacccagaggccccagagaggacaatgcagatcacactctgccccctggtggtactccttggacatagggccagctggtgggccaggctctcccggcagggaactaaagaaaagtgtgtggcagataaggggaaatgagcagtgcaaggaaatctgcacgtgagccccttgctccatctgcctaaagctagagaagaaagtaatggtggggaagaagaattcagaaacgtggcactcattcattcttttattcaaccaacttttattaagtgcctgttataggccaggtactgctgggaactaggagaaaaacaagactgaaatcatcactctagtgaggattacagagatataaaagtaactacagtatagtaaagtacaaaaatataggcatatacatgggatagaagcaacacagatgaaatagatgttcattctaagggacgaacagaaaaggcctgtgtgtgtgtgtgtgtgtgtgtgtgtgtgtgtgtgtgtgtgtgttagagacagagtctcactgtgttgcccaggctggagtgcagtggtgcgatctcggctcactgcaacctccgcctcccgggttcaagcgattctcctgcctcagcctcctgagtagctgggactaccggcgtgcgccaccacaccaagctaatttttgtatttttagtagagacggggtttcaccatgttggccaggatggtgtgtgtttaatttgagtgcagatgcccagaaaaagttcacagaagtgctctggaaacttcagagttcagtacgtaggagaaaaggaggcaagtggggatgtgggggtgacaacattagataaataggagtcagattatgaaggacataagatatcatgtgatggaaagagcctggaagagattttaagcttaagagtgatatgatctaatttttaatggtaaatcaaggggacagtataggatttatagggagagggggacttggtaattagagtcagaaagatatggattcagattccatttctcctgctaaccatttgtgtgactttgagcaaatgactcttttttttttcaatatacacaaagcaattttatttgtatgtacttgtggtaaacaattagaacatttcattcataataggataaaagtataaaatattcatgaataattttttttcagaacaggaatggaagtttattaaaaagctttagagcaggaatgaaagaaaggaaagtacacttggaagaggcccaagcaggcatcttggaggtcaagtgcggcatttgacctttgatttagggtgttatatgttggcatacttctggggtcctgcctccctttttccttgattcttcccttagggtgaccgagcaaatgactctttaagcctgtgtccacatatgtaaaatatagttgtgaaacagaatgagattatgcatgcagagttgctgacacagagcctggcacctactgtccatagcataaacattattcttctctcttaactttccaagtggatttgcatgcacagtgtggggagtggcttggtagggagaggggttggtgtttggagaggcaggagtccaagaagtgccttagaagctatcacctgaagccaggtgagagataagccctgaactaaggccctggccatggggatagttgcagacttgagggctaattgagaagtacaattccaaaggtcctggcatctgattagctatgcaggataagaatagtctagactgattccctttggggcaactggccagatgatggtgccatttgctgaggtaggaaaccatgagagcaggtgcaggattatggagaagatgatgaccttcaggtcaaccatgctgccaccagtgtgcacacctttaggcccaaaggttggccaagaggtatgtgtttgcagctgggtaagtgtggacagagtttggatctatgaactggggggaaagagatccaaatacatatacctgaggttgagtgtaggctagagcctgagggggaagagacggggaccagtagcaagcccgtggctggagaccagctctccttatcccactatgttccagcatagaactccaagaaatctgagaatcaagactgtttctgttgcaagtggcagaactccaattaaaattagcttgagcaagagaagaaatgcatcaattcctgtaactgaaatcaggaatccattgctcgccatctccctgctctgcttcctctaggctggcttctgtctcagccaggttcctgctttgcagtgccaagctaacactcagcagctccaggcttatattctaccagctcagcaactcagcagaaagagagctaacttccaaagttttagaaaaagtcccagagagggatctcatgcccatccttgaacatccttgattgctgtggccagagtgaggaacacaaaagttggctaagctgcaagcctacccccaagaggggtgacatcagacccacatgacaatacagactgaggagatggttccccaaaagaaaatcagggtgctattaccagaaaaggcgagtggatgctgagcagacacccatcatagatatgctgagtttgaggtgctatatagcattgtgggtgatatccagtggtctcaggttggagagagatgtcccaatggaggtatagcttgagaaatcacctgaggactttatgatggtagttgggtgggcagatgagtttcctcattggattgtggagagaaagaatgaccaggccgggcgtggtggctcacgcctgtaaattccagcactttgggaggccaaggcaggcggatcacgaggtcaggagttggagaccagcttggccagcatggagaaaccccgtctttacaaaaaatacaaaaaatcagccgagtgtggtggcaggcgcctgtaattccagctactctgcaggttgagacaggagaattgcttgaacccgggaggcggagtgtgcagtgagccgagatcgcgccactgcacgcactccagcctgggtgacagagtaagactccgtcaggggaagaggggatgtgccgggggaggagaatgaccagatcagaggaccaaggaagagacccaggggtagagagactccaccatttcatggcaaggcagaaaggagccttgatcaggaggagaaacggggatttaggagttggggactaagtggaccttagcattgggcacttggactacagaaaggcccaggactcagggtgtcgcgtccccaggaggaggaactggaaaggcaatgcccaaccccctaacttctagacgtctggcccctgtagtctcccgcccctggcctcgcccctcgttcctagcttgtttgccacccagtgtctctcccgggagcaagagtcctcaaagttacatcatgtgcggctgggagggcggtggcggatggggggcggggcctcgaagtcgggggccgaagagtggacccagtcctccaatgggagagrtgggtttggcggtttggaggcaggggttggggcggcggctgggctgacctggagcctggagccccggggccgagggagctggcctgccagcggggcggaggaaagctagtgccagccctaccaggttccgcccccgcgcctgcccccctcctttttaagcgcctcccgccagcctctgctgtggctcgcttcgccgcgctccctccttccccgccttccatacctccccggctccgctcggttcctggccaccccgcagcccctgcccaggtgccatggccgcattgtaccgccctggcctgcggtgagtgacccccggcccggggcccacccgcaccttccgctgcgctcgccccctcggggctgccagtggcgctctcctgctctcagcctccgccaggtttcccatcctaggcggaggcgggcaggggcgactgctgtgggtccagcctcccgcgccgcgcgtctcttgggagggcagccggccggtgctcctcgtttccgcctgcacctccccttctctgcctcgctcgcctctgaccgcgcgatctctatctgccactctcagaacttcctctctctcctcgctcctctctgctgagccaggtctccgcatatcctcctttccttcccaratacctccctcggacctctaacgggctctcagccagcgccccagggtacttcgagaggcagcagggccctggggacaagggtacgtgagccccgggagactaagctcagagccccctaaagaaggtggaaggttaaatatccattcccggcctctcccggactggaaggactggaacctggcgggaagtccagagcagcccgagggacctgggcccaggggagggaggcaagcaaggtgggaggagggcgccaagttgccttcgtttcttacatagctggcttcttcctccgtccaggcctggagcccccaggctcgtcctgtttgtctgcctgtcctcttagtctcctatttattctctgaggcctctcttctcagcttttgtcccagagtcggaagtgacccacatctgtcgcacagcccgttccacttgggcagcccttgtgggtggtctctgaaggaaacgtcccacttagagggctgcaagagggtgtgggggcttcacaagagataacgtgagccaggctccagggagagagaggctgtcctcaagactgtgtgcttgaaaactgatgctcacggagaacttccctctgaggcaggaacagacccaggtcccagtagccctcctcccctgcccctggggccacactgatcatctatcctgctttagcggaaaccaccccagcttctaccccagacagactcaakctcccstatccatgctctgagctttcttccttccccaggctaacaccctctgagtctgagctgccagcaagctgctgttccaccctcccaccaacaccaaagctctctaggcatgtggcctctaggaagaagagccaggggaagcacggggtcacgtggtcctgggtgtgggggcagtttctgatgggcgaggccttgatagaggaggagagtaacatccccttcatggtctttgctctctcgggtttactccaccttgagtccaggccaatcagagcagacgttgcttctctgkctcccagggccatgagaggacagacaacaggacgctgacctcctgagaattaagcccatgaaccccagccagtgacactcattccccagtggtcaaccttccgcagagttcagaaatacttacccgagggcaacattttatgcaaccattgttggtccaagtgggcagcagcagatcagggcctggaagcccagcatccagtcacctattctctgtgcaagagccctcatctagaaacctggcactggaaagactgtgacctttgcttggggctttcatagtcttacagcatacacaccagaaggaaagaataaacacagctgccattttaatttataaaaaactatacttgaaaatggaaataaaatggatgaggcttcaaataccagacatatgaaattgtcacctgggcccaacttcttgtcttgacacttgggccaaaggcccctactcatttcttttttttttttttttttttttttttgagacagagtcttgctctgtcgcccaggttggagtgcagtgtcccgatctcggctcactgcaacctccacctcccgggttcaagcgattctcctgcctcagcctcctgagtagctgggactagaggcacacgccaccacatccggctaatttttatatttttagtagatggggtttcaccatgttgcccagtatggtcttgatctcctgacctcatgatccacctgcctcagcctcccaaagtgctgggattacaggcatgagccaccgtgcccagccatctccctacttatttctaaacgttgattaaacagttaaacatgggcatgggctacacaggcagtaacatcagcatgcctacatgtatacttccacacagccaggcatgtgccttttttgctcatttggccatatctgtccctcgctgagcaggagacaccctcctcaagcctcataaaggctacaagatacatgtgtcctgaacacatcccacacaccaactgcaacctgctcttcatggtccctgcatgcagacatgttttagcaggctgcagcccaagctttctgyctctccaccacctgccttgtccactctygatgacagcaactagctcattgcctctgtttctcctataggcttaactggcatgggctgagccccttgggctggccatcatgccgtagcatccagaccctgcgagtgcttagtggagatctgggccagcttcccactggcattcgagattttgtagagcacagtgcccgcctgtgccaaccagagggcatccacatctgtgatggaactgaggctgagaatactgccacactgaccctgctggagcagcagggcctcatccgaaagctccccaagtacaataactggtaagccttgggctccacaacctgcaggataggtgcactgaggccactttgggttcaccaaggcaaaatcaacttaactagaacatcccaatggaatgaacaagaatgagagctttggggtaaacagacccagaaactgggatttgcttacgcctataatcccagcactttgagaggccaaggcgggtggatcaccaggtgtcgggagtttgggaccagcctgaccaacatggagaaaccccgtctctactgaaaaaaaaaaaaaaaaatacaaaaattagcccagcatggcagcgcatgcctgtaatcccagctacttgggagggtgaggcaggagaatcacttaaacccaagaggcggaggttgcagtgagccaagatcgcgtcattgcactccagcctgggcaataagagcgaaactctgcctcaaaaaaaaaaagaaagaaactgggatttttttttttttgagatggagtctcactgtatcacccaggctggagtgcagtggcatgatttcagctcacaacaacctctgcctccggggaattgtctcaagcaattctcctgcctcagcctccggagtagctgggattacaagcatgcgccaccacacccagctgatttttgtatttttagtagagacagggtttcaccatgttggccaggttggtctcaaactcctaacctcaagtgatccacccacctcagcctcccaaagtgctgggattacaggcatgagccactgcgcccagcctagtttgtagtttgtattttattttaatgttaaatgaagaagctgatataaataagatcctttgctttttttttttttcctcaccagttcagggagcttttgccaggggcagagacccccagagggctgggaccttggggaacaccccttagatgggacaaagcctggaggaagggactgagatgtgattgggtggggaaamataaggccaacagaagacctggagtcaaagttggacttgaaaaagtgggtctagggacaagggaaacctgctggccaccatcttcctgacaatcccctctcccccagctggctggcccgcacagaccccaaggatgtggcacgagtagagagcaagacggtgattgtaactccttctcagcgggacacggtacmactcccgccyggtggggcccgtgggcagctgggcaactggatgtccccagctgatttccagcgagctgtggatgagaggtttccaggctgcatgcagggtaaccagggcaggggcacagtggcaagggcacggaagatgtgaacaggtttggaacccttcatccaggggatgccttcctccacaggccgcaccatgtatgtgcttccattcagcatgggtcctgtgggctccccgctgtcccgcatcggggtgcagctcactgactcrgcctatgtggtggcaagcatgcgtattatgacccgactggggacacctgtgcttcaggccctgggagatggtgactttgtcaagtgtctgcactccgtgggccagcccctgacaggacaaggtaagcacctgctctgccccaaggggaacacagaggccttcttgtactcagaggaaatcccaaatcctacctctccacagaccctaagaacctgtcctctctggcaacctaattcccaagatccagagcagcagtcccagcagagggataaggctgtgtttgcagagcactttgcactaggttgagaaaaatccgtgtccaagaataggggcatggaagctgatggttattatgaggtggggggcttcagccacctcttggtgctgctactgctcccaagtgtctctcctgccaatccctgatccctctggccccgacaccccagttcctgatgctgctgccagcagccccatgaccccattgtccccaggggagccagtgagccagtggccgtgcaacccagagaaaaccctgattggccacgtgcccgaccagcgggagatcatctccttcggcagcggctatggtggcaactccctgctgggcaagaagtgctttgccctacgcatcgcctctcggctggcccgggatgagggctggctggcagagcacatgctggtgagggcctggtgagaagcagggcagctgccggggacmgggcaggggtggggcctggccagtctgcctcagcctcacctccctcctgccaggtgccaggctggtgggcggggactctacttgaaggcccaaagctttggcctcaggctgctgaatgttgaggtttcccctgccactaacccaggcctgatggcagggcaatcacttatatagttaataaacattggtcctccctattagaccctagctgcccttccccatgcagaccatgccctgacttttggtgacctctttcttattccctctctccccaatgcacagatcctgggcatcaccagccctgcagggaagaagcgctatgtggcagccgccttccctagtgcctgtggcaagaccaacctggctatgatgcggcctgcactgccaggctggaaagtggagtgtgtgggggatgatattgcttggatgaggtttgacagtgaaggtgagggactctcagatcatactcttggttctggctcttgtcagagcctcggggtctcctctctagtgttcacaatgactttgtcagtgagaaagtttcctgaacacccaaccctgctccattcctctggcagcccagccacccgagagacagcctttcctcatcagatcttgggtccatctcaggacaggggtgggtggwgcaggaccttctttggtcttacatctcaagttttccttgtttggtcyttcctttctttcacttctcctaacaggtcgactccgggccatcaaccctgagaacggcttctttggggttgcccctggtacctctgccaccaccaatcccaacgccatggctacaatccagagtaacactatttttaccaatgtggctgagaccagtgatggtggcgtgtactgggagggcattgaccagcctcttccacctggtgttactgtgacctcctggctgggcaaaccctggaarcctggtatgtgcggtggggaaggtgtggcacagcctccaggcctcagcaccttaatggtggaaaagctttctccacaacctccaaccatcttctaggactgccaggaggcacagaagtcatgaacgtttgcagtttccagtcccaggcaaaatctcagttcatgtcccaactccaccagtcactggttttgtgatctggctaagttgctcaacttccctaagctttagtttccacatcagttgaatgagggtagttgtgatagtacctatctcatgagattgttggaggattaaatagtgcataaaaagggtttakcacactgacaaatacacagtaaattctcaataataaatacaggctggatttttttttaatgaaaggaaaaggaaggacttttgaacattcttacagaaggtattgggctccaagcactatccataaagtttggcccattaggaaaagaggaaagctgcctcctctgctccaactctcctcctgccacttggctcccactgtcccctgtataayaaccactgtctaaaggtcagtattgttaccgtcacccttcccctgtccctccaaagcattcaccccaatccttcctacaaacaaaatcaggtcagtgcttgagtctttcccagaagctagtttctgaatcctgtcattaccctgggcgcctgggagtcccacctctccctcagccctgcactctggaccttcagtattctttccatggccttctgcagtcaggcagtccagacaccaagaggcaggggcaaagaagagcatgggaggggaggctggccttgtagtcactgaagcctatattcaggtttgccaggctggcctagcagtcaccctccttgcttcatctaatcaccctttatttttactaacaccatcattaagcccccctcagccttcccacccaactgagaaatccaagaaactttcatctttccccacaggctagttccccaaccctttcatcatctccagatttgggggcataactagggcatcttgtccccagcttcaattcccagaataataccctgtgttaggattctgcactgggtgctgaagaaggatggctcttatctgcaatggcgggcagaagctggcggatgggagagggtggggattttggccccgtggcttccccactccccaggtctgaccagcaacctccagcagagaaggcaccatgtccactcaggggscacacagtggtgcttcatacatgtgccactgacttagtcccaacccccctccaggacacctgaaggtgccaagtgtgacctgggctcctgaggttatccctacccatgtgatatccctatctctatttttccagccctatcacttcatcagggtctaagcagggcagggaaatcaccaacatgttgttagctttaaaatcaattccttgcagggcacagtgactcacatctgtaatcccagcactttgggaggccgaggcagttggatcacctgaggtcaggagttcgagaccagcctggcaacatggcaaaaccccgtctccaataaaatacaaaaattagccaggcatggtggctcatgcctgtaatcccagctactcaggaggcaggaaaattgcttgatcccaggaggcagaggttgcagtgagacaagatcatgccactgcactccagcctggtgacagagtgagactccgtctcataactaaattaattaagtaaataaaatcaggccaggcgcagtggctcatgcctgtaatcctactactttgggaggccaaggtgggcagatcagttaaggtcaggagtttgaaaccagcctggccaacatggtgaaaccccatctctattaaaaatacaaaaaaatcagccaggcatggtggtgggtgcctgtaatcccagctactggggaggctgaggtaggagaattgtttgaacctgggaggcggaggttgcagtaagccaagattgcaccactgcactacagcctgggcaacagagcaagactctgcctcaaaaataaaaagataaaataaattcctatttgcatttggataacttaggagaacctgtcttccccggtttgctgacggaaagtcaattgtctgaagtactaagctgacattctcagtttttgctttaggtttgggtattcatttaaataataatctcacaaataatgaaatagtttctgggggaaaaattattataaccttatgcccatatctaaccccattcccttgagccctggtcagtgccaagtgccagtagcttggcacaaacattagtgccctgccaaaccccaattcctctcccactcttwtctcacatagctcagctggccgcaccttcatggctaaacaacctgagctcttggagatgccctggctcccctctctctgctccttatcacacaaggttctaggcagctgatgaggcaaaaaaaaaaaaagaaccctgcaagaatgtgtgcccatgtatgtgtgtgtygggggtcgacatgaccttggaaataatagtgtttgtatttcctctgccaggtgacaaggagccctgtgcacatcccaactctcgattttgtgccccggctcgccagtgccccatcatggacccagcctgggaggccccagagggtgtccccattgacgccatcatctttggtggccgcagacccaaaggtaaacaacatatgagctccatgttcttggcaaaagggctatctctgtattagggcctacctccctccctctgatccagagcctcagcctggatctcacctttctccagagttctcccctggtgaatgcaaacttgggaggaggcaaagggtctgaaaatgggatagccgaggtcttaggagagagagtaccagtcaagctcaccagaagggctggagttagggtccaaagaaaagggctgcctgtgactctgttcattggtgatctaggggtacccctggtatacgaggccttcaactggcgtcatggggtgtttgtgggcasmsccatgcgctctgagtccactgctgcagcagaacacaaaggtgagcaccctcaccattcctccctctcctstgtgtgcacacagcacgtcctctctcccttcctgagccagaccttccttttgtccacccctggagtctgatatggccccacctcttcccacttctatcttttccccatccctgaagatattcagaaccataagcctttcacagcttcctccaactggatgcagggtgcccttccctaccccagtgagaaggaagattccttacccatcttgcttcccccccagggaagatcatcatgcacgacccatttgccatgcggcccttttttggctacaacttcgggcactacctggaacactggctgagcatggaagggcrcaagggggcccagctgccccgtatcttccatgtcaactggttccggcgtgacgaggcagggcacttcctgtggccaggctttggggagaatgctcgggtgctagactggatctgccggcggttagagggggaggacagtgcccgagagacacccattgggctggtgccaaaggaaggagccttggatctcagcrgcctcagagctatagacaccactcagctgttctccctccccaaggacttctgggaacaggaggttcgtgacattcggagctacctgacagagcaggtcaaccaggatctgcccaaagaggtgttggctgagcttgaggccctggagagacgtgtgcacaaaatgtgacctgaggccctagtctagcaagaggacatagcaccctcatctgggaatagggaaggcaccttgcagaaaatatgagcaatttgatattaactaacatcttcaatgtgccatagaccttcccacaaagactgtccaataataagagatgcttatctattttacacaagatttgtgctgttttcatttcccacctatcttcacaggcttccctctaacacctgtctcacaatcatcttcttccagcccctagaagaagcacagcctggcacaatcaaagatctgttttacaggtagctctagcactgggtcacagacataggaattgctgggagaaggcactatccactctatgtcctgagttcttaaaaaaaaaaaaatggtgaggctgggtgtggtggttcacgcctgtaatcccagcactttgggaggctgaggcgcacagatcacgaggtcaggggattgagaccatccgggctaacacggtgaaaccctatcgctactaaaaatacaaaaaaaaaaaaaaaattaaccgggagtggtggcgggcgcctgtagtcctagctatttgggaagctgaggcaggagaatggtgtgaacccaggaggcagaggttgcagtaaaccaaggtcgtgccactgcacactccagtctgggcaacagagcgaaactccgtcacaaaaaaaaaaaacaaaacaaaacaaaacaaaaaaaaaactgagggcctcagcaagctgctcagtacagcccccaagcctaaaattcctgatctcccacttagattgcagaagcctctacaactccattctccagtgaagtggcttcattgtcagttctcgaatttgttcttccccctgcctgacctggcactgggagctgcatagtattcatggaagcatattcaatattaggacagctaacaacacttctgtggcaccttctttatgccaggcactgctgagaccagctctgtcaaggagaccctaacccagcagtgctagaggaattaaaaacacgcacacagaaatatagaggtgtggagtgggaaatcaggggtctcacagccttcagagctgacagcctcgaacagagatttacccacgtgtttattgacagcaagtcagtgataagcattgtttttatagattaactaaaagtattccttacgggaaacaaagggatgggccaaaatgaagagatgggctctggctggttatctgcagcaggagcatgtccttaaggcacagatcgctcatgctattgtttatggtttaagaatacctttaagcggttttctgcccagggtgggccatgtgttccttgccctcattccggtgaacccacaaccttccagtgtgggtgtcatggccatcacaaacatgtcacagtgctgcagagattttgcttatggccagttttggggccagtttatggccagattttgggggcctattcccaacaaggcagtgttctaagcacatacctaacaaccctttgggggaattaccattttacagatgaagtaacaaaggcacagagaggtcaagtaatttgtccaaagcttcacagttagtaaacaatagagctaagggttaaagtgataaaactgcaaagacatgtctttcatagtagtatagacatctacaactgcaaggaccttagaagtcacctattccaccgggcgcagtggctcatgcctataatcccagcactttgggaggccaaggagggcggatcacctgaggttgggagttcaagaccagcgtggccaacacggtgaaaccccttctctacaaaaatacaaaaattagctgggcatgatggcaggtgcctgtaatcccagctatttaggacaatcacttgaactcaggaggcagaggttgcagtaagcctagatcatgccattgcactccagcctgggggacagagcaagactctgtctcaaaaaaataaaaaaataaaaagtcacctattccgtgtttctcaaacttaaaagtgcctttgaatcacctggagatcttgttaaaatgcagattgtcactcagcaagtctgtagtagcctcaagattttgttttccttacaagctcctgggtaatgctgatgctgccggtctgcgaactacagtttagagtagcctaaattcatctgaaataaactttggagagtaatcaggaaaacagtgcaatgatctcacatgagtcaggggcatcagcttaggataacttctgtgcaatctggatcaggctgagagaatgtataacctaaggtgggtagtgtggtagtctttacccagaaaaagggaacaaacttcaacaaataaaatggaattattgggaactccctcaaaggaaaaaactagaagaggaaacaccaagtgttctcataggaaatgccagtgaccagccagaatgtgtaaaaatctaaaggtcagagtggaacagaggttagaacaaagttagcagtggagtatattgtactttaaaacacagccagccaggcgcggtggctcacactttgggaggccgaggtgggcagatcacctgaggtcagcagtttgagaccagctagaccaacatggtgaaaccccatctctactaaaaatacaaaaattagccaggcatggtggcccatgcctgtaattccagctactcaggaagctgaggcgggagaatcacttgaaactgggaggctgaggttgcagtgagctgagatcacaccactgcactccagcctaggcgacagagtgagactctgtctcaaaaaaaaaataaataaataaataaatttaaaaatttaaaaataataataaaacacagccaaatccttagcttcataaatagcatatgataactgaataccgtcaaaagcaacatagcacaggtattaaacacatagtagacttgagccagaggtgcctctcagttgcttcatctgtaaaatggaaatgcctacactttacagtcttgttgggaagattaaaagagtcagtggaataaagcactcagaactatgcctggcaccgaataaccatttaatacatgttagctatcatcacctttccactttataatgattagagtaggccctgtaagcgtatattacatattgctgactctacagtttaaaaggaacatgagcaatgtaaataaaatctaggagagaaagaaaatagatttaaaaataaatccctccagctaagaggcagggaactggggttccaggcacctttctggtatcttctaaatgcacagggacaagaaagtgttagccttaaaaattatttttattaattagaataaaatggggctgcatgcccttcagctccagataactgataaaatatagttaacacattataatctttttattttaaaataaaacacagatacagaagaccatctaaaacaaagttatggctgaataaactatcataaagtgaacacctttggaacactacccagggaaagaaacagaactttgcagacaccaacccagccccgccccgccccgaccctgttgcccatctctatcatagccaccccttcctgccatagtggatactatggtgagtaataattacttctttgcatttttttatagtttgatcacctaaatgtagatccttagacactatagtttagctttgctcccatttaaaatttttttcatatgtctttcaagtctctatcagtctacagattccccctccattcctttcttttccttcaatttacccattgacgaatccagactcagatgttcagtgtctaaatgcattaactcactagggattgcaaaacagccatatttgagttgtcataacattgcaataattttataaaatggacacttctatttcattaccctatggtattgtttatatagaaacagcaggataactgcttaattctttatctttatttatcatcttcaaaaaaatgatttgatttcctattatcctttgaaaaggtaaccagttagttacacacaaacattatgaactcatggatttaaacatacttagtgtttattaaattgaccttattaaatgttcaaattgtcccacatttggctatggaagctaggccaaaaagagctgagtccttttgacatgatacatactccttgcttcccggctatctggtataagttgctccatgctcattgtgttcatttccttccccaaacctggaatcagctttttctctaagaagctctggcttctttcagggggaaatggcgttttaagaccacaatctggatgctaggagtgttcattgatactggattggtcattgtttctagatctttttggtggatagcgacagaagataaaacctcatgaactcatactgacatgttctattcaaaatcagggctaaagggttttctggaaacatggtcttgctttgttgcccaggctgtaatgcagtagcgtgatcacagctcactgcagccttgaattcctgggctcaaatgatcctcttgcctcagcctcccgagtagctacaggtgtaagccaccacacctggctaattttttttttttttttagagatggggtctcactatgttgcccaggctggtcttgaactcctggtttcaagcaatccacctgcctcagcctctcaaagtgctgggattacaggtgtgagccactaccccgggccactaaagggtatttacttatattacatctatagctcctaccctacacacagaaaaatctgattcttacagacacaagacatgagagtattagaacatcccatagttacttagtggctttctagtcaacacattttaagtccctaggtaaattattagcacactctccatttccatcgacacagagaatactataaggcaatgttcaaacacatgtatgagcatcagtcactccaaacacggaactgtcccaggagctctgtgtggtcaccaagctgggagctgcagtagaggagaggaggacagggttagctagagaatgaaaacactcctttccttctctcctcagcagcccagcctgccctctagtggagatgctaatgagcaggaaacaggccaagacaggtcaggcaggaagtcaactagctgacatttacttagcaattaccagaaattgtcctaaaatgggtgctgaaggtagaaaaacctctctgtggctttaagtgactttaagtgcaactggagagagtagaggttacccaaatgaaaagtgcttcacaaactgtaaccacgcaacgtaccaaatttcaaaatcaagacagcataggcaaaatttagtctatcaaaatgacttcaccataattatttttaaagatatgccattttatttatttcaatagacacactgtataccctaagatataaatgctcttacacattttgaaaaacattacaggtcatagtgagataatcaagttcataggcttaaaaatcttttatatgctgccaggcgtggtggctcacacctgtaatcccagcactttgggaggcctaggtggtcagatcatgaggtcaggagatcgagaccatcctggctaacatggtgaaaccccgtctctactaagaaaaatacaaaaaattagccgggcatggtggcgggcgcctgtagtcccaggtactcgggaggctgaggcaggagaatagcatgaacccgggaggcggagcttgcagtgagccgagatcggtccactgcactccagcctgggtgacagagcaagactccatctcaaaaaaaaaaaaaaaaaatcttttatacgcaaaaaaattaatcaatgaatccagtgattaatcttatattctttcccatgtgatgtgaaggactcaattttgtcataaaacctcagttattttaacatttaccatgacttttaaatgttttactcaataatgtacaagttccatattacaaaagcttgaattaaaagattttattcaggtttaaactaatttgtaagaagaagagaaaagagaatcaaaaaatgaattgttaaggagataagtttaacagaagttttttgttcgtttttctggacctcaggtgctatagctgtattcatcataatcctttgtagaagctacacctttgtcaccagttcatgcaagccctccccactttgtttaatgatgtaatgagctgggtattattatactttttttttt

SEQ ID NO: 95958 - DNA, 18059 bp, Homo sapiens
  misc_feature (1)...(18059): n = A,T,C or G
aaagtattcagtcattataatttctcattaattatggcttcgggagcacagaagttctcctctcttcgttgtccatttcttcttttgccctccactgaggcttctccaccccacaccctcagccctgccctcaccacgctctatcaaagcttgtttgtgggttccctcacctcccctctccccagagcacccattctctgctgggtgtaatgactacctgcgcacacctgacgcccacgctgacttcttctgccttgacctctcagcctctctccaggcaaggatttcttgttgcctcaggacatctccacatcaaaaccaaacatgtgagaagtagcccttcctcttctcatgcaaccatccctccccacgcccatgttctaggacctctgtggacaccacaaattctcaagtcctcagctttacaactgcaagccttcctcccagttcccttcgtccctgcatcttagtctcacctgctaccaaatcctgcctactggtcctcagaaatagtccttctccatcctcactctccatgcccactgcccccccacagccacagggacattcatgtggattctaggttctgccagatcatccctgaagagggggttttctaacctccttccccacatttacctccgttctgtgtctcccgtcccccactaaaccttttacccatacctgtgtctgggagagttttaaaataggaggatcagagctgcacatctgtgatttgtgcactttcagtataatacattatgcctcagtgacaagttttatagaagaatagagtaagcatcaaaagttaaacagaaaaaaatgtaaaccgttacaatcaccagatctaaaacaagttcttcttaacctgagtctgggtgaggtgtcccttctgtgggccctcatgggcccctgtcctactccatcttacgtgtctcacccaagagacctgctctgtccaatactagccactagccccatgcagttatttacatttaaattaggccaggtgcggtggctcatgcctgcagtcccagcactttgggaggctgaggcaggatgattgcttggaggccaggagttggagaccagcctgggcaatatagaaagatcctgtctctaaaaataatttttttttaaatttgccaggcatgggctaatttttaaaaattagctgggtgtgtgcctgtagtcccacctattttttttttttttttgagaccgagtcttgctctgtttcccaggctagagtgcagtggcatgacctcagctcactgcaacctccacctcctaggctcaaacgattctcctgcctcagcctcccatgtagctgggactacaggcacgtaccaccacgcccagctaatttttgtatttttagtagagatggcatttcactgtgttggacaggctggtctccaactcctgacctcaagtgatccgcctgcctcggcctcccaaagtgctgggactacagcactacagcattacagctggcccgtggccaaaaaaaaatttttaagttaattaaaatgaaaaaaaatgaaaaattcagttcctcaattgcactaggcacatttcaagcgcttagcagtcacatggggctactgtcaaccgtgttagatgacacagataccaaacacttccattgtcacagaaagttctatcggacagtgctacacgccactgtaagctctggaagacagagacttgtctttctggtccactactggatccctggcacccaacatgctgtgaggcccagcactgatgctgaacatcaagagactgaataaatgcacacactaccacacactgcacatggcccggagacagctccattacctgtctcgcacttgctccccctgccgtcagaccatggcttctagccaagctttgacccagggccctggcccagggccctgacccagggctcgtggccccctttcctccctccagactctctggtctgtgacgggctcagggtcctggagccattgtaagtgactatgtgtgtgtgcttctgtgtatgtatgttgggagcaggagtagagaaagaattggcaggggtggaaagacgccagggttccaggtctcaagaaactcaggttcaggcctctggcaatggtcactctcacctatacagccgactcaattctgaatctcgaagatgtgtgactttggacaagaaactaacctctgcaaacccactgtattccctgttgcttcattgtaaaatatggataatacctatttcatataggtagtgagtgcagtaaataagatgtctggggctctgttgatactcaattactgtttgtttctttctatacatagagggcagtaaaaatctcttcttcaaacatcatttagattgtggctttcagggcacggtggctcacgcctataatcccagcactttgggaggccgaggcaggcagctcacctgaggtcgggagttcaagaccagcctgaccaacaaggagaaaccctgtctctacaaaaaatacaaaattagctgggcatggtggtgcatgcctgtaatcccagctactcgggagactgaggcaggagaatcgcttgaacccgggaggcacaagttgcagtgagccaagatggtgccattgcatcattccagcctgggcaacaaaagcaaaatttgtctcaaaaaaaaaaaaaaaaaaaaaagccggacatggtggctcacgcctgtaatcctagcactttgggaggccgaggcaggcagatcacgaggtcaggagatcgagaccatcctggctaacaaggtgaaaccccgtctctactaaaaatacaaaaaattagctgggcagggtggcaggcgcctgtagtcccagctactcaggaggctgaggcaggagaatggcatgaacctgggaggcagagctggcagtgagcagacaccgcaccactactccagcgtgggtgacagaacgagactccgtctcaaaaaaaaaaaaaaaagattgtggctctcagacacctgcatggttcccacttatcccacataggaggccaaatataactcctgacaactccttttgccttcaagcaagaggcttattatcatcagttccactgctcttatctccaaaggcacctggctcagcctctctgtgccagccagctaagttagtttggctttctctcccccaccttcacgtcatattacatacytgaaatacccttcctgcccgctctttccaaaactcaagccctgccttctctgatgcagattttttcatgagacwcacttcctctcttaagcctgcttgactcaaccttcccagtttcaagattgctaatcacaatgtgattagtgactatgatgcaaggctgtacctggcaaatctgcacttgagggcatctgtgttcccaagtatctggttgcgcctatgagtgtgcacagagcaggaagctagagaaggaggtgaccaccaacaaaagaaggctggtggtgaggtgggagggctggaccagactagacacaggtcccatttggccacttattacatgggtggccctcaacaagttacttaatctttctgagcctcagcttcctattactatactgagcccttacttagtacagacactattctaagcactttacatagattcttttatttcagcttaacttcaacagattaacttcaactgcagcagctagataatatttttcctatgttactgttgaagaaattcagacatagaggaaacgcaatacagaagttaagtaacttgccccaggtcacactgggacaagcaagtggcaaagctaggatttgtagccaggcagtctggctccaggatccatgttcttaatcactctgcttactgcctcctacctgtaattctgtgtgtgtgcacatccctcctatgtatgcaaaactcccatcacagtggctggcacaaagagaaccaataaatggcttaactctttcctcactgggactacaaatacacagggataggaaaaatgtctcttttcgagaatttgttataggatctaggaaaggacaagtatataatggacactttacatacatttccaggggctgagagaggtgtgaaggatatataaagatttaaagcactggcggggcatggtggctcacacctgtaatcccagcactctgggaggccaaggtgggcagatcacctgaagtcaggagtttgagaccagcctggccaacatggtgaaaccccgtctcttctaaaactacaaaaatcagtcgggtgtggtggtgcatgcctgtagtcccagctactccagaggctgaggcaggagaatcgcttgaacccaggaggcagaggttgcagtaagcagagatcgtgccactgcactcctgcctgggcaacagagtgagaccctgtctcaaaaaaaaaaaaaaaaaaaatttaaagcactaccttcttacccaggtgtgagttataaacacacacatgccacatggacacactattcgcaaagacatcacacacgtgtacgtgtggtacacacacactcactagccaccctgaacctcataaaggctccaccagaaaaccttctttgcagtaggcacagggaaaaaaatcacagtctttaaaagtacatatgaaggtctatcaaatcagactggggcattttagagaacttcctcgaggtgccacttgagttacatttttttttctttgtactgtggagttcaaaaagttaaatcttaaagataaacaggaattactgtggcaaaggaggagtgtggagaaaggagagtcaagagggaacaggctaacatatttaggaaactgcaagtatttctgtaggctgtcatgaagagtttttggcagggtcaggcaggatatacagccagagagtaggcagagcccaaatgccaataggtctgatgtgctgagctgagagattacaattctatcctgaaaaggagccactcagcacttttaggcacagatatgacgtcaaatctgcattttagaaaaatggattcagtagcacagaggatggactgataacaagggatgaggtggagaacactgaaaagactttcaacaatctggagaagaaattcggagtttgaactcctagtggcagtgggaagagaaagagtatttaagcgagtttaagaagtgaggaggaaatagtgccattcactacaatagaaaacataaaggccaatgtttagacaggatggatgaaagataatttataccttttggcttttggagtttgaggtgtctctgggacaccaggtgatatccaacaggtgtttgaatatgtatgtgcatgtatattatttattgttatttaagcttgcaagacatctgggctggagatataaatttgggtgtcatcaatttacaggtagtaattaaaacaatgagtgtggatgaactcacccagagaaagtgtaatgccagatttgtgggccaaaacagctctgaggagctccaactcgaagcagttgaaggcttacatttaaacattctcccaggaacagtgggtgaagtgaaaaaggggtgaggaaagggccctggagatcaccaacatttaggggtggaggtgaacagatgagaagagagaggcagaggtgcaggaggagaagccagaatgggggtgtcaagtataaagaaatgggtagcgtcaaatgcttcagaggttagagaaaatgacaggaaactccccctgttagatttgacatctagaaggctgtcggtgtggccagggtgaggtcagtggagtagtgaaggtgcgggtttccggctgttggagaaacctcttccactaactacattgcactctgagttaccaactggcatggtcctccccccatttcacacgcacgctacagtcgcccgtgcgcactcgtacacaccaggtggctaacaggtacgaggcgtttccggacagcgagcgcagagcccccgcgcacgcgcctccgagccggcctcttccgccgcaagtccctccccaagcctgcagagtgcgctgcgtttcgatgagccgggacgtggcgccrctctagccagcgcctgggctctgtggcgggcgccgcagctccgcgtcccccgcgcctcctcccagcgcaggtgggtccgcccgcggggggcgggggtgcccgggagccgtgggacgggcgggtagcggcaacctttggggagcagagtggtccccaacgcccaggtgccccggctcgcgctctggcccgggcgaatcgggctataggaagggccacacggatggaagtcctagtccgggtgctcacctcttgtggaacgtgcaaagcctgtcccaggacctctttacactctgggggtctctgcccaggcacgcttgctgcttccggacacagctgtgggcggagctagtaggggcggggctacgtgattgacacttctctcctcagacttcaagggctaccactggacccttcccctgtcttgaaccctgagccggcaccatggtgagaaccctgagcccagcccttcacctccgcaggcccgcgccctyacccccagtggcagtgccatggttgccccgtatgaacctmgggctccacagtgtggggtttttgcaggtcagcttctgcaaggcaacctgcactcttccaaccckttcatccttgtagcacggacgcctgaaggtgaagacgtcagaagagcaggcggaggccaaaaggctagagcgagagcagaagctgaagctataccagtcagccacccaggccgtattccagaaggtggggccctcagaggtagccccgaccccaagtagctcccttagtatagtgcagaggccaagagctggtccctagagtcagactgcctagatccaattctgggttatctcacttataactgtatgactttgggcaagttgctgaatctctttgggcctcagtttgctcatctgtaaaatggggctaataattgcacmtactgcataaggctgttgtgaagattaaatgagagaatacctgtaaggccataaagcatggttcatagtacctgttgtataatgtgggattcacagaatattggatggttttaagtttacgttatttagtcctgtagtgggaaaattatatgatctctaaccctgccacctatcttcttagcgccaggctggtgagctggatgagtccgtgctggaactgacaagccagattctgggagccaaccctgattttgccaccctctggaactgccgacgagaggtgctccagcagctggagactcagaagtgcgtagggattcaggatctcagaagactgccctggccctgcgcctgcactgcctgggnctaggggtggagragaaatggggcagccagtggcatagatggaggatagtagggggctgggtgcagaaagtgaggggtgagctgaggttgactgtaggagagccctgacccccvscttcccttctgggtacaggtctcctgaagagttggctgctctggtgaaggcagaactgggcttcctggagagctgcctgcgggtgaaccccaagtcttatggtacctggcaccaccgatgctggctgctaggccgcctgcctgagcccaactggacccgagagctggagctctgtgcccgtttcctggaggtggatgagcggaactgtacgtggctgcagattctgtccccacagccctcacctgcccacattctggtactggggcctcagtaaggcccagaatggggagggatatccaggatgggtccmctgagctggtgytgaaagggatgttggagccaaatgcatcctccgtggagtgcactgaggtgtttctaggggttcctgaggggactctaggggtcccagccaggtagctcctcttgccctgcctctaagatatgctgtcacctctcccctccagttcactgctgggactatcggcggtttgtggccacacaggcagccgtgccccctgcagaagagctagccttcactgacagcctcatcacccgaaacttctccaactactcttcctggcattaccgctcctgtctcttgccccagytgcacccccagccggattctggaccacaggggcgcctccctgaggatgtgctgctyaaaggtaaccagggtcagggatgctcaggaggactctgcagtgccacccttccagcccccatgcctgaccctgttcctgaacctgtcactcaggtttattgagcacctacttcatgcgtggctccaggggtgcttaagaatcagtccctggctgaaggaagcttaagtgtctgatggggaagataaaactgacatacgtagcccctgtgcaaggacagcatataagtgagactgggggctggaagtactccaaggagagggtagggtgttggagtggccaggagctcaccagtgtcctgaccacagccccatgcctcctggraccccacagagctggagctggtgcagaatgccttcttcactgaccccaatgaccagagtgcctggttttatcaccgttggctcctaggccgaggtgagcaatgaggaaaggggctgggtgtttagcgcttaataggaatgggagagggtttaaagaaatctgacactgtctccccgcagctgacccccaggatgcactgcgctgcctgcatgtgagccgggacgaggcctgtctgactgtctccttctctcggcccctcttagtgagtcctgcagcttttgtcaagagcactgtgggactgtgggcctggtgctgatggggctgaagtctttgtcctttgtgccaggtgggctccaggatggagatcttgctgctcatggttgatgattctcccctgattgtggagtggaggaccccagatggcaggaaccggcccagccatgtctgggtatcccaggattggtggggcagaagttggggtctggggcagggctgggtgggacagtcaaaaaagtggttaggctggggcatttccttgacccagtactcccagctctgtgacctgcctgctgcctccctcaacgaccagttgccccaacatacatttcgcgtcatttggacagcaggcgatgtccagaaagaatgcgtgcttttaaaaggtgatggaacctgcagcctccaccccttgcagcagcccccatcactcttttcctctcaagggtgcaccctccaaccacctactctttccccaggccgccaggagggctggtgccgggactccacgacagacgagcagctattcaggtggtgatagggaagcacaaaacaaggagaggggctctggactctgggcatcaggcagccagggcaggaggctggggcctcaaggagctgtttcagtctagatactgggaatgttgaccagtgcttcagggctgtgggcctcaactcctccccaccctgyccaccctcaggtgtgagctgtcagtggagaagtccacagtgctgcagtctgagctggaatcctgtaaggagctgcaggagctggagcctgagaataaatgtgaggccccattccgtgagagtctgctcccagagcccgctgaggaaaccyctttccagtgtggccctgagaggacagcaggaaggcctcaggaggatgggagcagaggaggwtccaagagaaaccctccttttccctgccctctcctcagggtgcctgcttaccatcatcctgctgatrcgggcactggaccccctgctgtatgagaaggagaccctgcagtacttccagaccctcaaggcaagttctgtctgcagaacagaccagggggaggcccagcaggcaggaggcaggcagctgacatgcataccctgcccaccncatccactccaggccgtggaccccatgcgggcarcgtatctggatgacctgcgcagcaagttcttgctggagaatagcgtgctcaagatggagtatgccgaggtgcgtgtgctgcacctggctcacaaggtatgggctgccatgcatgccttcccctggccctcatcccgctggcctccccacgtccctgactttgcccccagtctcaggtgcctttgtggacttccaatcaagatagagttcatccctgcctcccagcttgctcctcttccaggcctttctgtcactcagcccattcttcttcttgccactcactttcaaatcccgagtcaccaggacctccttgtgctgtttcttccccaggctggtcacagcttcatcttccttcagagtgaccgctagcccactcctcccacacatkccagcacatctcaccctggagcaacctccaatacctgaaggccaaatactttccagagattcctgagaagttgtccaggctccactttcctagtccttcccaacacattagttttatcacatcaccacagcccacctccattcctgccaaactcatctctgcctcatcaggaccagtccccatrggggaccagtctttgtttacccagcaccctccactggcccctgtacctccgaactccaggcctcctcctcctcacccaccccactggttaccccactcgcagcactgtctgtcccacgtcatgtactgctgtgggctgtaaggtcagcttcccacatgctcccatcctcttcttggctggggtccccaagggcctgtggggcacagagggcatgtgcctaataaatgctggcngaggaccctctcccaggtctcctgggaagcccatcacctccttcctcccttcaccccccaggatctgacagtgctctgccatctggaacagctgctcttggtcacccatcttgacttgtcacacaatcgyctccgaaccctgccacctgcactggctgccctgcgctgccttgaggtaaagtacccatgtctccgtccctgtcacgggtggttcttttcctcttcctctccctcagaagtctgcccatcctacaaggagatgtgcaggaccctccaccccgaacaggtaactgcgtgccttccacctccatcacgcagcctgaccctgtgagcccctctgtgctctgtggacccgtcaccctgagctcctcagttgctgaaccatccctggctgacagcgcctgtcctgcctccctgccctycctgcccccaggtgctgcaggccagtgataatgccatagagtccctrgacggcgtcaccaacctaccccggctgcaggagctgctactgtgcaacaaccgtatccttcctnctgggtgcctttcagacagtgggtaaagtgaggtgccaccctgggaagggacagacagcaggcagggtatgtgccaccctcttgcagggcaggagagagggggctctgtagtgtgagttgaagggggagagcctggggctgtcgggctatcactgacctgcactggtggagttgtgcggagtggacttcctcaagtcagagttcacaaatgggcagcccgcagctgttcttcaggtctatgtagttttttgaaaatcaggaactttcatactttaaaaaacatctagagttctaattcctctcttaaaaattggaagttagagcaaccttacactggtattttcactcagcagcccttggtcattgctgaatagtaaatgtctctttggaccaggctagatttccaccttatcataccctgcaccactcccctgatactacaccagcttgcgtggggtgttgcggctcattctttcctggctgaccctgtgggtaggcatttgcagtccctgcctagagcctgactccctccagggagcatatgagatgcccatcaaacagacttccaggcagcagtccccagctcttgagggtacacaggagcaaataaattgggaggaacctgccaagctttccttgactctcctgaacaaggcctccagcagcctgcagtgctccagcctcttgcctcctgccccaggctggtcctcctcaacctgcagggtaacccgctgtgccaagcggtgggcatcttggagcaactggctgaactgctgccttcagttagcagcgtcctcacctaagaggccctgccccctacccttgccctttaacttattgggactgaataaagaatggagaggccctctcaggctaccaagctgttgtcgctgctatcactacaccaccaccttcatcacttttattttttgaaaagaaagggaagagacatggggtgttgccagctccttctttctgcgccatcctattgtttcctctcagagagagccaaggcttcagtgtttggggcagaattcagggtgaaggctgagcttttgtttaccttctggtttggggtgggggctgggactgggtctagattccaagcaggaatagggcttgggctcaggttctggctctggtaagctacagagcagctgtgagtttctccagctggaagcatcatacaattttttcccatgacccctgcaccttccacatgttccccctgccctggcccccattcaccatagctggggaggctcaagggctccacgttcccaggaatgggccagggtgtccttgctccgtcctgcctgaacaacactatcggtccccatgagtagcattctacggttgaagtacctttgagaatacttgataccatttgatcctcacagagtctcagggatgagatttttaggcccagtgtactgatgaggaaactgctgttgagacttgcccaaggttcttggccggagcgcttcagcactgaaaccaaagttgtctctacccttggtctaggattctagactcatgttcttgcttctgtattgctaaggaatggttgggcagcggcctggcctcagctccttgaggtcctgagctgagtgtctgctcccatggtgtccccccacacataccatgtacacaccttgtcctgacctagagagtcctgagtggtggtggggggaggggactggctcaggggttagggcactgactcaaacctggctgggtggggagagaaagattgattaaagctagggagagagtgtgacaaaggcatcctactggttctctgggatctgcctgggcccacatgtgctcacacacgtccggacagccagggccctgccccttcccgtatctgcagtgatgcacaaatccgcagcccctgcacaaagccctctggctgacctgcctggaagtttatatccactggtgtgtctactgagggtgttggaggtggggcacctgcccccacccccgggcaggttctggtgcttggagctggacaagaaaaggcagtgtgggtgtggagggctccctgccagttcctggggcctctctgtccccactccccacggcacctccctgcctgatgcatcaccaaacagcccctcctggattctgtttccttgtgtcttcttgtcagcctgtttttactgtcttctgctaggcggcccatgggcagagctgggacactagtgggaaggaaggaaagaaggaagaaggccctggctgacgggcctgaggacaagacccaaggagagcctccctgaagatgcctagcctcctcctctctaccttgggatcgccttggtgccatcctcagtgtttccccagtgacggggtggagtaaggatgcacacagcacaggtgcctgagccggttggtctggattcccaggaagaattccaggttggagaaaagggaatcctctagtccaactgagcagagactcctctcagtgagagaaaggtactctgtacccctggaagggggactcagttcccacccaagcctgagtggaaaggcctaaacatcccctaacccccgaggctacagcgggggtgggggacgtgaaatgagattgctcctactctgatctccctaatcccaaacttgagggcagctcactcatgcctggggctgtagagcagctgagaaagaagggacagacttgggggtggagggagtcagaatatctggtagagccagcaggtcaggggttagctggtggagccagtctgagggcctggctgctgatgtcaccagtctgcaacctgggatcccaggacctccctgggcaggatgagttccaggaccaggcccctgggccaatttcatagggctgagcctggcttgggctgcacagaactcggcagcaggagcctgtgagagcagaggtaggcagcctaagcttgggaccagaaggtcggccagacagggctgtgggtggaagggcctgcctgccccactgcccttgcagcttcttcatccgggagaaggggctcctcacatgcccagtctggtaggaatcagcctggtgccaggggccatcacagcggtggctcccaccaaagcccagcctaagcccccagacctcacccctgctccctccctagcatcttctccccatttcccgcccagaggcctggcctcttctctccgccccctacagcagtttggcccctccctcccacataagtcacttaccaggtctgtccctgcggcatccagtctgtgggtcctgtcccatccatcctgacctgttccatctcagccccaggactcagtactgcggttgccaacactgctgccaggtgaggggctcccacgggtactgtggtgccgagtccaggcggcccacactatcagaggccgtgcctggatccagcaaggtggggtgtgggccagctgtgtacctgtcagccccagctaggctgttcccaacaccaagactctgctttccctgtgcacaggctccgggcacctgccatgccctacccctcctggcagccccaagtggggtcttccctgacttgggaatgccaaggaccacaggccccggggtcacttgtctgtcttgtgaggaaccttgagttgggggatttctgctaagaaatgagttctagaagctgtcagtgttgtgcacctctagactgcagagctagcaggtggacggaccaggcccagggatgctggagcactctgatgtgtgtgcagctgggtcttgaggctgggacaagtgtccatgcagggaactatgtggatttcctgggatggatcgttgagtgggtttcttcattgggcagtttttcggatgttgtttggtgggggtgaggggaaggcttttctctgcagcatgagaagcttctctgggtgagtctgaatggtcttcgcggaaggtctctggatgtgtctggagaatctctgggccaaggtgggattgtttcggtcatcgggtgggactgaatcagctgtctggatggagggtttctgggtcaactggctgggactacctgggttaaggagccaccctgcctcttcctaacaggcatgatggatgggccacgttccgatgtgggccgttggggtggcaaccccttgcagccccctaccacgccatctccagagccagagccagagccagacggacgctctcgcagaggaggaggccgttccttctgggctcgctgctgtggctgctgttcatgccgaaatgcggcagatgacgactggggacctgaaccctctgactccaggggtcgagggtccagctctggcactcgaagacctggctcccggggctcagactcccgccggcctgtatcccggggcagcggtgtcaatgcagctggagatggcaccatccgaggtgaggccggtctgtcctcctcagctgagagctaaaaggctttaatgggaccagagactcagcctggcatttctgggggggataggaagctaatgataagggcctgggctcctcatggggcttcactgacacggagctgtgtccttgcagagggcatgctagtagtgaacggtgtggacttgctgagctcgcgctcggaccagaaccgccgagagcaccacacagacgagtatgagtacgacgagctgatagtgcgccgcgggcagcctttccatatgctcctcctcctgtcccggacctatgaatcctctgatcgcatcacccttgagttactcatcggtcagtggggcttggattgggacgggtgaaggccctatgtttggtggggagaggctggcattagggtcagagaggtctttaggctcctccctgccccactcctcacctctgccagataaggcaggtgcaagtgtgtgggtgtgcccctggggttgtgtctcagagagggtcttggtgttgcagtttttcccaagcccatcctcctcaagcctcctggggcatcggtctcagagtactcctcttcagggcctgcctcggtgcctccttcggcattgctgctctgtcctttgtgcatctgttctcattccccaggatgtggctggttctctcttctatctctctctctccctcttgccttccatgtcccccatctctgccaattctgtctctctctgtctctgtccctctgtccccatgacccaaggcaggtgcctccctcaccgcgttgcttggtgtagcttgacttctcaggctggtgattatgctgctgcctggggcaggtgactccttttaccctttgattagggcctaaccttgcccacctcatcctttaatttcccaggaacccctaccacctccaccagggatgccctgggctctggaagctgcagccccaggaagcaggcagggttggccttcaggatcaggactgccctttcatacggggcaggtggatctgcccctccagcccaggcactgtgatagtcaggcaggcagaaggtgacaggagccctcgtctctcctccccacctcagagttcagtgtcaggggaacaggtttgggatgttggactgcggcactgccctaacatgtgggcaagcattgggtggagacagagctgctctaagggagactgtcagagaataaggtgatggcccaacgtagggacatacacagtggctcatacacattgtgggtggggccgggagaagtcccaggctccatcccctctcctcagggaggccttgccagctaattgctgatttcctactctaggaaacaaccccgaggtgggcaagggcacgcacgtgatcatcccagtgggcaaggggggcagtggaggctggaaagcccaggtggtcaaggccagtgggcagaatctgaacctgcgggtccacacttcccccaacgccatcatcggcaagtttcagttcacagtccgcacacaatcagacgctggggagttccagttgccctttgacccccgcaatgagatctacatcctcttcaacccctggtgcccaggtgagcagctggggtctggagcagagggtagatgggagggaaagacagggaagggcttcctgccctcggatgtggcggggtgcctaggtgcctgaccccaggagaagccagcctcccattgggcagatgagaggaccgaggcctggtgcagaaaggtggccagcccagggtcacacagccagccacacctctcctggcaaaggcccctggctacagccaatctcctccaccatctgtcatgctccccgtgtcctcccacagcagtcctgtcaggctaggggcatccccgcattttcttctgtggacatgagtcctgcagaactggccagaagtaggtgaggcccagggagagaactggagggaaccagttttgtgtgttctggggacacagaggacattgtgtacgtggaccatgaggattggcggcaggagtatgttcttaatgagtctgggagaatttactacgggaccgaagcacagattggtgagcggacctggaactacggccaggtatggtgcggctggccagggtcacatacacccagaggagctggggtgggtgtgggggctggggtattggagcagggtgctggcctagggttcaggctgtcacctctgccctccatccctccttccagtttgaccacggggtgctggatgcctgcttatacatcctggaccggcgggggatgccatatggaggccgtggagacccagtcaatgtctcccgggtcatctctgccatggtgagcaccctcacatctctgagtcctactgtgtgtgtgcctgctgcctcgccacacccccaccctcctcctgccctttctggattcctcaagaacccccagccctgtccctgccctcgtaaaggatacttcaggaaggggtctccctcctcttctctcccttgcctg

SEQ ID NO: 95959 - DNA, 21160 bp, Homo sapiens
  misc_feature (1)...(21160): n = A,T,C or G
tccacactgctgcaaggcctgggccatatgttgctgggaatttcctccacccttcgtcatgcagtggagggggctgagcagtggcagcagaagggccgcctccattcctactaaggggctctgagcttctgcccccagaatcattccaaccgacccactgcaaagactatgacagcatcaaatttcaggacctgcagacagtacaggctagataacccacccaatttccccactgtcctctgatcccctcgtgacagaacctttcagcataacgcctcacatcccaagtctatacccttacctgaagaatgctgttctttcctagccacctttctagcctcccacttgccctgaaaggccaagatcaagatgtcccccaggcatcttgatcccagcctgactgctgctacatctaatcccctaccaatgcctcctgtccctaaactccccagcatactgatgacagccctctctgactttaccttgagatctgtcttcatacccttcccctcaaactaacaaaaacatttccaataaaaatatcaaatatttaccactaagacttctgactccaatttaaaccaggaaagggatggggtggataccccattttgccctcccccatcaacacccagtcccagatccaaagcctcagtcttcaagtatggagttcaatgcccgcctccgcttggccaccgcaccctgctgctgttcccaagcctctcgccgctttaggaaggtagtcaaggccacatttcgagccacatggtggccgaaagggtctcttatcagctcctggttctgctcccctgcaaagggaaccactcatgtttagtactaccatgctcaaagacagactctacttgacgtaaagatccctccatttcccccagaccctgggactgccactgggataaagtgaacacttcactttccaaagaacagaagtcagagggcagggtgagggcagaggactacacaatcagtcagcgggagggaaggggaaagcagactgctaagaacccatgagcaagaccaccctttggaactaaagactgttgaatttcagtagacttcccagctacccagtgatctggagtaagagaggggagagtctggaaacatcaaagagaggggctggtactcaccaagctcagcagcaatttccttccgggccctcaaggctgctccactccagatggcatctagcacacggctgccatggcgactacaggccagagccacatattgtccctgtatggagacaagcaaagtaggtctccctagcaaaatccacaaaagtattttggaggcttgtggagagtgaattttctgaagagtttaagggctgaattaaaatagtctaggaattacatagcctttttgagtctgaaggtacagtccagggaaagctcatattctctaaatggatgatggtggggaatcaaggcaaaagccagaaatctaacctttaggttctgcagcacacggcggcgcagcttgcgcgtcacagaggggctggtcaggatggcatcgagcacatgagagccagcgggactttgggcragggacagaagctgtggtcccgtcaaggcacccagacttcgaagtacaagaccaggagtggagaagtgcagcagatgctggagcagtagagacccaaggactgtcacatcccccaaggctctggctgcggccattgccacctggcagcgcagagataagaaattaggaggcaccaacaagccaggtggatgagcccatccccagaacactgccacctccacctggatgaagtcaccactctcacctcagaagtcagacgcttgctaaaccctgggaggcctgactcccaattagtcactggcttggcctctcccctacctcacctggtgctctgcaggcactgccccctcctcctccgtcagtccatagtacacctcataagccatcaaagtggcaaagagaggcacacaggccacttgccgggatgagggctctgcacagtggaatgcctaaaggagaagacaraatatgatgaacctgagaacttctccgtcccttacctcaactttaagggaacaccttcaggaaaggaaagaaggcccaactccacaagaatgttagctctatgaaagcagatgtcatgccttgctgtatccccagcctctatcacatacaggggttaataaatgtttatcccttaaataaacttctctcttagttctgggagacaatttttgttccaggactgtgaaataacatttggcctcagccgggcacggtgagctgagattgcgccactgcactccagcctgggcaacaagagcaaaactccgtctcaaaaaaaaaaaaaaaattagctgggtatggtggcgggcacctataggcctcattttcccccattcctgtgaactccttgggcattagacttcctgagtccagaggtacaaaaacttaagatyagataagtcctaaaaggtagaagttgaactgagggcataaacagattgtgggtaatatccactcacctccaacaagagctgtaggaccttggcttggtaggccccaactctgcgacaggcccccaccagggcaatgactacccctgggtggccctgggccaatacagcttccaagacagggctcagctcctcaaacacaggggacagctgatgggaaacatggaatgtaactctggcattctggtaatggcggaccacattattcagagaaatcttcccaacgaaaacaactaaaaatgctagataaaacataaaaagcattgccagtatcaggacttttgtttggctagataaggcccaggataagggggcagtcttagaggtgccacctcacaggaaggaactttaagtggctcttccctatgtgtaagggagcactaggagcaaggggagactaaaattaaactgcacttccactctaacacccaatgcatgagaccacagggaagcccaccttagtcctaagcagcaaaggaaaagagaagctatggcaacagctctagcactcatgtgggcttatagccaagtaccagagtctgggtgggccatggaacctcaagctgtaaacctgaataaagccagtctcttgctggtcctcatacctgagagaagtcaaaacaaatcctcactagaaggtgggcacctttatcctaagctctggaaaacctcaaagaatagcttttcaagggcaatggccagcacaatgtcaaaggtatatagaggcagacagaccataaaataaggtccagtgatcaagaattagcagaaacagatccagctcaggtttccaactcaccagctcaggggtagtgactgcatccagtaagcgctgcaaagggaagttggcaatgggatgtgcagccagggtctgcagctgcccctgcaagtgctcctcaaagaggctctggagtcttgggggctccaacaccagcaggacctgctccaggagtctggaactcgtctgatctcggagaaatagcagtaggggactagggacaagaagggcatcaggcagtcttaactccatttcatgcaaaatacagttgcactacatcacctcattcatttcacacagccccgccaasttgggtcgatcctgaggccctgaccatacctgccatctactgaggaacygcgagtaytcaggtagccaatcacagcattgcagagrtgagcgcaaaactggggaagtttgcggtgtaaaacctgtaaagccacttgaagacagaagctggagatcttatcagtgataaacactgtggagagagggcagaaataaagcggctttctcaaaatccagacaacctgcgtaacctcaaactttaggcaacaagatacagggcactatggacacaaagggactatacaaagtgctctgaacgtcaaaccagaccaggtttgaaaagaagaggaataacctgaggtaagggccttgcttggtggtaagatgacctccagacaagtagatacgagaccatcctcctacttccctccttacctgcaatgtccttcagaaaggaggagctcaggtcctgaaggcgattcaaaaaggtttcagggacttcaaaatcagctggcttacattcctgagctggggtcttctgtgcttctgaaggaagattaagaacatgtgcagtggggagatcacaaactgccatccaggagagaaaaatttcacagatgaacaaggattccgcttggagatgcagaacagatgtagtacaactaaatgtctcttctggatgactgaactgagactacatttctgtcttaatttttctaagaaacttcaaccagcttccccatggtccacagaagacagttcaacctcctcagccaggtattcaagccattccaaaataaagcctcatttaaactcgctaactttatttcctagtttttcaaaatgtggatcacagctcaagactgtaccatgaaatcaagttagtggtctcaactagcattttttttaaatgaaatagagcagaatagttttgaaaaggaaaaaaaaataacagagtgggctgcatgtagtaagggtatagtttcctgaacttctgcttgagtccagtgtgtatgttacttttgcttaagtccatttgtatattaagtcatgcttaaaaaaaattctcctcctgcgtccattctaatagccttccccaaacacaactgtacatccctacctctgggcctccgcacacactaatctttggcttgctaagccctgttcagattaggacaggtcaagctaattcttcccggtcaagctcccccatgaagacttactcttctgtttactgtctcattctgaactttctaaattcttcttccccctaggtccactttcctcttgtaatacttaccagatgattgggaaccacggggccwggctctctcagactccagaatagtccctcctaacacctgaagcagagttctgaccacgaagctgccatgtgtgtctycacagtagacaagaaaatcatcacacacctcagcggctagtcccaggaccagctcctccagggtctccgtgggaccatcctttccatcctcctcctcctcctcctcctcctcctcctctgcagcactccccagcaatcgagggagctgtagcaaagcactttgtaatacatggaccccgcatcggtgacaggccacagtgcgcaagttagagcgcagagcagcccacacgcgacaaagcggtttcaagggactgaatcccaacagttcctgcagcatctcactgccagtcctgttcgtggacaamgctagggcctgagtctctacttccttcattatattgtgcaccatcagatctgaaaagggaagaaagacacactttgaagagacttagtagagaatacagttatgtaccctcgcttaaccaagggtcgtgggtcggaggccgaggaagaggacatgggaaatgaaactaagtccccacgccctgccgaccctagaaagtttccttgcctgccctggatttgatgctcttggtctaaaccccgaagttgctgcctacctcgttcttccccagtctcgggagcctctttcaatgctgacagcgcccggcggaaatatcccagagcttccgggctcaggtgcgggtgcgaatctgragccggctccgagcgcccatccggaggcggccagggttgccgcttacggcctggtaaggggcgccccgaccccttggccccgcgcccccgtttgccaccagctgggaaccggcgccccaccttgtgtggagagcgcggaccctgccccatgtgtgcttcgcgacctgtccggctgcaaaagcttccttaactgcggacggaccttcgacgtcgccaagcgtgcgccttatccagacaaagtttagaaacgcgggcgcgctcctgacgcagctactacgtcatagttccgcgccgccccagccgggcggggtgggtgtgtcacccagatcgctccgcccccatcygcaggttctaactttggcctgggactctgcccctctacctcagcacagaatcgccccgggtcctactacagaatcaatccttgaacactgcctccacgtcgccggctcaatctgggcgagaacccagacttccaccgcagccccgcaatctgcagacctcagcggcagcgcaggtggcaggtaagcggcgcacgctcgtcccacttagggcttaggatctccaggcttcgcgctcatccccggcccggaagctgcgcctctggctcagccrgactgggtcaggccagggaccggagcttcagatagcccaggactctgcgtggacgcgccccgaggggctgccgcgccagattcccatatccaggcagccacactcagagggttgtagtagttgtccacctctggacagtcccactcagccccttcttcactmtctgggcctcccaaaagacagtcagccttgtcctcaggcccgcacccagttgtcagcctctgactcctctcccctcaaaggattcttaccttggctcctcctcttagccctagtgaggttctcccctaccccccaacctcgccccaacacacacacagtctccaggcttccctcagagtaagtmtttgcttccacagacctgcctcctttgcctgtgagtcatggcagctcccatgaatggccaagtgtgtgtggtgactggtgcctccaggggtattggccgtggcattgccttgcagctctgcaaagcaggcgccacagtttacatcactggccgccatctggacacccttcgcgttgttgctcargaggtgagtgcttcctctgggaccacagttgcagaaaccacccgagagagcccttccacttaacagctcctttcctaatcccttacctgaaactataatactactcaacaagatgtgaatatttattcaaagtggaaattaaaaaccccgtaaataacttcaggtaaggtagaattttgccgccaagtgagttttatgaaaaaactttgtgtttgagccaggcatggtggcacgttcctgcagtcccagcagctactccggaggctgaggcaggaggatcgcttgagcctaggagttgagccatgatcacaccactgcactccagtctagacgacacagcgagacactgtattaaaaaaaagaaaagaaagaaaagtaaaaaactttttgtttgagagyagagattttggaattgcaactaaagggttgtggacctgtgctttcctctatttcaggcaagactttattgaactgcacattttttacttatttactagacttcagttaaataaatatttgagtatccatgatttgctaggcattggtaaaccactgaagttaccaagactaataaaatctaatttctgctcttcaaagattcagtccatggtggagtacagtggctcatgcctgtagtcccagcactttgggtggccaaggcagcaagatcacttgaggccagcagttggagaccagtctgggcaacatagctagacccagtctctacaaaaaatattttttaaataattagctaggcacagtggcctgcacctgtagtaccatctacttgggaggctgaggcaggaggatcgtttgagcccaggagttcgaggttgcagtgagctatgattgcaccactgcactccagcctggtgacagtgagaccctgtctctaaaaaaaaaaattttaattaaaaatgaagatagattccaacaggaagtcaggtacagaaagcagtcacttcaatgtaatgtgaatatggtaaattataagagggagatatgcacagaatactctaggggwgttggggagcatccagatgacataggagagtggctagggaaagtggtttgggaaagcgtcctggaggaggtaggtggttcttgaactgagttttgaaaggtaagaattaggtaaaggaagttaggaaaagcattccagcagagggagctccataagcatagggacgctgtgtgaaagagtagatgtgtgagataatgcaagggaagagtagtgagtgagaggctggagaggaaagagtgggtcttggaagaccctaatagagaactcaggcttcatcctctaagagatggagatccagttaggagattttgaacagggtttgtgttttagataggtcgtactggctggattatgaagaattaatttaaggcagacagactggaggtcaggtgagtcgttgggaggcattgcagtagttcaggcaaggagggtaataggcggggacccagagcataaatttggagaataggaggattgttcttagataaaggactcttcttcctctgaagttggaggtttgtgggcatttgtagagagtgagacagaacaggaagtagaaatcattcatggctgatagctttggttttttcaattaccaaccaggagcattggtggagtgagggtaagacagctgggactgagtagaggttttaggtgagtagtgtagggtgggagctaagggcatgagagatggaaatgaccacaacaaggaaaaggatgcttactcatttctcaagagcagactccatgcctcacttgttcttaccctctacttgcaaagtacaatgctgtgcacatggtgggcctcagtaaatgtttgtagattattaaaacttacattgcaattcaccttgctctgtggtggggaggcctatcattcctgaaactactcaaacagacaccagagggcagcgttgcctgccatgttgcctctgcagcaggctctcctaggattgattgtcttctcagttctcaagcccactttggttggggagttttgtcatgactcacacccatgtgtgaatgtgagctcatatcccctgtcctactccaggcacaatccctcgggggccaatgtgtgcctgtggtgtgcgattcaagccaggagagtgaagtgcgaagcctgtttgagcaagtggatsgggaayagcaagggcgtctagatgtgctggtcaacaatgcttatgcaggggtccaggtaccctttgaactttgttcccaactccacatttctgacctccccctcagacccctgcatcttcatccccactcattgtcccttccattacccagcccctcacacctccctaccttcagatcattcatcaccctccctgtgccttccagacgatcctgaacaccaggaataaggcattctgggaaacccctgcctccatgtgggatgatatcaacaacgtyggactcaggtgggtgctccactgccaggacccatgttcnctcactcacttagccaactcgacggccaggcctttccttacatgccctctccttttccctcyggcctcccccatctctttcttctcccttccattccatttgtcccacttacctctggagaagttccatccaggtgagtctgtacctgagaatgtcaactctgtcagtaattttcattggaacaagcccttggcctctctcctgtctcactctctgcccatccaaatgcaagacccagaagggaggaagcctcctcctctcagtaatgcgcacagcctgtagtctatactttcaaaatggttagagggagaaattgttttattttagactgggagaagcttaagaagaaggagcgaacaccaatgctgtttagtctccacatcctcactccacacccacaggcaagggcactgccgggtcagagttgggagagcaggtacatcactgggtcacacagggtcatttagcccaggagtgagatgaaacacagcatttagaattcgcctagcataatgcacaccagttatgcctctgttactgttggaatgatgttacactctcatataatcaagtcatgcctgatggatgtgatcagtcacctgtgggagtaaccacgagatwatcggcaaatctgtgactaaagcatgtaagaacacccaccgctccaattttggtactctggtaacaatcccaaggaagcaggattagaatgcaattgtgatttccaaagtggaaggaagatcattaggacagaggaggatggtgaggccaaaggcaagaaagggacacgttaagagctggaaattggccagtgttcatgaccatagcctccaaagagaggtgccttccacaccctcatctcttgctggccagggttttgaccctgaagcagagattcaaggcagaggcccagaccctcgaccttgggccctgatgaattatccaaggtaaaggccccttgatgagcccctgacagccccccagcacctcctgcccacccattccccatgcgcatttactgcctttcctctgtattaccttgggctgcactttcctttaaaactataactctacttgttttcatttggaaggtcctaattctttccctatgcaaaagaaatttattctggttaccaagttatgtgtgtgttactttttttaaatatggaaaaaatctgaagaccagtataatcttattcccctcagtgccatcccttgctctcttgcctgatatatagctactattaatagcctggcatatattctttcagatttttcatgtaaatatctctcattctttttaatacttgtacgtattctattgggaggatgtatgatcatttatttctctaatcccttatttgttgcagcagtggaattcttagatcaaagaatatgtacttcccttaggttatagagactgtgggaaaaatagaaaaaaagaaaagaaaacaaagaatatgtactttttaaagatttaataaatattatcaagctgtcctacaaaaagaccctaccaattttttatatcaagacaatgaaggggaatatgtgtttccccatgtcctctaccacaccaggcagcgtcagctcatgcactcaggcaagctttgttactataataagccgaaaatatataaaggggttttaattcatacttcttccactatttgtcaggttgaactttttttcccctttgtttattggctctttgttcttttgtaaatcatctttgcctttcgcattaatttataagagatcactgtgaaacaaatgactttggcatttattttacaaatatttttcccaatttatcactcatttttcacacgcatactccccccactcgtctgttgttgttgttgttgttgttgttgttttgaggtggaatctcgctctgtcacccaggctagagtgcagtgtgcaatctcagctcactgcaacctctgcctcctgggttcaagcgattctcatacctcaacctcccgagtagctgggattacaggcacctgccaccacgcctggctaatttttgtatttttagtagagaacggggtttcactgtgttggctgggctggtctcgaactcctgatctcaagtgatctacccacctcagcctcccaaagtgttgggattataggcatgagccaccatactcagcctcgccctgctctttatatacacagaaatatacatgtatctttgtatttgtgtgtgtatgtgtgtgtatcttaattttacgtcaaatctgtcagtcttttatagtttctgtcttggtgtgacgctaataaaagccttttccctcaagtttataaacacatttgatcatgttttctttcagtacttctgtgctttcgttttttatatttaaatatttgatccttttaggcttaattttaaaataataaacgaggcagagacccaattcccctaactcaaataactggtcggttgtcccaaatgatccaactttcccccactgatttgacaggttcctttcgtaatacattgcgttctcacatacacttgtatctaattattctctgttttgtttcattgacttatcagtctactgttaacacctgtattgcattcttttaactattatgtcttgtacattttaatttattttattttattttttagagacggggtcttgctgtgttggccaggctggtctcaaactcctgacctcaagcaattctcccatctcagcctcccaaaatgctgggattacaggcataagccaccatgcctggcccctgtgcattttaatatgggtgacagcaggsgtagggaaagcaatccccctcacccacaagacattagtctttttagtccttttttcggaattttcctggctgttctctttctttttatttatttatttatttatttatttatttatttttgagacaatctcactctgtcagccaggctagagtgcagtggcacaatctcagcttactgcaacctccgcctcctgggctcaagagatcctcctgcctcaggctcccgagtagctgggactataggcacgtaccaccacacctggctaatttttgtatttttagtacagatgggctttcaccacgttggccaggctggtctcaaactcctgagctcaagtgatctgcccccctcgcctcccaaagtgctgggattgcaggcgtgagccaccgtgcccagcttttctggctgttctcacgtttattcttctcattgagctttagattattttatcaattcctccaaaaggtcttattgagctataatccaatttgactgaatctatggattgatttacatagaaatgatgatttacatgtcagttcttagctttgaaagattttgtctgtacttattgtcatggttttatagtttttctatgtagacactatacatttcttaagttttctccccctgaacaattttgtttgtaattgttattgtgacagggctcttgccttccatttcttcttccaaagattgctgtttctcatctgtcagtggttattttgaccagttttcctctcagaatatggcctcaagcccctaattcctcaggtcgctaacccaccctgtgtagccttcctagtggacaacaaccaccagaaggcaggggaagccgccagaggctgtggcacccaggccagcactaacacggttcattccttcttcccttgccccaccttctagaggccactacttttgctcagtgtatggggcacggctgatggtaccagctggccaggggctcatcgtggtcatctcctccccaggaagcctgcagtatatgttcaatgtcccctatggtgtgggcaaagctgcggtgaggacccagtggcataggagctgaggaggtaaaagacagtgatgttacckatagctcaggaggtacaatccccagtggtcagaatggtaaggctggctcctctcagctcctcctctgcctcatccatggacagttcctttgcttgtgctcctcttggttggctaragtaggcatcacactggggagcgtgggcagctgagaccttggggctcctgggaaggacagggtgggtggagcattcacagtagaagcagagagggcagggcaggaaagtgacatggctaggtggctcttaccctgccttccgcctctccacagtgtgacaagctggctgctgactgtgcccacgagctgcggcgccatggggtcagctgtgtgtctctgtggccggggattgtgcagacagaactgctgaaggagcatatggcaaaggaggaggtcctgcaggatcctgtgttgaagcaggttggcaaggggagggcgaaggaagcagagaacaggggagtcggcctctgcatcctcaataacaagatcagatactcccactcaccaggtgcttactgtggcaggtgcagggctgagcatgggacacacattatttcctttaatcctgtaagggagataccagctccattctacagatggcaaaactgaaacccagagaggtttagaaacttgttgaaggtcacatatgtcctaagtggaaaggctgtctagctccaaagaccatgcacttgacccccacaccagctagcttagaaggtccaaacactatttggcactaccagatccttccacttagcaaagacagcagatcctggtgccagggcacagggctcacctggatgtgggsaggagtggctctggcacctgccaatactttgggtcctacaggccctgcttgaggtctttggcctctttggtctttggtctttttctcctggaacagaagttgaaatggggaggagacctgggcagtgctcttggaaattaacccttcacttctctgcccctgtgtttcagttcaaatcagccttctcatctgcrgaaaccacagaattgagtggcaaatgtgtggtggctttggcaayaggtgaagtttgggggcagctggtaataagaaagggcatggaggatgtgtagtgcggtagcatccagtgcccagatctggctcgggagttggttgaggaacatgtcattcttttctctgctttttgaggcccaaggggtcagcattcccagtttgaggtctgagagccttaggagcaggctcctgggaagtgtggaaaaagtccaaggcccaagagaaagagctctccagggatcctgagctccagggctctcagcagtgccctgtccaactgggcccaaaccttgtcactctgcatactcccctgcctgccatctccacctgtctgtgtgccygcagatcccaatatcctgagcctgagtggtaaggtgctgccatcctgtgaccttgckcgacgctatggmcttcgggatgtggacggtgaggaccctggcacagcagtcagccttgactgctgttccctctgttccctgcccactcctccctcggtctctccagccaaggtgaggrtatctgaggagtgggaaatgagaatctaatcctcctcctcctgttgttcccaggccgccccgtccaagactatttgtctttgagctctgttctctcacacgtgtccggcctgggctggctggcctcctacctgccctccttcctccgtgtgcccaagtggattattgccctctacactagcaagttctaaccctcctggtctgacactacgtctctgcttgtcttctcatttggacttggtggttygtcctgtctcagtgaaacagcagcctttcttgtttacccatacccttgatatgaagagaagccctctgctgtgtgtccgtggtgagttctggggtgcgcctaggtcccttctttgtgccttggttttccttgtccttctttttactttttgccttagtattgaaaaatgctcttggagctaataaaagtctcatttctctttcaatgtgtttttgactgctgattctctgctcagcaacatgttaacaatttgggagaaagactcaaagatgtataaatgtgaagcttctcaaggggttctgccccaggacaagacccctttcctccagaactgttcctgctctgccctgcaagacctgtttcccatgccccagctgaggagcagagtcgctccacagctagaagtgggcacatccagtctcacactggttttccacccccattccaccatctcttcagggatgcctgctaccttctagctgggcctgatctctggctgaggcccagtccagcaaaggcagattccttggtgttcatgatttcctggaacttggggagaaggtactgcctgaatccaagtgagggacagaggaatagctgtgacaccgacaactctcatccttcctctcgggatggttctacctgaattgctttctgcagaactaattgcatgagccctatagagctgccttgcctatgcaagaggctgtcctagcctgaggcaaggcaatggggtgtgttcctaagaggagccaagggctattctgagggaaccttccacccgacagcctagataaccatccaaagtgatgggatggctgccataaatcagagaaacataaatcattttacttattcaaaatcttcagagtgagagctgaggcttccccaggctgcccacaagatcggcagaagtcttcctgtggctttctggggaccgtccccagttactgttccagtggtaagtggagtggctcaccagcttctgagagcttctgatgcacatctcttctaagtcctcattcagtgatttcatgtggtgtcttgaatcagccatggcgacagtacatgtcccatgaaagtccacaaatgctaccaatcaaggctttcttttagagagagggctggcttatcagtacgtgactggtatagaacctttggaactgtgtgcctaaatgccaccatttgctgtggcagcagatcacagtgatcagattccctcagcacctgctcaccctcttccacttaccagcctaaattcctgttatctcctgaggttgatgaggagcacaggcagttgcctatgtggtataaaaagaagatgggcctcaggaccacctccagccttccacagccatcattaaaatccaccaatggggctgggcgtagtagtttacacctgtaatctcagtccttgggaggttgaggaaggtggatcgcttgagtccagaagtttgagaccaacctgggcaacatagggagaccccatctctacaaaacaattttttaaagattagctggggccgggcgcagtggctcacgcctgtaatcccagcactttgggaggccgaggcgggtggatcacgaggtcaggagatcgagaccatcctggctaacatgatgaaacctcgtctctactaaaaatacaaagaaaaaaaattagctgggcgtggtggcgggcgtctgtagtcctagctactcgggaggctgaggcaggagaatggcatgaacccacctcccaggaggttgcagtgagccgagatcgtgccactgcactccagcctgggtgactgagcaagactccatctaaaaaaaaaaaaaattagctgggcgtggtggaatgcacctgtggtcccagctactcaggaggctaaggtgggaggacttggtgagcgtgatcacgccactacagcctgagcaacagagtgagacccagtctcaaaaaaacaaaaaacaaacaaacaaaaaccaccattggaacaaaactttccatgatggcattgtctcctaaattctcaagatattatgagggaagcatggacttcaaactcatataaactgtcatgcaaatcctgactccaccaccttgagaattaaatgaaataatatatatacagcatcaagcaatacataaccatcgaaattgtcaattcctggtcgggcgcggtggctcacgcctataatcccagcactttgggaggctgacgcaggcagatcacgaggccaggagttcgagaccagcctggccaacatggtgaaaccccatctctaataaaaatacaaaaactagccaggcatggtggagcacgcctctaatcccagctactcgggaggctgaggcaggagaatcgcttgaacccgggaggcagaggttgcagtgagcagagattgcgccactgcactccagcctgggcgacagtgtgagactccatctcaaaaaaaaaaaaattgtcaattccttctctcaacaaataaatctaacagcctgctctgcaccaggcaccattcttggcttcaggatagaacagagagcaagacagaccaggcccccgcccacaaaagactttcatttcagccatgggagattttagaagtcatctagaccttccatttattgaaggcagtgagtgaactgggaccccaagagtccataagatgtggagtaagacctcggtcctggtatcccaagaaaccagaaggaatagtgctattcacagcagaccactgtgcttctctctgacaagtttcagtcatcttagaaacataagccacagagtacaccacccaagggaatggcacatgaacagtcacttttgattgaaggtagaagagattcaggatgtgggaagcctgacactagagagcactaggacattttggggaatcaatactcattcaaagacatttgttttttgaaactctctgcccagccccatgcaagacaccagggaagactagttgaatttggctagatgagtgctgcagtaaactacccagagtgccctgaggacacaggaggaaagaagcagcatgcctggagaactgaggaagggggcgagactaaccagacacataaaggatgggcgaggggtggaggtgggttttttgtttgtttgtttgtttttaaaggcaggtactgagacacaaaagtagcagaacagctagaagtttgatgtggcttaaatttagattcagtatggaatacatttccagagagagagtggagtaaagatatatgactgagacttaaattgtgggtgataggtttccactgaggatccaccttagaccctgagtgatttatgaagtactcccagggagacaagtaagcagggttggtgaagccaagcacgagcaccctctcagctgcagaaagcagctctggcatgatgcgagggaacagctttggtgtgtaaggcctcagaatagttccagcctgggacaaggtttttctgggcttttattcccaccaaaactaccaccagcaaatggtgctcagtgaccacagagcagtcactgggtacactgccacccagggcaaagcagtccaggaggccaaaggcagtcctccaagaagggctgcaggtgccagccttgaaagcacagagtggggaccgggcacgrtgactcacacctgtaatcccagcacttttgggaggcagaggcgggtgggtcacttgaggtcaggcattcaagaccagcttggccaacatggtgaaaccccgtctgcactaaaaatacaaaaattagcctggtgtggtggcgtgcacctgtaatcccagcttctcgggaagctgaggcaggaggatcgcttgaacccgggaggcagaggttgcagtgagctgagattgcgccactacactccagcctgggcaacagagcaagactctgtctaaaaataaaaataggccgggcgcggtggctcacacacacctgtaatcccagcactttgggaggccgagacgggcggatcacgaggtcaggagatcgagaccatcctggctaacatggtgaaaccccgactctaccaaaaatacaaaaaaatagctgggcatggtggcgggcacctgtagtcccagctactcgggaggctgaggcaggagaatggcgtgaacctgggaggcagagcttgcagtgagtcgagatcgtgccactgcactccagcctgggcgacagagcgagactccgtctcgaaaaaaataaataaataaataaaataaaaataaaaaataataaaagaaaggacagagtgaggtgtcatgcacaaaaatggaaaaagaaaattcaagagggatctgggccgagcattaacactgtcagctgcaggaggatttaagcagaaacgtaaaatcatcagatttgaattttggaagttcactggggctgaggtatggggaggatggactagagggaggagagaggcagacaccagaggagtagccagaaggctggcccgctatcagtatccctgggatgtgatgcagtgaaggtgtgagcagacgagacattgtaggaggcagagtcaacagggacctgggactattgtgggactgtggtggtggtatccctggcttgagggatgccatgaaaccagcaacaggcacagagaaagaaagaatgtgcctgagcagtgaaggagaagccagtgtgccagacgtagcactgatggggcactgagggcctgaccgagatgcarccccrccccaactgaggcaagtcaaggttcttggctggtccctgaagacgcttaattcctcaaaggagcccagggaaagaagaagagatttttgttttgcattgttaatttttttttttttttgacagtttatctttgttgcccaggctgcatgcagtggcatgatcttggctcacagccacctccacctcctgggttcaagcaattctcatgcctcagcctcctgagtagctgggattacaggcgcctgccaccacgcccagctaattttttgtattttagtagagaccgggtttcaccatcttgcccaggctggtctcgaacttctgagctcaggcaatctgcctatctcagcctcccaaagtactaggattacaggcacgtaataaattaccgtgcccagcctgttaatttatatttttcagaggtaacacattcacatggctcagaatccaaaaggtattgaaggatgcacagtgaaaagtctcctcctcatccctgccctcagcccggaggcagccagtgctactgcattcttgggtggccacagagacagcccatgccttacaagcaaacatctaagatattcagagaagagatttgctgcgtgcaaatctgggcctctctctccagcagaggagtcataatttccagtctcaggcccactctggcccttgtgtctaacacttctaagtgcacccagagcccccaccccttcccaggtcctaatgcatctgctcccaccaccagaaacttccctaccccaccaacagagagggtaagaggaaagtgtgacagcttaaatagagactaatgacagcagagaagcagtgtgaatgcctagaagagaccagcctgagcggcctggcccagccccagtctcctctaaggatatggacccaaacatggctgtgagatgcatgtcacatggagatgcctctttctagaacaactgcccaagggttgtgaggtatcaaaatgaggctttggagcctctatccccaggtgtccccactaatgtgagctttgactaactggcctacattaaacaggaagaggatgggtgcagggctggaccgaggtatcagtgactccaggtttacggacaagtcactgaggaggagtttccatcagctcctgaagtcccctttgggcccatgagtagaaggggaggtcaggtctctggcaggccagggaagtgaggagacgatgtgagtgacagtggggtgcgatccaggcacagagagtgaggagcacacacgagggcccagtggacaaacccaggcaggtggctgggcccagggctgccctttccctttgtcaccctggctcctacccacccacgaccgccaaaggccttggccctgtctctgaggcatctgtctcctaccacccatgccaaaggccttggcactgtcgctgaagcatctggtcccttacacttttggcctccccatccctagggagagccccacccatgacctcagaagtcctttgccgcagcccct

SEQ ID NO: 95960 - DNA, 18874 bp, Homo sapiens
gaacgaaggtggaggttgcagtgagccgagatcgtgccaccgcactccagcctgggtgacagagggagactccatctcaaaaaaaaaaaaaaaaaattaaaaattaaaaacaaatcaaaacaaaacaaaacaaaaggaagtactatattgtccaaacacaaggggcaatgactaagtgctatggtgaatgaaaatcaatgttaatcaatttaagccttgaatgagataacattatataacactagatatagtgttttaatttatataacattataacactataatagccaaaataaaaatgactgacatcagcatttttatggtgctacaagggtaccgtctagtaagggtacagagcaactggaatgctcatacactgcaggtgggaatataaaatggtacaaacccttagtttctttttaaagttacatatatctaccacatgacctagtaatttcattcttaggtatttatccaaaggaaataaaaacatatgtttacaaaaacactcgtataacaatgttcatagaagactttttcataatagccagaaactggagataactcaaacacccatcaacaggagaatggataaacaaattatgatataattcatccaatggaatactattcagtaataagaaggaataaaccacagattacagtagacattatgcagaatgaaagaagccagatacaaaaattgtacattcaataattccatttatataaagttctaaaacaagcaaaactaacctatgaaactcttgagggggtaggaatacaaatgtttagattttgtaattacatgaacgtatgctattgtcaaaaactcactgaactaaacccttaagaactgtgcattttactgtatgttaaaaaacatgaatgagaaaactgattcacacagtaaagacagttgccaaagtaatctgcaatgaggaaatcaatgaaggatctggggttagggagtaatataatgaaaaagaagctaaaggaagacctgcacattatggttttgtacgtcatgtcttggtttagactacactttagaggggatatgacggtaggaaaacctggttggatgtattacagagacataaacatataaatgagtaagacccgagaccagaatgagggtaatggagatggaaacaaaaatcaaacagaaagagcttttaagtgaaaaattagatcttataaaaggaccaygtaattttaaatgactctaaagaattgtattccagacacctgaatgattgatgggattaatacacgagatgggtattgggatatggcttatgacagaagatgatgcatttaattttagaaccatagagacaaggtaacaagatttaaatcaggaagaatttaattgtaaaatcttatagaaaaatatggaagaagtcagctacacagagacagcagttgaaaatgaatcattcggctgggcatggtggctcacgcctgtaatcccagcacttcgggaggccaaggcaggtggatcacttgagctcaggagttcaagaccagcctgggcaacatggtgaaaccccacctctactaaaaatacagaaaatcagccaggtgtggtggcatgtacctgtagtcccagctacttgggaggctgagttgggaggatcccttgagcctgggaggtggaggttgcagtgagccgagatcataccactgcactccagcctgggtgacagagtaagaatgtctcaaaacaaaaacaaaatgaggccaggcgcggtggctcatgcctgtaatcccagcactttgggaggctgaggtgggtggatcacctcaggtcaggcgttcaagaccagcctggcaaacatggcgaaaccccgtctctactaaaatacaaaagttagccgggtatggtggtgggcacttgtagtcccagctacttgggaggctgaggcaggagcatcgcttgaacccaagaggcggaggttgcaatgagccaagatcgtgccactgtactccagcctgggcgacagactgagactccatctcaaaagcaaaacaaaacaaaaataataataattcaaaaaggggtcagatatggtagctcacggctgtaatcccagcactttaggaagatgaggtgggaagatcacttgaccccagaagttttagactagcgtgggcaacacgatgagaccgcatctctacaaaaaaataaaacaattggctgggtatggtggtagcacacgcctgtagtcccagctactcaggaggctcagatgggagaattgcttgggcctgagaggtcgaggctgcagtaagctgtgatggcaccactgcaccctaagcctgggcgacagagtgagaacctgtctcaaaaaaaaaaaaaaaaaaaaaaaggaactgtaataaaaaatgtcacttatatggtaattaacagctcttttttttcttttttaaattaatattttcttcagatcagattaacagctatctcatgtgtaactactttcctatgtatttaattaagaaatgcaacaaacaagaggggatggggcgagagggggagatagagagagatggggcacagaggcctgtttgaaggcagaagggtgttgcaggaaagaagactggcaattttagagaagtaccacataaatatggattcaaagaaacagaaaaaatctagaatcttgctattcaaagtgtagctctcagacattcaatatcacctgggagtttgtgagaaatgcagaaacctgtgccccaccttagacccacagaatcataatcagcattttagcaagaccacaggtgataggacactgtattttcaagtttccacacacagcattgatttttttgttcaaacagttattttatttatttattttttgagacagtctcactctgttgcccaggctggagtgcaatggcacgatcttggctcactgcaacctctgcctcccaggttcaagcaattctcctgcctcaccctgtcaagtggctgggactacaggtgtgtgccaccacactcggctaatttttgtatttttagtagagacggggtttcaccatgttggccaggctggtcttgaactcctgacctcgtgatccgcccgccttggcctcccaaagtgctgggattacaggcgtgagccaccacgcctggcctttcaaacagtactttttaaactgcaggtctcaacccatcagtgggcaggtctcaacccatcagtgggttatgaaatcaacttagaattgaaagtctgagagcatatcacaaatagcaaagtttttgtgccttatgggttgtgacataaaatttcttaatgtggagtgaaattttcaaaaagtgtacaaaacacttagcattagtaacttaacttctttggacctagtggacatgagaacccatatgcattgaaaagccaacagaagtattcaacaggccgggcgcggtggctcatgactgtaatctcaacactttaggcggaggtgagcggatcactaggtcaagagatcgataccatcctggccaacctggtgaaaccccgtttctactaaaaatacaaaaattagctgggcgtggtggcacaccctgtagtcccagctagtcaggaagctgaggcaggagaatcgcttgaacccgggaggcggaggttgcagtgagccgacattgcgccactgcactccagcctggtgacagagggagactccgtctcaaataaaaatattcaacagttagtgtttctcaagattttgacagtgatccattctaaaaattagtatgaactagtaacaccccctgtgtaatatacatataaaataaaataaaaaatttcaggcctggcaacagagtgagactctgtctcaaaaaaaaaaaaaaaaaaaaaaaaaaaggccaggcacgggggagggtggctcacacctgtaatcccagcactttgggaggcagaggcgggcggatcacgaggtcaggagatcgagaccatcctggctaacatggtgaaaccctgtctctactaaaaatacaaaaaaattagctgggcgtggtggcaggcgcctgtagtcccagctactcgggaggctgaggcaggagaatggcatgaacccgggaggcgaagcttgcagtgagccgagatggcgccactgcactccagcctgggcgacagagcgagactctgtctcaaaaaaaaaaaaaaaaaaaatcataaaacaatatccttacctagcactatattatttcctattttctccccctctctctttcttttttttttttgcagggggagatggagtttcactcttgtcgcccaggctggagtgcaatggcgccatctcagctcactgcaatctccgcctcccaggttcaagggattctcctgccttagcctccgagtagctgggattataggcgcccaccaccacgcccggctagtttttgtattgttagtagaggcggggtttcaccatgttggccaggctggtcttgaactcctcaccttaggtgatccacccacctcggcctcccaaagtgctgggattacaggcgtgagccactgggcccggccttttttttcaggcagggtctggagtgcagtggtgccatcactgctcaccgcggcttcgacatcccaggatcaatcaatcctcccatctcggcctcccgaatagctgggcctacaggcatgcgcccagacccttggctaattttttgaatttattgtacaggcagggtttcgccatgttgcccaggatggtctccaactcctgggctcaagcgatcggcctgcctcggccttccaaagtgctgggattacaggcgtgagccaccgcgcccagcctattttctctttttaatggcgccagtgacccattcacctattaaattgatgttacgactcttatataggccgctactcaacgttaaaaaaaatcatctttaacatactattttaatactagacctcaaatcttagctaagaagtagtttggaaggactggggaagagaaggttaagaatgactattatgtacggtaaatatgctaagaagctgatgaaataacgatagatttacttagctacaaaaaggccaaactagcattagacttcacttgtcagcagttttgtttttttgaggggggcgtgggggggggggtctctgtctgtctgaaggcacaaaagaggaaacagcagataggactaacgagggctggaaattggtgaagaaccaccacgggagttgagagatgcagatgaaggaaaccatggctagtaccaagaactagggcagcggtaactaacctgcctcagccaaggaagtgaggctggtccaggatgccaggctcagaaaggcaggtactgactgaacacactccccgctttggttcctgtaggacgggtgagataccacaccttggcaaccaccagtaaaggctcatagtctagcccttgggaggccccgattttagggctgtgctcggaggcgacctacgttagggactgggagaagcaggtaccctgggaatgaagaatggagagcagcgcttactccaagaatctgagagacgggggagtcaagccgctgctaggccttctctatgactgcgggggttcgaatacagtgagacccgacaaaagcgaccccattctgggtgatagcacagtcctggcaaaaaagcaggcatggcaaaataccccagggtcgtcaggtgggacctgggccccgctctcaaagcccttctgggtccccctatttcccaccacccctcgcgcggagccctgaggcagtcagcgtcctccaggctagggaaaggcgtggttttccttccccacgtctcccgtaaggcactgctgccagcccagtactactgcgtcttggcaaggctggaggtgctcccaccttcactttaattagcatcttctttccagtttggggctgcacacggataaattgctgctcctaccgctccggtcgccgctgccgccctccagcactcttgcctgcaagggccacttctacttccgggtcactgtctggctccacccccccccccccccccactgggttccggaaaggctcagggttgctcccgcgtttcggttcagtgacgtcgtaaattggaatgaggcatccagtttagcaacagcasagatgacractctgcgattctgagagtccctggcgagcccgggctagcgaaaagtgggggcagaacgaactacatctcccatcgtgccaggaggcggtcccgcccgtttccccctgggagttgtagtctaaccccctcggatccaacagcaacctcagtgcgtgaactctgttatccagaaggcctcgccctgccgccgccgaagctggaattcgtcggctagtagttctcgccggcaactagaggaacctgttggcgtggcccagaaggcttagcgggattgcacgaggttagttgctaagcaaggtggtctttggtcaactgcckcctggaccaaggcaacaggaagtgagtacctctattccggaaactagttatgaaccctccccgccccccgtcgccaacattccttcgttcccctaaatcagcctcttgccccattgctctttgcaggggtagaagaaggaagtgtagcggggtaaggaatgcaccgtcagggtctctcacaaccctttcccagctctcctccccaacaaacagtacctgggatggagccctagggtaatcgcagccacgggatgggtcgaggtgacaggcttcagggaccacacttcggcctttgcccgaccttccacaacttaagcgaagagaggccaccagccgtaacagggcgttaaagcccaggggaagattggtccttatgacttcctgccttccagccctcagattcatcgctaccccgaggctaagcgccatgcctcatattgacaacgatgtgaaactggacttcaaggatgtccttttgaggcccaaacgcagtacccttaagtctcgaagtgaggtgagcaagcttctctacttgctgtttcttgaccccacgctcccggtgggccacaaccaagaaagatgcctgtccttgtcctaatatggtacgttttttggattaatgaaatggtcaatttcctgttcatatctgcaggtggatctcacaagatccttttcatttcggaactcaaagcagacatactctggggttcccatcattgctgccaatatggatactgtgggcacctttgagatggcyaaggttctctgtaaggtagggctttcctcatgccccatccctattggtgtccagttagcccagctgactgcagaggtgtttgcatccccacccccatgcccagtcagttctctggcagttagcagtcaggatgctctgatttacggttttttccactactgaagccctttatctgataagttcaaaaggccatctgarttagtgagattcaaagctaagttctgctccgatatttctgatatatgaacagaattttcccttttgtcctgtttagcagtttgtacaccttgccaacttttcccaccacccaggtcaccccctcacagtcacatgcatcccttcagttatgcgattgtccacattaagcattcactgttttagtccagaaactacagtttaagcattcaaaaatcctaactagaagatcctaggagaagcagcttattaattttctttaataagaacaattcattaataaaagaatacttctgccattctttttttaatcttcctcttctttaagtcctaggttcctgggagtttctgggatgtgccccaaatgggatgtgtttttcttatatacaagttgttcactttgaaatggaagatgctgctcctgtcagtactattacctgcctctatacttgttgctgagaaggtagagagttatctgggcactttgagaacatatgcactctgctggttgatccatgtagccctggttgatgaattctgctattgtttgtggctccattagtcttaaggacttcatatcctttttctatttttgattgctgtgtctttgyggaatgtcttgtcatttctttaaggttgatagttatgcagttttatttttactttatttttattgccattcagtaactgcttaggaatctttctgttgcccactgtccatctgccctgaccagtagagttcagaattggtgactctgactgcagagttaacaggcgtgctgtaatacatgaacctttttggggactgtcttgatgctttatgtggagcctggctttcagtattgctgacgagaggtaaagaaatcaggttttagagataagagccaagtcttactgtaakaaaaaggttggatgcaagcaaacatctttttctaagtttggtatgtaatctgatgtgctcatcatgccacactctgccagtatatctccaacatctgctgacttcctatcctatggtgacttttctttgcttatcagtatgttgatgatagagttgttgagaaagcaraattcaataccagctttagctagatattgttgatctctgagtacgtatgtagagcacttgttgctagctaatacatgacttccttgggtttcttgttagttgcaagatttgtgctgtttcagccaactgctgtctcttgtctgtttgcatgtagacatgtaaggcacaaacaccagcatacacaatggcctttgaatgccttcctcaaagtattgggatattgtttgcaatctgttgagctagagaatatgagtttgatgagtcattatgtccttgaactttattaaaatggactgaatgaaacagattttttagcttgatccatgtccccaactaggaaatttgtccttttttccactagagatggagacagggtagggtagccccttatcagctcttatcaaccttaaggcattamctttggtgagcatccagatctactgaattactgctggtaaatgaacgagaacataaccaaaaatagtttagtactaggttaccttaggaggaggggctgagtcagtgcagagaaacacaggctccatccagcttcttcatggttctttcatgtctgctgcctgtcccactgcaccagcagcttgtcaccttttaagtcagaagcagtgaatgtgctggcagatgaaatccaacccagatcactcagtactttggtgggaaatctgacaagtactagcttatggtaaaaagccctactagtatttgtagagagaagaaaggttgaactcaaatcccagctcaacctgagttctttgacttgtttcctccccaacttcaatcatgtcctccctcagatagaataggtctgtttctagaaaagagaccttaataaagttttctcccttttgatgcttctttgtcttctccccagttctctctcttcactgctgtccataagcactatagcctcgttcagtggcaagagtttgctggccagaatcctgactgtcttgaggtaacactgggcataccctgctcccttccttatcccagttttccagcaattatattttggctttctggggaccagcactcaccaatgacccactggctgcccaccagatcatctctgatatgccaatgactctgtttctcccacagcatctggctgccagctcaggcacaggctcttctgactttgagcagctggaacagatcctggaagctattccccaggtgaagtatatatgcctggatgtggcaaatggctactctgaacactttgttgaatttgtaaaagatgtacggaagcgcttcccccagcacaccatcatggtatgtttctattacagtcggtacctttttatctttccactttcctgccactccgttttgctacatcagtccatttctcctctgctgcattatgatattcctagttcatttaatcatgatactggatgattatccrtagttctaagcwgaaaatgtctatttggtcagtgtagtatctctgacccttggttcatagtctttgtaaatctgatgtccctgatgtcactcaccaaaccatgatggaacatctgtgcactgtacatacctgtggtacatagacatstgcccactgaaatggacacatactagtcacataaaaaggggtcacatgaataatgatttatctttttacaaccttagaagagtggccttcattttcttcrcagcattgaggggtgtgtctactgatcatcaaaagccaatcaactggtcaaatgggtctttagcctatactaccatgccttctccctttccctgaagccagacaggttctatgacagaatggcttaaggacagaatatgtttgggtctcttgaggaaggggagctaaatctactgtaaatcagatgtgagcctggtccagtagttccctttgcctcactgaatgctcctccatgccacttcatgtgtccctgttgatcatagcaccttgttgccttagaaaagtgcatcatggacctcggctttaccctaggttcagtggtgacattggccactcactcctaccttggcttggtgttgggtggatgggtagggagcagggttctctaaagtggctagtgtaaaagccctcagagggcccagtagaggggacctagttatcctttctttgtaataatgttggaaagtcatggtccatgcataccgtaacaatacatgacctcctgtttctggccctaaggatgctgtatttcaattgctctgtctcaggcagggaatgtggtaacaggagagatggtagaagagctcatcctttctggggctgacatcatcaaagtgggaattgggccaggtaagctggttcattggggccactggcwaccccccttcagtggcaaacacctgtggagcacrtcattcttacccttatcatgttcttcctaggctctgtgtgtactactcggaagaaaactggagtggggtatccacagctcagcgcagtgatggagtgtgcagatgctgctcatggcctcaaaggccacatcatttcagtaaggctcaagggcagggtagggtatgagcggggtttctgcagggtatggaggtggcagagatggattagaattcctgggttcttgttggctttgagttgggctgttgggacatcgctgagggcttgggaaatccatgttgtattcatagtgctccttactttgcaggatggaggttgcagctgtcctggggatgtggccaaggcttttggtaaggagcttgagggcacagaaggatgattctatacaagaggatgaatcacctctgagggtctagggtcaggctaagagaggctcaggaagtcattcagattctttcataatatgaattagtgactccgaagtctatggtatcatctggggcagccagcaggggacatctgagactccaagtgtgggccagggccatctgaccatctcctagattgctgcacagtgcagactcctgagccccagccatacctaaaaataggctctgaggaatgggacagcacatctgcatttttcattttgcacagcttcccaggagatcattactcccattaaagttggggatctttgctcttgggacacatgaaatgagtcttatttagctgggcacagtaaaatcaaatgaccagacgatgatggtaaaaacagcaaaaggagaaagcaaaagccaggcagggactctccagaggctcttttttaaatcttggggaaatcatacccactgaggaatagaggccagggcagatcaggcctgcgtggattgtgggtcagctagggaagcagaaggaggaagacgctggaatcattgtcaggactgagaatatggtgtgagttgcttttgagggtggccatgtgagcaccttggccagattaatctctttcccccctccatgatggtggcaggggcaggagctgacttcgtgatgctggrtggcatgctggctgggcacagtgagtcaggtggtgagctcatcgagagggatggcaagaagtacaagctcttctatggaatgagttctgaaatggccatgaagaagtatgctgggggcgtggctgagtacaggtatgtgtggaggcccaggagcttagtaatagtatggaggcagaactcatggctgctgagagggggatggtacagttctcagagaagcatggtgaaccggggctcaatgctagggtctgtggaaaagtccctgggcttaaggaatccagaaggagaagataataaagtttttcctactttaagagcctcagagggaaagacagtggaagttccttttaaaggagatgtggaacataccatccgagacatcctaggagggatccgctctacgtgtacctatgtgggagcagctaagctcaaagagttgagcaggagaactaccttcatccgagtcacccagcaggtgaatccaatcttcagtgaggcgtgctagacctgagcagttctaccctcccaaggcaccagtactctaccatggggcatcccaagtggggtcctcacccatcccagctactgcagctctgtattactttgtcatttcctgttgtctcactcctgagggctcctgcagtaactctgtacttctctatctgcacacacaaaatgcccaaggcactcactggggaggaagcaaggaagcaaacagtctgagaaaatgatgcaagaaaatcaaatgggaatctggggacccaacacaacatcctgaagattattaaaaggaaaagatgctgattggtacataaatcttttacatggccttggtctagaggaggcaggcttttagaatcatgttttgttaatccgcttcactaaattggaccttcacatatctaaaaagctctgaagtgtttgtatatttgaaatacctcaataaagagagagctcattgactgtaaagagatgctggggctttctgtacaaggctagcatctgggtgctgctgcagagtgggtggtggtagggtcagcactgacccagtggggtcaagaacaatgagtattattcccatgaagtatctccattctagtgccaccacacccagataatctggcagcatgagaatttacaaagtatattctggcctgaggacacatatttccagaataccaaaggacatttctcttccaggctttcaaccctgctaacccttttaggcacagctgaacaacacttagcaagggaagtaaaaaaaggcaaagggatcctttcagtttggaagggccagttctgtttctaaggaatgacttatgctgaccttatggaaaccttaattcccctccttcacatcaaggcagtattttaacaaatccaaagtttaattattaaggattacaaatatttttagcagtgtagttaggcaatccaagcctggacttccacttcattcctactaaactacttgcagagctgaggaggcaggagactagagtacagagagcattttagttctatcacaaaggtctagaactgtctctacagtcacaggaagaaacaggtatggcaccgtggccagaagggggtaggtattcacagagagtgggtatcaaggtgtcaaactttgtcttctgatagttttccagagattcctgtagagaagggagcagggagagcctactatccgaaaccattccctgaaccctctgaattctgaagcatgtggatttctcagtcttgttctacccatcccctttcccagctttctgctccttcccactcacctttccttccccctggccattttcttcctcatcagagtctaaaaccaagtcccctatggtaatgacggagctgcacagagacggaggacacactgtaggagggaaaccagaatcaaactactacttctagatgaacacaggctcttgagagtccccaagagaggaggctgttgatccaatcctgactcagactacctacctggcttcctggccctaggaggtaataatgatagtctcagggggtccatgtagcaatccaagcaattcctgaggtgagagcaagcaaagaggataggatgaagggaaggcaggcaaagaatgtgctcctagtaagaagcaactctgttccactcactccttttgctctgtggcaggcaagtcaactgggttctccttcagagcccttccccccagggtctggcatggactcttagacttcccagtggaggctgctcttgtgcccatggctaggtctgctgtgtatatcgcatgttcttccttgctctcaggcttagatatgacctgggttggtgagccgagattcctaaagggaaacagcatgactgtggggcgctccttatggcctcccctagtggaggcccattgggactgaactcttcgtcggcctagaggggccagattgaagtgtcggccagctagaggttctgggtgcgtccttgaagatggtccctgagraagatgtgtgycaggcttggcttttggcaggggattgtggagtgctagtctttgttgctgaggaggattctgttccatgggctcagccaggttcactgagtcagtaacagagcactctgaaaaagaaaatgaggccccttataaagagaacagatagtaacagaataactggtttcttatgcccggagcccatggaactattccagtggactgcctcaaaaggtctcaggctaaacactacacctccaaattcctagtacctggaagcagccaccccatgtccacaccatattgtctccaggcaagagaagaggtgatagagactccaggctgcatccaactcagcacatcctgaagctgtgggcagggacagaggtatgaagaccacaatccttgaaacagccaccccacactctgcccttacatgttttgccccagcgaaacctgctgtgcctgcggtgtaggcagtgctttctccagctgacacaagtactcaaaaagcagcttttccatggcagccagaaagggttccccatactcttgttcaagttcctacagcaggggagattaggtcaaaagtgggttagtggccaggcacggtggctcacgcctgtaatcctggccatttgggaggccgaggtgggcggatcacttgaggtcaggagttcgagaccagcctggccaacatggtgaaaccccatctctactaaaatacaaaaattagctgggcatttgtaatcccagctactcgggaggctgaggcaggagaatcgcttgaacccgggaggcagaggttgcagtgagccgagattgtgccactgcactccagcctgggcgacagagcaagattcctcaaaaaaaaaaaaaaatgggttagagaaaatagccacataatagccttcaaaccagtctcacctgcagcttcgaggccaaatccacaggagcctctgacagctgcttcacctgctggtaaaaagtttcctgtgcctccaaaatcttcctcagatcctgctttgtctgttgaggatacagaagacagagaagttagcaccaacatccagtagacaggaggagcaactttgctgcaccaagtgtaactggggtcagggcttgttccggggattactcacagccttgggatcccgcactataggtccagattctggaaagtggtgattcagggctttcaggacttgggcccaaggccggccctgcaggatcagctccaccaccacctgtacggtactgaattcagaatccccacttcggggcaagctgaccttttccaactagtctcatccccaagctgtgggcccttgtcaggtgctcgcatcccgcccctttctttctttccccttccaggtcctacttgctccaataccttggcctttaggcccatacaaaggcgttcgtggtgccggtagcgaaccaagccaggggcaacagcgcgcagagatcgcagaaactccagtactcgcggaaaatgttccacgcagcgtccgcgcacaacctgccagctagccgcggcggcgaagcgtagagctgcgggacccgccaccaggggcgtagccatggtcggcgggctccgcccggaggcggtccctccgggttcctcacccggatgggtgaggctttccgatcactcctaggggcggggcttctggcaactccctgtcgctccggtctgtcggctctgggtacctcgcgatctgactcggctcccttccatcggcccccagaattctgggggagggggtcttctggctcgggctggaggagcctgagtggagaagctgaccgtctccagtggcactgggtcgctcagctttaaacgtcgccgctgtctcgagcccgagggtgcctcacttccggctccgctactagcttcccttgccccggaaaagggcggtaagagggagccaatgggcggccacagagggaaccgtgacggtgcgtcagaaggccacgccccagcggagctgtagctgcccgcttcctgcactctctgccggctgacatgagttggcggctgaggctgtcgtggccgctgaggctgttgtggccgttcgtctgggtcctcccagccttgctttcttcgcggagcctgcggagaagccccgtcactcccgtgaggctcgacttcctagtctgtaaaacgaggatcatgccaccgccctttcccactgtcttcacccatcgaaatttagttctttaaattccagacccgagccggcgtctacaaagccttcccctctgcgcgcgtcgcttccagtaggaattcgactgttccttttataaaacagaagagggcgcccgcccttaaaaaataaaatacaggctgggcgtggtggcttgtgtctaatcccagcgctttgagaggccgaggcaggagggtcacttgagcccaggagctccagacaagcctgggcgacatggtgaaaccccttctctgctaaaagtacaaaaattagctgggcgtggtggcaggcgcctgtaatcccagctactcgggaggccgaggcaggagaatcgcttgaacccagtagacgggaggtggcagtgagccgcgatcttgcctctgcattccagcctgggcgacagagggagaatctctctcaaagaaaaaaaaaaaaaaaaaaagaggaagaagaagaaatagaatacaggctgggggcacggtgactcacacctgtaatcccagcactctgagaggccgagaggggaggatcgatccgcttgagcccaggagttccagaccagactggatcacatggcgataacctgtctctactgaaaatcaaaaaaactagccgggcgtagtggcacgcctgtagtcccagctactcaggaggctgagttgggaggattgtttgagccagggaggttgaggcttcagtgactgcactccagcctgagtgatagagtgagacggggtctcacacacacacacaaattagtttcttgttttaggattctgttgtgcactgaacttgtcagccccctaatgtaattgactgctctccttgactgtctcttccacaggcttcctggtgcctctcatttccatcagcaagcacagaacctaacacacagcttacactccttaattgttggctggattagttgcctgccttgaccaccttacaaggatttagtgaaactgctccgtctttagcccatgtcttccattcccagagataatggttcacacatccttgtctccgccccggatcagtctcagctgatccgcacattcgactgcccaagaaacacccagtcccaaagtaccccaaattggatatgtgtgaaattctagttatcttcctttttccctttatttattccttctctaatgttctttctttcttatgtagatatgaacttctgttgttttacttttttttttttttgagacggagtctcgctctgtcgcccaggctgaagtgcagtggcgcgatctcagctcactgcaagctccgcctcctgggttcacgccattctcctgcctcagcctcccgagtagctgggactacaggcgcccaccaccgcgcccggcttttttgtatttttagtagagacggggtttcaccgtggtctggatctcctgacctcgtgatccgctcgcctcggcctcccaaagtgctgggattacaaggcgtgagccaccgcgctcggctctttttttttttttgaggtggggagacagtctcgctctgttgctcagggtggagtgcagtgatcttggctcactgcaacctctgcctcctgggcttaagtgatcctcctgcctcagcctccaaagtaactggggctacaggcatgcaccaccatgcctggctcatttttttctattttttgtagagacaagtctttgttgcccaggctggtctcgaattcctggactcaagcgatcttcccacctcggcttccgaaagtgttgggatcgcaggcgtgagccactgcacgcagtccctggctaattttttaaaaaatcttttttggtgggtgtggtggctcatgcctgtaatcccagaactttgggaggctgaagtgggaggatcacttgaggccaggagtttgagaccagcctgggcaatacagtgagaccctgactctacaaaaaaaaaaaaaaagaaaaatatgttttgtagagaaggggtgtctctctgtgttgcccagcccagtctatcttcattttttgttttttgtatttatcctgcttgctgctctctgagcttcctggatctgtgttttgtgtctgtcattaatttgggggaaattctcagtcattattgccacatttcttatgttcctttattttcttctctgccattctgattatgtgtatgctacagcttctataattgtcctacaattcttggatattctgttctttttcatttttttttctcattgcatttcagctttggaaatttctgttgacatttcttcaagcgcaccatgttctttggccatgtccag

SEQ ID NO: 95961 - DNA, 26030 bp, Homo sapiens
  misc_feature (1)...(26030): n = A,T,C or G
agagctggagctggtgcagaatgccttcttcactgaccccaatgaccagagtgcctggttttatcaccgttggctcctaggccgaggtgagcaatgaggaaaggggctgggtgtttagcgcttaataggaatgggagagggtttaaagaaatctgacactgtctccccgcagctgacccccaggatgcactgcgctgcctgcatgtgagccgggacgaggcctgtctgactgtctccttctctcggcccctcttagtgagtcctgcagcttttgtcaagagcactgtgggactgtgggcctggtgctgatggggctgaagtctttgtcctttgtgccaggtgggctccaggatggagatcttgctgctcatggttgatgattctcccctgattgtggagtggaggaccccagatggcaggaaccggcccagccatgtctgggtatcccaggattggtggggcagaagttggggtctggggcagggctgggtgggacagtcaaaaaagtggttaggctggggcatttccttgacccagtactcccagctctgtgacctgcctgctgcctccctcaacgaccagttgccccaacatacatttcgcgtcatttggacagcaggcgatgtccagaaagaatgcgtgcttttaaaaggtgatggaacctgcagcctccaccccttgcagcagcccccatcactcttttcctctcaagggtgcaccctccaaccacctactctttccccaggccgccaggagggctggtgccgggactccacgacagacgagcagctattcaggtggtgatagggaagcacaaaacaaggagaggggctctggactctgggcatcaggcagccagggcaggaggctggggcctcaaggagctgtttcagtctagatactgggaatgttgaccagtgcttcagggctgtgggcctcaactcctccccaccctgyccaccctcaggtgtgagctgtcagtggagaagtccacagtgctgcagtctgagctggaatcctgtaaggagctgcaggagctggagcctgagaataaatgtgaggccccattccgtgagagtctgctcccagagcccgctgaggaaacccctttccagtgtggccctgagaggacagcaggaaggcctcaggaggatgggagcagaggaggatccaagagaaaccctccttttccctgccctctcctcagggtgcctgcttaccatcatcctgctgatrcgggcactggaccccctgctgtatgagaaggagaccctgcagtacttccagaccctcaaggcaagttctgtctgcagaacagaccagggggaggcccagcaggcaggaggcaggcagctgacatgcataccctgcccacctcatccactccaggccgtggaccccatgcgggcarcgtatctggatgacctgcgcagcaagttcttgctggagaatagcgtgctcaagatggagtatgccgaggtgcgtgtgctgcacctggctcacaaggtatgggctgccatgcatgccttcccctggccctcatcccgctggcctccccacgtccctgactttgcccccagtctcaggtgcctttgtggacttccaatcaagatagagttcatccctgcctcccagcttgctcctcttccaggcctttctgtcactcagcccattcttcttcttgccactcactttcaaatcccgagtcaccaggacctccttgtgctgtttcttccccaggctggtcacagcttcatcttccttcagagtgaccgctagcccactcctcccacacattccagcacatctcaccctggagcaacctccaatacctgaaggccaaatactttccagagattcctgagaagttgtccaggctccactttcctagtccttcccaacacattagttttatcacatcaccacagcccacctccattcctgccaaactcatctctgcctcatcaggaccagtccccatgggggaccagtctttgtttacccagcaccctccactggcccctgtacctccgaactccaggcctcctcctcctcacccaccccactggttaccccactcgcagcactgtctgtcccacgtcatgtactgctgtgggctgtaaggtcagcttcccacatgctcccatcctcttcttggctggggtccccaagggcctgtggggcacagagggcatgtgcctaataaatgctggcygaggaccctctcccaggtctcctgggaagcccatcacctccttcctcccttcaccccccaggatctgacagtgctctgccatctggaacagctgctcttggtcacccatcttgacttgtcacacaatcgyctccgaaccctgccacctgcactggctgccctgcgctgccttgaggtaaagtacccatgtctccgtccctgtcacgggtggttcttttcctcttcctctccctcagaagtctgcccatcctacaaggagatgtgcaggaccctccaccccgaacaggtaactgcgtgccttccacctccatcacgcagcctgaccctgtgagcccctctgtgctctgtggacccgtcaccctgagctcctcagttgctgaaccatccctggctgacagcgcctgtcctgcctccctgccctycctgcccccaggtgctgcaggccagtgataatgccatagagtccctrgacggcgtcaccaacctaccccggctgcaggagctgctactgtgcaacaaccgtatccttcctyctgggtgcctttcagacagtgggtaaagtgaggtgccaccctgggaagggacagacagcaggcagggtatgtgccaccctcttgcagggcaggagagagggggctctgtagtgtgagttgaagggggagagcctggggctgtcgggctatcactgacctgcactggtggagttgtgcggagtggacttcctcaagtcagagttcacaaatgggcagcccgcagctgttcttcaggtctatgtagttttttgaaaatcaggaactttcatactttaaaaaacatctagagttctaattcctctcttaaaaattggaagttagagcaaccttacactggtattttcactcagcagcccttggtcattgctgaatagtaaatgtctctttggaccaggctagatttccaccttatcataccctgcaccactcccctgatactacaccagcttgcgtggggtgttgcggctcattctttcctggctgaccctgtgggtaggcatttgcagtccctgcctagagcctgactccctccagggagcatatgagatgcccatcaaacagacttccaggcagcagtccccagctcttgagggtacacaggagcaaataaattgggaggaacctgccaagctttccttgactctcctgaacaaggcctccagcagcctgcagtgctccagcctcttgcctcctgccccaggctggtcctcctcaacctgcagggtaacccgctgtgccaagcggtgggcatcttggagcaactggctgaactgctgccttcagttagcagcgtcctcacctaagaggccctgccccctacccttgccctttaacttattgggactgaataaagaatggagaggccctctcaggctaccaagctgttgtcgctgctatcactacaccaccaccttcatcacttttattttttgaaaagaaagggaagagacatggggtgttgccagctccttctttctgcgccatcctattgtttcctctcagagagagccaaggcttcagtgtttggggcagaattcagggtgaaggctgagcttttgtttaccttctggtttggggtgggggctgggactgggtctagattccaagcaggaatagggcttgggctcaggttctggctctggtaagctacagagcagctgtgagtttctccagctggaagcatcatacaattttttcccatgacccctgcaccttccacatgttccccctgccctggcccccattcaccatagctggggaggctcaagggctccacgttcccaggaatgggccagggtgtccttgctccgtcctgcctgaacaacactatcggtccccatgagtagcattctacggttgaagtacctttgagaatacttgataccatttgatcctcacagagtctcagggatgagatttttaggcccagtgtactgatgaggaaactgctgttgagacttgcccaaggttcttggccggagcgcttcagcactgaaaccaaagttgtctctacccttggtctaggattctagactcatgttcttgcttctgtattgctaaggaatggttgggcagcggcctggcctcagctccttgaggtcctgagctgagtgtctgctcccatggtgtccccccacacataccatgtacacaccttgtcctgacctagagagtcctgagtggtggtggggggaggggactggctcaggggttagggcactgactcaaacctggctgggtggggagagaaagattgattaaagctagggagagagtgtgacaaaggcatcctactggttctctgggatctgcctgggcccacatgtgctcacacacgtccggacagccagggccctgccccttcccgtatctgcagtgatgcacaaatccgcagcccctgcacaaagccctctggctgacctgcctggaagtttatatccactggtgtgtctactgagggtgttggaggtggggcacctgcccccacccccgggcaggttctggtgcttggagctggacaagaaaaggcagtgtgggtgtggagggctccctgccagttcctggggcctctctgtccccactccccacggcacctccctgcctgatgcatcaccaaacagcccctcctggattctgtttccttgtgtcttcttgtcagcctgtttttactgtcttctgctaggcggcccatgggcagagctgggacactagtgggaaggaaggaaagaaggaagaaggccctggctgacgggcctgaggacaagacccaaggagagcctccctgaagatgcctagcctcctcctctctaccttgggatcgccttggtgccatcctcagtgtttccccagtgacggggtggagtaaggatgcacacagcacaggtgcctgagccggttggtctggattcccaggaagaattccaggttggagaaaagggaatcctctagtccaactgagcagagactcctctcagtgagagaaaggtactctgtacccctggaagggggactcagttcccacccaagcctgagtggaaaggcctaaacatcccctaacccccgaggctacagcgggggtgggggacgtgaaatgagattgctcctactctgatctccctaatcccaaacttgagggcagctcactcatgcctggggctgtagagcagctgagaaagaagggacagacttgggggtggagggagtcagaatatctggtagagccagcaggtcaggggttagctggtggagccagtctgagggcctggctgctgatgtcaccagtctgcaacctgggatcccaggacctccctgggcaggatgagttccaggaccaggcccctgggccaatttcatagggctgagcctggcttgggctgcacagaactcggcagcaggagcctgtgagagcagaggtaggcagcctaagcttgggaccagaaggtcggccagacagggctgtgggtggragggcctgcctgccccactgcccttgcagcttcttcatccgggagaaggggctcctcacatgcccagtctggtaggaatcagcctggtgccaggggccatcacagcggtggctcccaccaaagcccagcctaagcccccagacctcacccctgctccctccctagcatcttctccccatttccygcccagaggcctggcctcttctctccgccccctacagcagtttggcccctccctcccacataagtcacttaccaggtctgtccctgcggcatccagtctgtgggtcctgtcccatccatcctgacctgttccatctcagccccaggactcagtaytgcggttgccaacactgctgccaggtgaggggctcccacgggtactgtggtgccgagtccaggnggcccacactatcagaggccgtgcctggatccagcaaggtggggtgtgggccagctgtgtacctgtcagccccagctaggctgttcccaacaccaagactctgctttccctgtgcacaggctccgggcacctgccatgccctacccctcctggcagccccaagtggggtcttccctgacttgggaatgccaaggaccacaggccccggggtcacttgtctgtcttgtgaggaaccttgagttgggggatttctgctaagaaatgagttctagaagctgtcagtgttgtgcacctctagactgcagagctagcaggtggasgsaccaggcccagggatgctggagcactctgatgtgtgtgcagyygggtcttgaggctgggacaagtgtccatgcagggaactatgtggatttcctgkgatggatcgttgagtgggtttcttcattgggcagtttttcggatgttgtttggtgggggtgaggggaaggcttttctctgcagcatgagaagcttctctgggtgagtctgaatggtcttcgcggaaggtctctggatgtgtctggagaatctctgggccaaggtgggattgtttcggtcatcgggtgggactgaatcagctgtctggatggagggtttctgggtcaactggctgggactacctgggttaaggagccaccctgcctcttcctaacaggcatgatggatgggccacgttccgatgtgggccgttggggtggcaaccccttgcagccccctaccacgccatctccagagccagagccagagccagacggacgctctcgcagaggaggaggccgttmcttctgggctcgctgctgtggctgctgttcawgccgaaatgcggcagatgacgactggggacctgaaccctctgactccaggggtcgagggtccagctctggcactygaagacctggctcccggggctcagactcccgccggcctgtatcccggggcagcggtgtcaatgcagctggagwtggcaccatccgaggtgaggccggtctgtcctcctcagctgagagctaaaaggctttaatgggaccagagactcagcctggcatttctgggggggataggaagctaatgataagggcctgggcwcctcatggggcttcactgacacggagctgtgtccttgcagagggcatgctagtagtgaacggtgtggacttgctgagctcgcgctcrgaccagaaccgcygagagcaccacacagacgagtatgagtacgacgagctgatagtgyvcyrcrrgcagcctttccatatgctcctcctcctgtcccggacctatgaatcctctgatcgcatcacccttgagttactcatcggwsagtggggcttggattgggrcgggtgaaggccctatgtttggtggggagaggctggcattagggtcagagaggtctttaggctcctccctsccccactcctcacctctgccagataaggcaggtgcaagtgtgtgggtgtgcccctggggttgtgtctcagagagggtcttggtgttgcagtttttcccaagcccatcctcctcaagcctcctggggcatcggtctcagagtactcctcttcagggcctgcctcggtgcctccttcggcattgctgctctgtcctttgtgcatctgttctcattccccaggatgtggctggttctctcttctatctctctctctccctcttgccttccatgtcccccatctctgccaattctgtctctctctgtctctgtccctctgtccccatgacccaaggcaggtgcctccctyaccgcgttgcttggtgtagcttgacttctcaggctggtgattatgctgctgcctggggcaggtgactccttttaccctttgattagggcctaaccttgcccacctcatcctttaatttcccaggaacccctaccacctccaccagggatgccctgggctctggaagctgcagccccaggaagcaggcagggttggccttcaggatcaggactgccctttcatamsgggcaggtggatctgcccctccagcccaggcactgtgatagtcaggcaggcagaaggtgacaggagccctcgtctctcctccccacctcagagttcagtgtcaggggaacaggtttgggatgttggactgcsgcackgccctaacatgtgggcaagcattgggtggagacagagctgctctaagggagactgtcagagaataaggtgatggcccaacgtagggacatacacagtggctcatacacattgtgggtggggccgggagaagtcccaggctccatcccctctcctcagggaggccttgccagctaattgctgatttcctactctaggaaacaaccccgaggtgggcaagggcacgcacgtgatcatcccagtgggcaaggggggcagtggaggctggaaagcccaggtggtcaaggccagtgggcagaatcwgaacctgcgggtccacacttcccccaacgccatcatcrgcaagtttcagttcacagtccrcacacaatcagacgctggggagttccagttgccctttgacccccgcaatgaratctacatcctcttcaaccyctggtgcccaggtgagcagctggggtctggagcagagggtagatgggagggaaagacagggaagggcttcctgccctcggatgtggcggggwgcctaggtgcctgaccccaggagaagccagcctcccattgggcagatgagaggaccgaggcctggtgcagaaaggwggccagcccagggtcacacagccagccacacctctcctggcaaaggcccctggctacagccaatctcctccaccatctgtcatgctccccgtgtcctcccacagcagtcctgtcaggctaggggcatccccgcattttcttctgtggacatgagtcctgcagaactggccagaagtaggtgaggcccagggagagaactggagggaaccagttttgtgtgttctggggacacagaggacattgtgtacgtggaccatgaggattggcggcaggagtatgttcttaatgagyctgggagaatttactacsggaccgaagcacagattggtgagcrgacctggamctacggccaggtatggtgcggctggccagggtcacatacacccagaggagctggggtgggtgtgggggctggggtattggagcagggtgctggcctagggttcaggctrtcacctctgccctccatccctccttccagtttgaccacggggtgctggatgcctgcttatacatcctggacyggcgggggatgccatatggaggcyktggagacccagtcaatgtctcccrggtcatctctgccatggtgagcaccctcacatctctgagtcctactgtgtgtgtgcctgctgcctcgccacacccccaccctcctcctgccctttctggattcctcaagaacccccagccctgtccctgccctcgtaaaggatacttcaggaaggggtctccctcctctycyctcccttscctsccccccaccccgcctttcctggctcctgtcccagctcctgtggaatgtagggccaaacccaaaacttggcacacccaggattcacattcctgtgtcagagcccgggtgggaggggggcagatggctgagggaagggctgggtggagctcaggctggtgtctggatcctgaggcatttaggggtaaggggtggttgcaggatcggggcccggctggtccccatggaccacatggcaggtcctgagcccctcctccacctccgccctatctcatcctgtcctgggcaggtgaactccctggatgacaatggagtcctgattgggaactggtctggtgattactcccgaggcaccaacccatcagcgtgggtgggcagcgtggagatcctgcttagctacctacgcacgggatattcygtmccctatggccagtgctgggtctttgctrgmrtgaccaccacaggtagtggagggactgggacaggagtggcccgggccctacagggagaagggaggaaagccaggcttacccagccctgcccagatgtggctacagtgcagggtgcaggcgggggtgggtaataggctggccttaattatcattaattagtgttaacaacagagagaggcctaagggaaaggagggagaagggacaggcaaggactgagccaggcaggtggcctagcttcccctgaccccaagtgctctgtagcccaaaggccttgtggcccccgtggccctgaccctggcagtctatgcccagcttggcaatcctagttgcccttctccccctgatactcctgacacgatgcctcacttgcccccaacccatgccttgaaccccaaccttcgctcctccacagtgctgcgctgcctgggtctggccacccgtactgtcaccaacktcaactccgcccacgacacagacacatcccttaccatggacatctacttcgacgagaacatgaagcccctggagcacctgaaccatgwttctgtctggtgagctggggtggactgcccatctgtgctgaagaatggtgacctgagctttggaggtggagggtgggcagggctggggaggctggggaaactgaggactcctgaccctggggctcagacccagcccctcctccatgtccatccaggaacttccatgtgtggaacgactgctggatgaagaggccggatctsccctcgggctttgatgggtggcaggtggtggatgccacaccccaagagactagcagtggtaagctgggccccccactccccaccatgcccctgcttatctcccccacctgattaacacagtccagagtgtcagtgctgggccgggccggagagccaagccatgtaaccccgcggcttcttaaacgggtttgtcagctgaaccaccacgtggatgttagtttatttttaccattctatataactctctatttgcctacattttacttatttataatggtttattttatttataatggttaatatacaagggaggttcaaaattcaaaagctggaagagtattcagagaaagaattcatattcactattcttacttgctttttaacttacatatcctggagataattaactgaaggaccattttaaagtcatttttataagtaatacatgcttggaaggaaaaaaaaagtatagaattgaacaacacaaaatgtaaagcttccctattctctctcaggaggtatttgggttttttttcaaaaatatttttaaagtaaatttctaggttctactccaaacctgatacattagactttcccaggatagatgctaacaatgtatatttttgaaagttcttctggtgattctgacgatcagccggattttttgacccactccaaagggtggccagagagatggagtgacctcctctggggcacagagtggtaggtcagtgacagagcaagtccagtccttttaagcacatactcttgctttcaacgagttccttcctgtctgttccattgctcactgtgagttatatatacagcatagaaaaaaatcagggctcagataggttcaaagaagaaaatagcccttatgaccctgccttaatatataattactgttaatataaccaacgggtctcttttctgtgtccacatacatgtgtttctgcagaaattagaactaccatacactctgttctcaaacaaacccccaccccttcttaccgtgataccccagccccaggccaccaggcctgccctgccagctaccttctgtccagcctctcccttaccccaggtcagagagtcctccctagcctacattcctcccctggcctcttcccagtgccctccctctcactcagatatgtgaacacagccccatgagctgtgcaacccggtgatgcctgtgatsstgaaacagcctgtcccagacgctggcagatctgagctctgscccccaactctgggaagtggtggggtggacatcaggcagggggctcagggccagccagactggggcttgatcccagcctgatcacttctcagatgtatgctcttgggcaagcacctcgaacttttaggctttggtggtttggatgtaatttggggtaatagataccatatatggtgattgggaggattaaatgagaaattctgtatctgaagggaccagcagcatgccgggagtgtagcagctactcaaaaagtctgagctcctttcattctccctgcaccacctgtcttgtgagatcctggcatgaacttcaccttgctgtttccccgtctgtaaaggagtgtgtagtgttatgtcttgtctaagattctttccggttggatggtactcacttaccactctgtcctctcytgccaggcctcttcctgtcagcctatctcttctagacagcctcctgagtatsataagggcagactctatttcccaccagctccccccagtagaaagggcagcaggctgcagagctgagggttgttccgcatctctctggaatggtggtggcggtggtgtcctcgctctcccagccagcaggcagggccactgtggactctgggttggttatgataaaggatggggcgtcctgtcctctgggggtcacagatggtggacatccagtgtcagccagccatgaaagagtatgtcagggmmttggttatcaggcaggctggtccgcacatctgtaccctgccsccatcctccagcagagcagcctgggctgaggaaagcagattgagagccaaatggagccgctctctctttgttttccatacctgtgttgcactggctgtcaactgacccccaagtgtttgggtcagggctgatgaccttgttccagaggccaccaggcagtgggaccgggcctgagtgggtsgggctggggccctgtgtggaccttacccagggtctgaagagccctctccgccttctcagatctcttgcctctgtcccgcctcactctctaggcatcttctgctgcrgcccctgctctgtggagtccatcaagaatggsctsgtctacatgaagtacgacacgcctttcatttttgctgaggtgagggctgggctccaggtgccttcttgggcttcagtcatgggttctctggtyccaacttcacckctgactgaccagctctgcgacccggggcaagtcactcattatacaagtcagtttcctcacctgtaaaaggggataatcaaggctgccttgcttcctatactcgggatcagaagagawaacgggtatgaaactgcttcactagtcgtaaagtcagccattgagtgtgagggattactgatattgccaaagtgctctgccaggagcctcccagaccagcttcttccctgcactctggcctcgtctggctcgtcttggaaagtctccccttgggctctgccaggaagctcccacccttgggaccaagccctgtcccatagctcctgggatcaggggaaggaggccgggagtcaggccrccctcagaccctctggctcactcattcctgctcacccccaccccccacaggtgaatagtgacaaggtgtactggcagcgscasgatgatggcagcttcaagattgtttatrtggaggrgaaggccatcggcacactcattgtcacaaaggccatcagctccaacatgcgggaggacatcacctacctctataagcacccagaaggtaccattcccccaacccagccagctctgggccccacaacaagtgttcctgccaagtgcttggccacccacgtgggaattggaacctcacccttgaccctcaacccccaggctcagasgcagagcggaaggcagtagagacagcagcagcccacggcagcaaacccaatgtgtatgccaaccggggctcagcggaggatgtggccatgyaggtggaggcacaggacgcggtgatggggcaggatctgatggtctctgtgatgctgatcaatcacagcagcagcygccgcacagtgaaactgcacctctacctctcagtcactttctatactggtgtcagtggtaccatcttcaaggagaccaagaaggaagtggagctggcaccaggggcctgtaagtgctccttacccagycctgccccctggatggctgggcacctcagggctgtggacatggagaccccaggagcagtggggagtccctgggggaagcckcatgtagggaagcaggcctcagtgacgccatgcctcttctccacagcggaccgtgtgaccatgccagtggcctacaaggaataccggccccatcttgtggacyagggggccatgctgctcaatrtctcaggccacgtcaaggagagcgggcaggtgctggccaagcagcacaccttccgtctgcgcaccccagacctctccctsacggtgaatgcagtttgctggggcatgaggggtggtcagagagtgaaggccaggggataaggacatcagaggtgggcgctaagccagcagcaggctggcctgatgagcctttgtaggagaaggtcaaggaccggctctggggcctcagtttcctcatctgtagcatgggatcttatgtctctggttctgtgacagcctttattgaggaataggttggagtttcttctctgacttctggggaatcttctctcaggaggataaatgtgggactcggggaggttttgcttctaagcagcttcccctctctggtgcagtgtacggtccccgtgtgtttggccagggtctctgacgtggggsatgggcctctttttctctcagttactgggagcagcagtggttggccaggagtgtgaagtacagattgtcttcaagaacccccttcccgtcaccctcaccaatgtcgtcttccggctcgaaggctctgggttacagaggcccaagatcctcaacgttgggtgagtctggcctctccccctacccctgcttccactctggccttccccacaggctgcccwggctcccagctttgctccctctctgtctggacaagtatgttctgtcaggacccaaccaagcaggttggggccagctagcaatacctcccggcccagctcagtcccaccagcctttagggagacctcttgggcacctggkkctatgccatgtycttgccctgcctcactatctaattagggagcagaaggcccacataggaatcattagtaactcattgctaatatttgcccagcactgaagaattgaccaggccctttcaggaatattatctcctttggacacaaaaactctaatttaagtacattagaaggccaggtgtggtggctcacacctgtaatcccagcactttggcaggccaaggtgagtggatcacttgagcccaggagttggagaccagcctgggcaacatgatgaaaccctgtttctacaaaaaatttttaaaaaattaaccaggtttggtgctgtgcgcctgttgtcccagctacttgggagtctaaggtgggaggatcacctgagcctggagaggttgaggctgaagtgagccatgtttgtgccactgcactccagcctgggcgacagagtgagaccccgtgtgtctctctctctctctgtcacacacacacacagacacacacacacacacagagacacacacacacaagcgaagttttggaatcctaatgatacgggttcagctctagcacttactggctatatgcccttgggcaagcgacttctctccttcaagcctcagtgttctcacctgtaaagcagggatascaatagcccctggacctagggttgtttagtgcactgcttggcacaaagttagtgctccattggtagttgttatttttattattgccattattacccccacttacagatggggaagctggcggtcacatctcatatggtctcacagctsgtagggggcaaactctgctcttcccactgtggtgcataccatgcacaggctctcaaactcattgtttgttttgtgccatgagrgccaagtagcagttccagaggagagaactccatccctcaggcccttacccagcccgtctgggcctgatcctgggctgggcaagcccctgggtgtagkgagggcacacacatgctgtgttcctgggcctgcggctgtcatctttgatacagacttacacgtgctgccccgtccccgcctaggaaaagcacggagggaaagcagagcaggccagagcctggccttctagatcagccttctgggacaggggcaggcttcatcttcagacagcgagytcctgagaaagaacaatggcttggggtggggaaactgaggggaggaagcagaggaccccctgcccacttgcccacccctccctcacacacagcagctctcctggtggtggcygccaccttcgccattaggccaaagctgagaaggaagctatgttgatctttgccccagcctgggcccctgggaatgctatgatgtgtcacaaagtagggctttcctcatgtcaccataccatggtctctggcagctcagtgaacagagcctgaaccccccgggtagcctgctctgctagtcttgcccagcaggcatctcttacccacacccccascatggtkgggggaggttcctcrtcctaagggatccgcagagctggacttgcctcagcagccccaccaggcctttgcctcttggccctgcctggaagtaaggaaagggccactgtgctgagtgttgggggacctgtttcctgtctttagctgyagggyttatgtgagtctccctacagtaaaagacagggttggatgatggtttcttaaggcagatcctccctggacagtctgtggctccttagctgctgtgagcccagaccagagcctccagtacaattgggagcctccagggggacatctctgagctgttggttcaggtacctaagattccaagatgggtgtactttgcctctcattcgcacatcagaggctrtggcatggaaccccattatagcataaggtgtgccacccccctgtggtgactggccacttaataaacattccagaactcactcctccagatggctgttgtcaccaccaaaagcagtcaccagagaggctggaagtctgttccaaacccttcctgggaatttccctcagagtctgaatsatattctctagaatgtcctcagagtggtcagtctgccttcttaggggtagatttgactttgcagagaaacctgaagtcatcaagagctaagactaattaataagatagtgaacaagtgggtaactgcccttttccatcagaaccgaggcatgctgtggaaggaaggacaggctgaccgtggcatcactgagcacacgcctgtgtgtatggtttaaatggctctgaagaagagtccaggaggagttttaaacatgtttcaagcccaggcaatacgattgaacaagtacacaattggacaatgctcgtttcgacgtctaagttctggtgtccttgttggggagttggtttcatgacccacactcagttccaggaacatcccagctttagcagatggcttgtactcagcttcagctcacaaaagaggtgtggtaaagtcccccacctcacaatgagaccaggggagggagagatcttgacatttccacctagaaaacagtttctcttgaaaataatccgttactgcaatgtaaaggttactttctgaaatattatagttcaattatggtatagagtaaatagacttctgagggctggtctgagcttgaacaaccttgaatcttgtatctatgaaaagttagcaaaaattaagagtgsaaatttgtaagcagtcaggacatagcctagccattaagttatagacttaatttatagacttcctatcatactacgttctattatatatccctgcctccctccttcagrgagctcagaaacaccttcaagataatcagatcccactcctccttttactttcacttccattttatgacccagaaagtgaggaacagagaagttaaatagcttctcataagcctcacagctaacaagtggtagaaaagggagtagwgwggtccagggaaacccctcagaaccaggttccaagccaaatsstttgccctgaaaaaaactcatccttggagttagggatgttggctcattctcttagaggacaatagttaatgcacaggttctatgtctggaaagggtccccagcggcaggcttgggttgaatagggcaccagaggtaaggtttaggcaaaggcaggaaggacaaattcccacaggcacgagcaaatgcaatataaatgcagtcatgttcagtgtataaaatgaaacgtgcagattgctggaggagctcagagaagggtgagtttccttttcctagaggcaggaggtgctcaggggagccgtcactgaggaagtggtgtgccaggccttggaggaaaagtaggccttcacaaggacacccagggtggggaggcagagctgggtgctcattccacacaaggcaaagactgcaaagcatgactgtggaggtgagtctggggaagaaggcattcggtagggctgctcagcaggaggaatgatggggggtgatgaggctgtgcaagtagcagggactgggtcagagtgagcctgtgtgtcaagttagagagccaggatcgtgtgccacaagcaccaaaggagcactaaatccttgaaggatttagttcacctctgagtggttagcagaacagaatacaaaagtgggatgsgaggcaaggagtcccgttagaggactagtgaaatcatgattcccaggggaggtctgggaatcaatttttcagaggcccatgtggaaaggagaaaatgaaaacactggttgtgtgtgtgtgtgtgtgtttgtccacccacctctctgtctctctwwcacacacacacacacacacacacacacacagagacataagggtttatgtccatttaaagatgtctgttgtctgttcttgggaaggattttccttttttttcaaagataacatccttctaatgttttggtgtgtgaaaatgctcttttctctttggaacgacgatcatagcagagagtgattmmttttcttmmacctatgctcttgtcaaaactgaaagtatttgaaaatattgtgttgggcccccaaagtctcattttgaagttttcttggttttggaaaccccaggtgagatgaggatgttctgtctggggcaggagcagtggtgatggaggggatggcatgagaggcctctgcggtggcatcagcagtctttgtccaggtggatgtgggagsagggagggaggagtcccagacgatggggagagttccagcacaggcagctggtgggtggctgctgagctggctatgcagaggcgccctggggatcctggtcttgggtgtggaaatttcaggtaagcctggaattgtctgaatgggtccacctcctgcttcttcctcctgactgccctggatcagctcttactccccactccacccccaattactccaggcccatgaccttgtctctgcccacagggacattggaggcaatgaaacagtgacactgcgccagtygtttgtgcctgtgygaccaggcccccgccagctcattgccagcttggacagcccacagctctcccaggtgcacggtgtcatccaggtggatgtggccccagcccctggggatgggggcttcttctcagacgctggaggtgwcagtcacttaggagagaccatccctatggcatctcgaggtggagcttagcccygtgccaggagcaatgggactggagtcagatgagcaaggacattgccccaagataggggcacactacagagcagctccccaggagctcaggtggggagtccagggctcccggagagggagtcagtcttcacttgcactgggggaacagatgctaataaactgttttttaatgaagctgctgctctgtccatctttcagtccatgccacaccaagacggatggagccatggtttgtcccagggctgcacatggccttcctgtatcatccactgataggggctggtgtccctcaccagagagagggaaccacaagggaagttgaggctcagagagacagagtcgatactctttgtataactctcttctacctggaaattttcctgtgggtgagttttggaggattttggctttggtttgaatgaaactgttcccttacctcagggtttttcaagtgtagtctctagaccacttctattacaatcactgaaatgtttattaataatccagatagatgggccctaccatagacttcatgtgtcagaatccccgtggaagaggcccagaacaaactcaccaagagtttgactcctgtgcacactgaagatcaagaacgatgccctttcatttttcttctcagctgttcttttttctgcattcccactgcctgcattcttcttgggctagcagtagccatgagatcatgtacctgatattctggtcctgaacgcatgtcttcttgaacctttaagtttagaaggctttcaagacaaagggctcatggggcaggaaaaagagagctaaaattgagctgttcctactagctgtaaacacatgaacaaggtgcacaccttgaggcatcagtagtgtaacatgcacaagaagaaacaagcccttcccttaaggtgctcctgtccagtgggggtgacagacatgcaaacattctaaatacagtaaatgcgtatgtcacacttaccaggaaccaggctccaagcactttatgaattcatttaatccttacaataaccttatgagataggttctgcatggtagtagagggatgttcaggatgctgaggggcccagagaactgtgattctgcctgggctgatacagaaagtcttcatgaaggtgattaccagatgacccatgaaagatgagaaaaagtcaagtccaagaggcaaaggacagaggaatcacccaacacgtgtaaagcacagacatgtgagacaacacagtatgtttggaaaatgcagacagctggatgaggactggcatatgggtgcatgatgagtacaaagtggcaaaggatgtgcatgaagaggtaagcttgggccagttcattaaaaatccttttgccatatttaggagtttggactttcttctgaaagtaagggggagctttcaattagggatgatatgatcaagttttgcatttcacatgattcataatgaaagcaacatagaaaagaaattagaggggttgggctggaggtaggaagatagagtcctcttgggatgagagataggagaacctgaattagggtagaagcagtacgaatgaaaaaaaaagggtgggtttgaacgttgtataggaaatagaactgattagacttgataacagattcaatttggagaggagggagggcagagataagggtggtggcctgagtttytgactcatgggtgccacgaagagaggtgccatgcacagaaattcgaagctcaggaggaagaccatattataaaagggaaggtagaccaggcacggtggttcacgcctataatcccagcactttgggaggccaaggcaggtggatcacaaggtcaggagttcgagagcagcctggccaatatggtgaaacccagtctctactaaaaatacaaaaaaaaaaaaaaaatagccacgcatggtggcacatgcctgtaatcccagctactcgagaggctgagacaggagaattgcttgaacccgggaggtggaggttgcactccagcctgggcgacagagtgagactccatctaaaaaaaaaaaatgaagataacgacctctggtttttagtctggcctgtaacaagcttaggagtcctcactcctgtcctcacaaagaaaaatgctgaacaaactgaaagtcagcaactcttgttggatctatcagagaattgagggcacagggcaaactgctgcccctaaaactggagagacaaaaaggcagatacagagaatcacaacttaacagcagaagcccagaaacagaaacagaaacagaaacttctggggagccagtaccagggtaggaaaacttaaagtgtaattgactcatagctggaggcttagggtggacaaatttgagagctaaaaaatctatagtggccaggcatggtggctcatgcctgtaatcccagcactttgtgaggctgaggcacgcagatcactgagctcaagggttcgagaccagcttgggcaccatggcaaaaccccatctctacaaaaaagacaaaaagtagccgggtgtggtggcacatgcctgtaatgccagctacttgggaggctgaggtggatcacctgagcctggggaggttgaggctgcagtaagccgagatcacgacactgcactgcagcctgggcgacagtgagactgtctcaaaaaaaaaaaaaaaaaacaaaacatctaggggtcccattcttaggggggaccctaccctttttttggtttttgttttttattttttgtttcttgtttttgtttttcccaggctggaatgcagtggtgcaatcacagcttactgcagcctccaactcctgggctcaagcaatcctcctgcctcagcccaactagctaggactgcaggtgtgtaccaccatggctggctttttttttttttttcttttgagatggagtctcgctctgtcaccaggctggagtgcagtggtgcgatctcagctcactgcaacctccacctcacctctcaggttcaagtgattctcctgcctcagcctcctgagtagctgggattacaggcacgcgccaccatgcccagctaatttttgtatttttagtagagacgggtttcaccatgttggccaggatggtcttgatctcttgaccttgtgatccacccacctcagcctcccgaagtgctgggattacaggtgtgagctactgcgcccagtcacctggttaacttttagatttttttgtttgtttgttttgtttttgtacagacatggtctcactatgttgcccagactggtcttgaactcctagcctcaagcaatcctaggtgtgagccatggcacatggccacaagttttaccaggatcccacagtgaaaactggagaaccccctgccccgtgattctggcaaaggggaggaggaaagtagccactttgaaatacatccattgcattctgttctcactctgttgcccaggctggagtgcaattcattgcaaccaggctggattacagctcactgcaacctcaacctcctgggctcaggcaatctttccacatcagcctcctgagtaactggggctacaggtgtgcacatctatgcctggctagtttttcaattttttttgtagagacgggggtctcgccattttgcccaggttggtctcaaactcctgggctcaagcaatccacctgcctcggactcccaagaagtcagctacacagagatagcagctgaaaatgagtaattcagctgggcacggtggctcacgcctgtaatcctagcactttgggaggccaaggcatgtggatcgcttgaggtcaggagttcgagaccagcctgggcaacatggcaaaaccccatctctactaaaacaaaaattagccgggcgtggtggtgtacgacctgtagtaccacctacttgggaggctgaggcaccagaatcgcttgaacttgggagacacaggttgcagtgagctgatattgagccactgcattccagcctgagcaacaaagcaagacattgtctcaaaaaacaaaaaaaacccactgtaacagaaatgatgaatgtctgtgatgggctcatcaatagactggacatggccaaagaacatggtgcgcttgaagaaatgtcaacagaaatttccaaagctgaaatgcaatgagaaaaaaaaatgaaaaagaacagaatatccaagaattgtaggacaattatagaagctgtagcatacacataatcagaatggcagagaagaaaataaaggaacataagaaatgtggcaataatgactgagaatttcccccaaattaatgacagacacaaaacacagatccaggaagctcagagagcagcaagcaggataaatacaaaaaacaaaaaatgaagatagactgggctgggcaacacagagagacaccccttctctacaaaacatatttttctttttttttttttttgtagagtcagggtctcactgtattgcccaggctggtctcaaactcctggcctcaagtgatcctcccacttcagcctcccaaagttctgggattacaggcatgagccaccacacccaccaaaaaagattttttaaaaaattagccagggactgcgtgcagtggctcacgcctgcgatcccaacactttcggaagccgaggtgggaagatcgcttgagtccaggaattcgagaccagcctgggcaacaaagacttgtctctacaaaaaatagaaaaaaatgagccaggcatggtggtgcatgcctgtagccccagttactttggaggctgaggcaggaggatcacttaagcccaggaggcagaggttgcagtgagccaagatcactgcactccaccctgagcaacagagcgagactgtctccccacctcaaaaaaaaaaaaagagccgagcgcggtggctcacgccttgtaatcccagcactttgggaggccgaggcgagcggatcacgaggtcaggagatccagaccacggtgaaaccccgtctctactaaaaatacaaaaaagccgggcgcggtggtgggcgcctgtagtcccagctactcgggaggctgaggcaggagaatggcgtgaacccaggaggcggagcttgcagtgagctgagatcgcgccactgcacttcagcctgggcgacagagcgagactccgtctcaaaaaaaaaaaaaagtaaaacaacagaagttcatatctacataagaaagaaagaacattagagaaggaataaataaagggaaaaaggaagataactagaatttcacacatatccaatttggggtactttgggactgggtgtttcttgggcagtcgaatgtgcggatcagctgagactgatccggggcggagacaaggatgtgtgaaccattatctctgggaatggaagacatgggctaaagacggagcagtttcactaaatccttgtaaggtggtcaaggcaggcaactaatccagccaacaattaaggagtgtaagctgtgtgttaggttctgtgcttgctgatggaaatgagaggcaccaggaagcctgtggaagagacagtcaaggagagcagtcaattacattagggggctgacaagttcagtgcacaacagaatcctaaaacaagaaactaatttgtgtgtgtgtgtgagaccccgtctcactctatcactcaggctggagtgcagtcactgaagcctcaacctccctggctcaaacaatcctcccaactcagcctcctgagtagctgggactacaggcgtgccactacgcccggctagtttttttgattttcagtagagacaggttatcgccatgtgatccagtctggtctggaactcctgggctcaagcggatcgatcctcccctctcggcctctcagagtgctgggattacaggtgtgagtcaccgtgcccccagcctgtattctatttcttcttcttcctctttttttttttttttttttctttgagagagattctccctctgtcgcccaggctggaatgcagaggcaagatcgcggctcactgccacctcccgtctactgggttcaagcgattctcctgcctcggcctcccgagtagctgggattacaggcgcctgccaccacgcccagctaatttttgtacttttagcagagaaggggtttcaccatgtcgcccaggcttgtctggagctcctgggctcaagtgaccctcctgcctcggcctctcaaagcgctgggattagacac

SEQ ID NO: 95962 - DNA, 33437 bp, Homo sapiens
aagagggaactgaagatacatttgaaacaataatgaatgagaatttccccaaatttgtatcagacaccaaaccacagatccaggaagctcagaaaatactaaggaagacagatgccccccaaaaagaagaaaaaatcaacacctaggcatattatattcaaattgcagaaattcaaagataaaaagtcttggaagagggcagaggagtaaaaaaaaccttacctatggaggaccaaggataaaaataacaccagacttcttagaaaccatgcaaggaagaagagagccatgtgagatatttaaagcattgacagagaagaagaccccaccaacctataatccctagaatctctttcctgcaaaaccatccttcaaaagtgatggagaggccagcacagtggctcatgcctgtaatcccagccctttgggaggccgaggcaggcagatggctttgagctcaggagtttgggaccagcctaggcaacatgatgaaaccccgtctctacaaaaaaaatacaaactttagtggtggcacatgcctgtggtcccagctactttggggggctgaggctggaggatcactggaacctgagaggcggagattgcagtgagccgagatagcaccactgcactccagcctgggcaacagagcaagaatctgtcttaaaaaaaaaaaaaaaaaaagaaaagaaaagaaagaaaagaaaaagaaaaaaaggaaaaaaaaagtgatggagaaatgagaactttcacaagccaacaaaaattgagagaatctgtagacctgtcttgcaagaagtatttaaaaaaaaaaaacttcttcagagaaaagaaagatgatataagttagaaactttgaactacataaacaagggaagagctttagagaaggaataagtgaaggtaaaataaaagcttttacttttcttatccttagttaatctaacagataatggtttgttcaaaataaaacagggcatttatccaaaatgcttgataccaggagaattttggattttggattttttttttttgaattttgaaatatttgcaatatacttactggttcaaaatcccaaatctgatcatccaaaatctgaaatgcttcagtgagcatttcctttgatcattatgtctgtactcaacaagttttggattttggagcatttcagattttgggttatcagatttggggtgctcaatctgtaatagcaactgtgtattcaacgattctagtttatggataagggaactgaatgacagcaatgatagaagggacaggagggagaagttaagactactttgttatcataaggtacttgcactaccatgaaatgtagtgttatttgagtagacttggttagttgtaaacatataatactaaaaaaagaactgctggaggccgggcgtggtggctcatgctggtaatcccagcactttgggaggctgaggtgggtggatcatgaggtcaggagttcaagaacagcctggccaatatggtgaaaccccatctctactaaaaatacaaaaattagccgggtgtggtggtgggcgcctgtagtcccagttactcaggaggctgaggcaggagaatcactcgaatccaggaggtggaggttgcagtgagccaagatcatgccattgcactccagcctgggtgacagagcaagacttcgtctcaaaaaaaaaaaaaaaaaaaaaaaactactggctgggcatggtggctcatacctgtaatcctagcactttgagaggccaaggtgggaggattgctcgagcccaggagtttgagaccagcctgcgcaatataatgaggtgttcccccagaacaaagccagtctgcataatgggcagaagatctgaatcactataaaccttgcttaaaagaagacatacaagtcgcaaacaggtatatgaaaaggtgcgctacataactgatcatcagagacatgcaaatcagaactacaatgagatattatctcactccggttaaaatggcttttatccaaaagacaggcaatagcaaatgctggtgaggatgtggagaaaaggaaccctcatatactgttggtgagaatgtaagttaatacaatcactgtagagtcatgtgtttttttaaagaacattggctgggcacgttggctcatgcctgtaatcctagcactttgggaggccaaggtgggtggattgcctgagctcaggagttcaagaccaccctgggtaacatgatgaaacctcgtctctactaaaatacaaaaaattagcctggtgtgatggcaggctaataagtaagtaagcccttactaataagtaagcccagctactcaggaggcagaggtcgcagtgagctgagtgaccaaaagttggtcctatgaaaagatcaataaaattgacagagaagacacacataaaatcagaatgagtgcagaggcactactatcaaccttacaaaattgaaaatagaatactataaacaagtatatgccaacaaattagataacctagatgaaacagaaaaattcctagaaacagaaattatctaaactgatgcaagaagtaaaaagtctcaataggtgtgacaagtaaagagatggcagtaaaaaaccttgcaataaaaaaagatgtttaggccgggcgcggtggctcacgcctgtaatcctagcactttgggaggccaaggcgggtggatcacctgaggccaggagttcgagaccagcctggctaacacggtgaaaacccatctctactaaaaatacaaaaagtagctgggtgtggtggtgggcgcctgtaatcccagctattcacgaggctgaggcaggagaatcgcttaaacctaggaggcagaggttgcagtgagccaagatcatgccactgcactccagcctgggcaacacagcgagactccatctcaaaaaaaaaaaaaaaagatgtttaattttatgtgtcaacatggctaggcaaaggtatccagatagttggtcaagcattattctagatgtttctgtgaagatattttttagatgaaaataacatttaaatttgtagactttaagtaaagcaggttaccctccctaacttggatgggccttatccaatcagttgaagactttaatttgaaaaagactgacctccccagaagaagaaggaattctctcagcatgctgccttcagacttgaactgcagcttcttccctgtttctccagcctgccagcctaccctagagattttggacttgccagctacctctcaaactctctctctctacccccatcccccatatatgtattgtttctgcctaatacggtccaggaccagatggcttcattggtaaattctaccaaacatttaaagaattaacaatccttctcaaacacttccacaaatagaagaggggcatatttcctaactcatgctatgaggctaacattaccctgatattaaaaccagataaagacatcacaagagggctgggcatggtggctcacacttggggagaaacactttgggaggccaaggcgggaggatcacttgagtccaggagttcaagaccagcctgggcgacacagtcagatgtagtctctacaaaaaaatttaaaaattacccaggcgtggtggcatgcacctgtagtcctggctactcagaaggttgaggccagatgatcacttgagccccaggaagtcgaggttgtggtgagctgtgttcatgccactgtattccagcctgctgggtgatggagcaagactatgtgtccaaaaaacaaaacaaaacaaaacaaaacaaaacaaggaaagaaaattacagtcaaatatgctctatacatattgatgcaaaattcctcaaaaaaatactcgcaagccaaaaccaacagtttattaaaaggattagacatcatgaccaagtgagatttatccaaagaatgcaagggtggttgcacagcattgtgaatgtaataaaaggaaactgaattgtacacttaaaaattgttgaccaggcatggtggctcacacctgtaatcccaatacattgggaggatgaggcaggaggattgcttgagctcaggagttccacaccagcctggacaacatagggagacccaatctctaaaaaaaaaaaaattatttttaatttaaaaattagttgggcgtggtggcatgtgcctgtggtcccagctgctcaggaggctgaggtgggagaatcccttaaacctgagagatcaaggctgcagtgagctgtgatggagccactgcatgccagcctgggcaacagagcgagaccctgtctcaaaaaacaaagcaaacaaaaaaaacaatgccagctgcccacattactgggtggagctatctgaacctttactagttcagagtggtgcctgattcatgagtcatttctttgcttgaataaatggttaaatttaatttgtctaaggtttttctttttaatagcagtaaacactgctcaggtgccacaactgacatccttaactgcaaacctaagtccttcaggagaggtcatgcctatcattaaactccatgtgccttgcccaccccctgtcccctgtcccttcagctcaccttccatatgttgaggggatgagcctcctaaagtaaccgaatctgctttttttttttttttttttttttttgagacagagacttactctgtcgcccaggctggagtgcagtggcatgatctcggctcactacaacctctgtctcccgagttcaagcgattctcccacctcagcctcctgaggagctgggattacaggtacccgccatcatgcccagctaatttttgtatttttgtagagacggggtttcaccatgttggccaggctggtcttgaactcctgacctcaggtgatccacccgcctcggcctcccaaagtggtgggattacaggcatgagccactgcacccagcctgaatctgcttcttaagctcacaaacttctctgctggttccactttggggaattacaaggaattacattccttggcttggcaaagaccatttccagactggtgccaacatgttcctccagtctatctcaaaacccttccctgcatgaacaccaagttctctgcagctaggctgaggggtttgctcttctcttcacatgctctgcatacattgtagtggtctccagcccatttcccttggcaaactcctatgcggtcatcaagactcattaggactggcgcagtggctcacgcctgtaatcccagcactttgggaggccaaggcgagcagatcatgaggtcaagagattgagaccatcctggccaacacagtgaaaccccgtctctactaaaaatacaaaaattagctgggcgtggtggcgggcacctgtagtcccagctattcaggatgctgaggcaggagaattgcttgaacccgggaggcggaggtggcagtgagctgagatcacgccactgcactccagcctagtgacagagtgagactcagtctcaaaaaaaaaaaaaaaaagactcattacaaatgacacactattgtgggtctcccttagtcctccccagacagaatggttctactgtcctgtgcttccgctgtatctcttgcagataacagtgagaggccctgaatttcacaccacaccagggacaggatcttgagccattccatttgaaatgttaagggaaatggtaactctctgaggttggtggtcttggggccacccaaggaacctggcatccaggttacaggtgtgtggcctcgactgtgtccctggcctttgggtgcccactccccacccccaccmccatgctctgagggaagggcctgagccattggcaccagctgagactgtgaaatagaagaggcaaagtagaagcaagggaggtggccactgtgccctgagagcaggaggggcaagcgggccacacacagaccaagcacacgtcccctcaggtggccacgcctcaaaggctggactttggccgacttggacaggcaggtgagccaggctgtgcccagcaagccgaaggtgcctgggcttgctcattcagtcacagtcacagccaccatgccagggaggacctgggagctgtgcctgctactgctgctggggctgggactggggtcccaggaggccctacccccaccctgtgagaggtaggggtgtggggaaggcagcaggggaggatggcaataagagggaggctgggatgagatctcaagctctggggtcggtacttcagagggaaaggaagagattataaaggaaggaaagagtagggaagagaagaaaatgagaattcctatgtagcaggctctgtgctgggcactgcacctgcagtccgttttttttgttgttgttgttagagtcttgctcggtcgtccagrtggagtacagtggcaccatctccactcactgcagcctagacctcccgggttcgagagattctcgtgcctcagcctcctgagtagctggaatcacaggcatgcaccaccacgcccagcctgtcattgatttttaccaaaattttccaccgttggaagggacattaggcttggcgactgtgctgggaatacaagcgtgagccaccgccccctgtcrggacctgcagtcctgataccagacgcagctgccagagcctggcctgaggtccaagagcctgctggccagagcccgccctcccttcctctcctcctccaagctgccccttgaactgtgcaggcctcttctcaggattgttctagcaaactttctgctccagcttcctagtctgggtgtgagaggcagcctaagggcctgaagacagcacttgggcttragcyctgaccctcatattctctctgtgacccagggcaggtcaaggctctttcctgagcctgagtttccatcaccagggacagagatgagtgaccctgtcctgtctcctggactcaggcgatgtccayccttcgttccacatggatttatggagctgtggccacatcagccactttaccagctcctgcaagaacaataataatagaagaaaaacagctgggcacggtggctcatgcctgtaatcccagcactttgggaggccaaggtgggagctatcatctgaggtcaggagttcragaccagcctggccaacatggtgaaaccccatctctaygaaaaatacaaaattagccgggcatggtggcgcacgcctgtaatcccagctactcgggaggctgaggcaggagagtcgcttgaactcgggaggtggaagttgcagtgagccaagatcatgccattgcactccagtcggggcaacaagagcaaaactctatctcaaataataataataataataatagaagcaaaacagtaacagaagcacagtttgaagtagagagaagttagggcccgctggtgtgggtgagcagagggtgtgttagagaggatggggagggacggtgtctctgaggaggtgatgtgtragcagaattgtggcaggaaccattgctgagctgatctgggagaggacagtccaggcatggaaagggccatgcagaggccctgacgcactgttcagggattgggamgaaggcctgtgtgattggggcagagtgggaacaggtccggggagagcggggctccaggcaacaaggtttgggcttgggttccagtggttagactagagacagagacaaggggttcaatagagggtgtgtgttacagggagagttgacagtgcttgcccatgacaatwgtggartataaaggggaaaagtgtacctgggataattaataggttttgtcctgagcaattgtaatgaggacttcagagaggctgggtggtccagtgctttgtcaagcattaggctgtttgccaaatgtaggggaagatgactttactggtgttccctaagaccaacctcaggccagtgattcactaacacttccaaatggttataccatgattatggtttcattttttttctttttttgagacagagtctygctctgtcgccaggttggagtgcagtggtgcaatctcggctcgctgcaacctccaccttctgggttcaagcgattctcctgcctcagcctccccagtagctgggactacaggcacctgccaccacgcccagctaatttttgtatttttagtagagacagaggtgttgccatgttggcaagaatggtctcaatctcttgtccttgtgatccgcctgcctcagcctcccaaagtgctgggattacaggcatgaaccaccgtgcccagccttgattatggtttcttacagtgaaaagatacatgttaaagccatcaaaggtgaaatattctagggccaagtccaggagaaaataatctcaatcttccagtttttcctctcccagtggatttatatggacaggacttgatttttccagcaataacatgtgacagcacgcatgaagtattgccaatcacaaaagctcacctgagtcttggtgtccagtgtttttattggaggtcagtgatgaaagcgtggactacctgtgtggctgacctcagttactcactctccagagttcaaactgatactgggcggccmaaggcccctgccacaaatcacattattagcatcaaatatctggcatggcccaaggccccagaaaaacmaagacttatcaggcagcatattttggtaatttaaatctcatctctcagggctggtcacaggccagaattttctctgaaatgtgcagggtttgaacacagcagacctgctgagtcaatcctttcatgtataagccacttcttgtataatgaggaattagtttcatttttgtcttgggttcctccmaagtaacctctaagctcttggaatctcccmagtgataggaatgtctgttattaatagtggtccctgattagtgtttttttgttgttgtttttttctttctttttkttttttgagacagaatctagctctgttgcccaggctggagtgcagtggtgagattttggctcaatgcaacctctgcccccagggttcaagtgattctcctgcctcagcctcccaagtagctgggactataggcacgcaccaccacgcctggctaatttttgtatttttagtagagacggggtttcaccatgttggccaggctggtcttaaactcctgacctcaagcaatccacccaccttggcctcccaaagtgctgggattacaggcatgagtcactgcacctggcctgattgctttttgagacagggtctcactctgtcacccaggctggagtgcagtggtgcagtcatggctcactgcagcctcaatctctctgggcttaggtgatcctcccaccttggcctcctgaatagctaggactaggtgtgtgccaccatgcctggctaatttttgtattttttgtagagatggggttttgccatgtttcccaggctcttggtagcttttgttaatgaggtgacttatggtgggtccctagacagcttctgctaacaagacgactccacatgaaggcaggccgtgccagaaaggccaagcatgtgtgtagagggttggggttttggtccacatgatatcagcccaacttctcaaccttcagggaggagaaggggctggagatggagttcaattacatgatcaatgattcaatcaatcatgcgtatgtcatgaaaccccaataaaaactctggacttcaaagtcctggtaagtaggctgggcacagtggctcatgcctgtaatcccaacactttgggaggccgaggtggatggatcacttgaggccaggcatttgagagcagcctggccaacatggtgaaaccctgtctctaccaaaaatgccaaaaattagcagggtgtggtggtgcatgcctgtaatcccagctattgaggaggctaagacgtgagaatcacttgaacctgggaggtggaggttgcagtgagttgagattgcaccactgcactccagcctaggtgacagagtgagaccctgtctcaacaaacaaacaaataaaacaaataaataccaagtcctggttggtgaacacattgatgagccaggaggggaaacgtcctggttccatggggaaaggacacagaagctctacattcagggcccccctagaccttgccccatgcaccccttcatttggctgatcctggcttgtattcttataataaaactatagccctaagcataaccgtaagcttttctgagtcctgtgagttgttctagcaaattatcaaatctgaaagggttatgggaacccctacatttgtagccacttggtaataagtgcaggtggcctggggacccctgaacttgtggctggtgtcagaagtgaggccgtctcactcaggaccgtgcccttaacctgagtgtggattctgcactaactcccgatggttagtgccaggattaaattgcagtattgcagttggtgtcagaaaatgtggatttactagaatgaccctgactcactgaaacatatgggttgggaaaagaaaagttgaaagggcaggggatgagaaacctttcattctcgagtggatacagggtcacccatggtgtgaagagcagtcatgctgcaatcagttactggaggtaaaagttaccaatggaaattagagrtgattgatcactaamtttggggagttgactcatgtgcatagggaaatgtatactaagaagaagaaaagcaaatatacaatccctatagacttttatctctaatagccaaactgaaagtaaaagatgggccatgcttagattctggtcagtggaattacaacctccagtcctgcactgtggtaccaaaaacacctgctgaagtcctgatgggcactgcaatgagattgagagaatataaaaatgcagccaggtgcagtggctcacgcctgtaatcccagcactttgggaggcagaggtgggtggatcatctgagatcaggagttcaagaccagcctgaccaacatggagaaaccctgtctctactaaaaatacaaaattagccgggtgtggtggtgcgcacctgtaatcccatctactcaggaggctgaggcaggagaatcacttgaacccaggaggtggaggttgcagtgagctgagatctcgccattgcactccagcttgggcaacaagagcgaaactccatctcaaaaacaaaacaaaacaaaacaaaaaagtggtatgsgcttgaacaggttttatgtggagtggttgcatctcttctacctgaatgtattacagggatggatattgtatctgaccaggaaatatttccactacctagtattgtaaaacagaaggtatggaaatccactcatcaagcaatattgattagacattccaaatgggaaccaataagattgcccaagtccacagagattgttagccttctctggagcatagactggactttatagcaaaagtcttagagcacctcctggcacgagtgctgagactttggactagataatttccatgtgagaggtaattattagcttgctatcagacattatttgaaattgcccctatgactgaaggatgtaagataatcttgaaacctgaaatacctataatatcttggggaaatgctcacagagagtgggcagggcccagaagagttccataatgaaatggaaatggctggatcaggaacaagctcctgggggaatgcagttactcagtgtattcaaaagcagagagactcttttcccctaggactgactttggacccactcaaagagttgttagattctattgccaattggacagtgccctattgacagctctcgattgaccaacaaagctgtttggcttatggatggcagtcccaaggtgaatgaacagcctattgtttggaaggttgttactctgatcaaagaaggcaaaaacaaatcagctctgtgggttgaattgcatactgtttaggtttttactaactcttggacagtggccaatggcctggccatatggtcaggcggaaggacaatgggaaccttgtctatatggaaatcacaacaggaattttaggagtgcattaaagcaggttatgttgatgtccatcagaaggacccctttccaggatcaaaaggaactggggcaacaagcagacatccctgcgtgctcacctgaggtggccacgtgtgttcatgaaataaatggacattgcagggcagcagccatgcagagaagagctgaatttagacttagtcctgttttcccgctgaggcacaaaatgccagtaagtacttttctgtctgccaaaaagagaaagaccgcacatggctgtgggaagatgaccttggagggaaggccctgcacatacctggcaaggtggactgatgctggtaggcctggagggctacctgggtcctgacaagagtagacactgattctggactgggctttgcatggccagtggtagatgcaaatgctcaaaatactgacactgtaaaagggtcagaacaaaagatactccaccaatttgaaccactgagttacatttcttcagatcaagaaacactttcatcttcagaggagtggttcaatagagaactgggatgggcagttgaagcatgtgctatctaaaacagcagggaataagggtatgaaggtatgaaaggctggcttacatgccttcacaagtatgtgctcacactcaacgcargggggctcaagggtttgtccctattagatagattcttctgcttttctggaagttaaagggaagaggggctgggagacaatgactaacaattcttccaatgtggtatgactataccattttcttttttccctacattaaactttctttttcccagctgattcagtggttccagtaaatcccagtggtcccaggactgcagatacataggataagagtagtttacacaccacagttctagtgttattatattctgtgttttttctgtgtgcttactattaccagtgagttttgtaccttcaggtgatttctttttttttttttttttttttttgagatggagtctcgctctgtcacccaggctggagtgcagtggcgtgcgatctcagcttactacaacctccatttcctgggttcaagcaattctcatgcctcagcctccagagtagctgtgattacaggcatgcaccaccacgcccagctaatttttcgtatttttagtagagatggggtttctccatgttggccaggctggtcttgaactcaggacctcaagtaatctgcctgcctcagcctcccaaagtgctgggattataggcatgagccactgagcccagcgatcattaactttttttttctttttttttctgagacagtgtctcactctgttgcccaggctggagtgcaggggcgagatctcagctcactgcaacctccacctccccggttcaagcgattcccccacctcagcctcctcagtacctgggactacaagtgcgtgccaccacacccggctaatttttttgtattttttggtagagacaggatttcaccatgttggtcaggttggtctcgaactcctcaagtgatcatcccgcctcggcctcccaaagtgctgggattacaggcgtgagccaccatgcccggcccaggtggtttcttattgcatgttaacatcctattctttctgatcgaagtatactcttcagtatttcttgtaggactggtctggtattgatgaaatccctcagcttttgtttgtctgggaaagtctttatttctccttcatggttgaaggatattttcaccagatatactattcaagggtaaaagtttttttttccttcagcactttaaatatgttaagccattctcttctggattgtaagatttccactgagaagtctgctgccagacttctcaccagtttgaaccactgagctccattgtatattatttgtttcatttctcttgctgcttttaggatcctttctttgtccttgacttttagtttgattattaaatgccttgaggtagtctttgggttaaatctgcttggtgttctataaccttcttgttcttggatattgatrtctttctctaggtttgggaagttctctgttattatccctttgaataaactttctgtccctatctctttctctacctcctctttaagtacaataagtcttagatttgccattttgaggcattttgattgtattttctagatcctgtaggcatgcttctttgttttttattttctcttgtctcctgattgtgtattttcaaatagcctgtcttcaagctcactaattctttcttctgcttgatcaattcggctgttaaaggactccgatgcattcttcagtatgccaattgcatttttcagctctagggtttcagcttgattcttttcaattattttaatctctttgttacatttatctgctagaattctgaattaggactgcagatacaaatgcaagaagcaggaattattcctaagcaaaaaaatataactatattcttaaacttttatgtgaaaattcctaagggtctgatggggcaggttgtgccttcaccttatctagcaaaaatggggctaacaataaacacaaatatattgcctactgctcaagatagcttactagttctgtacctatgtaagcctgccctatatgaatgggagtggactgaaggagaagcatttacaagacaagtgtttctacctacaatctggataaatacagtggcctaacccaatgtcctttccaaaggtggaaaagtttgggtataaatggagagaaagaggtgtagtagctgggaataaatgaatgaatccatgcattaataagaaatgcaatgagggaagtccactattacattaatgcttagaaagaagatcagagaaaaagatgataccgcctcttcattcaattatacttgacgcctgaaagggtaaagccatattttgccaagaccactcctgctctggaagctgacaggatcaaaggggaacctgccagcctgagtggccttatcctgggagacattttgtcatatgatctggtgatgaactggactaattattaatgacaatgggactctagtaatgtgtgaacatcttttgactcttatttttcaggttacttctaccataataaagcactggcattgttggcaagattataattctaatattgagggtcacatgtattggggaattgagctaaaagctcctatctctacttccacattagctcctctaaattttcggcatattcatgttgatattatctctttgtctgttataaaaatgctatcccaaatgcagttgctcaggaaagcataattgttttgctacaagggatctacgggtaaaggctagggactggactgttgtataatagagtttgtctgttctttgacccaggttgctgggtagtaacttctaagctcttggaatttcccaaatgataggtgtgtctttggtattcatggtgaggctctagatggattatactaactagctgactcaggacgaggactggacatgccagaaagaccaaactgtgtgtttggagaggtggggctttgagccaagtgatatcagcctgacctcccaatctctgggtaggggagtggaactggaaattgatttctttttttaaataaaaagtaataccttacatttatttaatatttaagacatttgaagcccctcacttaatcttttgttttgttttgttctttttttttaatttttggaggtacatagtaggtatatatatttatgaattacatgagatattttgatacaggcatgcaatgggtaataatgacatcagggtacatggggtgtccaccacctcaagcatttatcctttgtgttacaaacaatctgattatactcttttagttatttttaaatgtacaattaaattatttttgactacagtcacctgttgtgctagcaaatactaggtcttatgcattatttccatttttttgtaccattaaccatccccacctccctgcgactcctgccactataccactaccctttctagcctctcctaatcgtcattctactctctatctccatgagttcaattgttttaattttaagctcccacaaataagtgagaacatatgaagtttgtctttctgcgtctggcttatttcacttaatataatgacctccagttccatccatgttcttgcaaatggcaggatctcattcctttttatggctgaatagtactccattgtggatatgtaccacattttctttatccattcatcagtcgatggacacttaggttgcttccaaatcttggctattgtccatagtgctgcaataaacatcggagtgcagatatctcttcaatacattgattcttttcttttggtcatatatctagcaatggaatttctggatcatatggtagctctatttttagttttttgaggaaacttcaaacagttctccatagtggttgtactaatttacattcccaccaacagtgtatgagggtttccttttcttcacatcctcaccagcatttgttatgacctggcttttggataaaagccattttaatagggatgaaatgctatctcattgtagttttgatttgcatttctctgatgatcaattatattgagcaccttttcatttgcttgtttgccatttgtatgtcttcttttttacttcttttcttacttaagggaatgtatgtctgcttttgagtaatgtctattcagttcttttgcccatatttaattggattgttagtttttttaatagagttttatgagctccttatttattcattccgagatggagtcttgctctgtcacccaggctggagcacagtggcgcaacctctgcctcccaggttcatgcaattctcctgcctcagcctcccgagtagctgggactacaggtatgcaccaccacgcctggctaatttttgtatttttagtagagatggggtttcaccatgttggtcaggctggtctcgaactcctaacctcaagtgatccgcctgccttggcctcccaaagtgctgggattacaggcatgagccactgcgcccagcccatatgaacatttgaacattttaacaatattgattcttccaatccataaataatgaacatggaaaatctttttttttttttttttttttttttttttgagacagagtctcaccctgttgcccaggctggagtacggcagcacaatcacggctctgcaacctctgcctcctgggctcaagcgatcctgccacctcagcctcccmagcaacatggtgcatgccaccacrcccagctaattttttcattttttttgtagagacagggttttgccaccatgcctagccaaggtttgctagtgttttgttgaggatttttgcatcaatattcattggtgatactggcctatagttttatttttttttttgatgtgtcttcatctggttttggtatcagggtaatactggctttgtaggaagagtttggaagtattccctcctcctctaatatgtctttttctctaaatgcttctccttgttaaaagtaaatttgtaggctgggtgcggtggctcacgcctgtaatcccaacactttaggaggtcgaggcagctggatcatctgaggtcagaaggttcaagaccagcctggccaacatggcgaaaccctgtctctactaaaatacaaaaattagctgggtgtggtggtacacgcctgtaatcccagcaacttgggaggctgaggcatgagaattgcttgaaccagggaggtggaggttgcagtgagctgagatggagccactgcactccagcctgggcgacagaatgagactcagtctcaaaaaaaaaaaatttgttagggataaaagactttaaggtgataaaaataggattaataaattcagcttgttccatgatgggggaacttatctcccttagagccttttctatctcatgggccaatgtttattccaccatgtatgctgttgccatttkgtattaaaggcctgagtgctgttagcatacatgttttgtacccagaatttgtgagttccccatagtagggttcgatgagtggacatcacacctaggtgtaattagtttgagtatgccataaggcctcmcatagccttccttgtctcagtatggggctgttccccaggagaatttggacaaatcatgggatgtctactgctttaatactataagaaacccatttgggctgggcatgctggcccacatcamagtaatctcaacactttgggaggccaagcygggaggatcacttgaagccaggaggatcacttgaacccaggagttcaagaccagcctgggcaacatattgagaccctgtctctacaaaaaaatagaaaaaattagctggatatgctggcatatgcctgtagtcccagctactcaggaggctgaggtgggaggattacctgggcctgggagattgaggttgcagtgagctgtgattgcatcactgcatttcagcctgggtgatagagcgaacccttgtctaaaaaaagaaaaaataggctgggtgcagtggcccacacctgtaatcccagcactttgggaggctgagacgggcggatcacctgaggttgggagtttgagaccagcctgaccaacacagagaaaccccatctctattaaaaatacaaaattagccgggcgtggtggcacatgcccgtaatcccagctactcgggaggctgaggcaggagaattgcttgaacccaggagacagaggttgcggtgagctgagatcatgccattgtactccagcctgggcaacaagagcaaaactccgtctaaaaaaaaataaaaataataaaaaataaaataaaacttttttctattctgtttaacagcttttcatccacgaaaacaagggtgatctgcatttgtgcatggagctcattgggacaggctggccatgctgctgctgtatttcgctcattttaactggagacctttctaagcattcagtgatcaaggtttacagttacacagtgattagtctgccatgagttgtaaatcacacaatccaaaggccccmaaaagagtagttcctggaaattccttcccaaatggtatccttcgtagtagatgtaacctgaaaattaagagtcaaaagtctctggcgcattgctagagttacatcctgttgtcagcaattagtgcagctcatcatcatatcacatgaccaaatctcagagcagtgccactcaggtttgcaggctgccatttgaccttgtcagggcccaacagcaggagtcgtcttggcaaatgcatggcttccccctttcaggcatctggtataatcgtgctaagagacaatcttattctcttgtttcgagtctctccagacaccaatgtgatattggattcccctcattgtataacccatttactcattcctttaccctcagctactatgtctcttcctcaccatctgtcatttatttatttwttttttttgagatggagttttactccattgcccaggctgcagtgcagcggtgcaataccggcccactgcaacctccacttcctgggttcaagcaattctcctgcctcagactcccaagtagctagaattacaggcaccatcatgcccagctaatttttgtatttttagtagagacgggggtgttgccatgttggccaggatggtcttgatctcctgacctcctgatccacccgccttggccttccaaagtgctgggattacaggcgtgagccaccgcgcccggcctatcattgatttttaccaaatttttccacctttgtaagggacattaggcttggccactgtgctgatccacattgccagcagtaatagtagtgttgcaggtgcctcgccctcagtctgctcccatgcatataaggaagagttacaaaggtgcggaactagtgggctatcttgaccactaggcaatacagctgcattcactaagaagccaaatttagccagatgctgtgaagccacaacacaccccatcaggcccttagtaaatctggcatgaaggtttaaaggtacagttgcagttttttctttttttgttttttttgagacggagtctcgctctgttgcccaggctggagtgcagtggcgtgatctcggctcactgcaagctctgcctcccgggttcacgccatcctcctgcctcagcctcctgagcagctgggactacaggcacccgccaccatgcctggctaattttttgtactttttagtagagacggggtttcatcgtgttagccaggaaggtctcgttctcctgaccttgtgatccgccctcctcggcctcccaaagtgctgggatcacaggcgtgagccactgcacccagccagttgcagttttttctttgagaattgtcccttcttctgacacccacatttgcagtcctagtcgtggggccactgtattgggtaggaaaaaagtagttgagatgatgtgggaacaaatcatatagtcataccaacaactccgccctccctcttcccagatcccccagaaaaattaggggaatccaaccaatggagacctccctttgctcctytcaagctgaatgtgagcacacactttttttttttttaaagacacagtcttgcttttgttgcccaagctggattgcagtggcgtgatctcggttcatkgcaacctccayctcctgggttcaagtgattctcctgcctcagcctcccaagtagctgggatcacaggcacgtgccaccacatctgtctaatttttgtatttttagtggagatggggtttcaccatattgcccaggttggtctcgaactcctgacctcaagtgatccacccacctcagcctcccaaagtgctgggattacaggcatgagccactgtgcccggccagagcacacatttttgaaggtatgtaagccaccccttcatgcttttatctccctcccccactgtagacagcaaatgtttcgactctcttttccaattttctatcaaagcgctactctgaggacggtatgcaacaccgtatgtccattkgctgtggtattgcttggcccattgttggacactaggtgctgtcagttgtgttcttggatctgaagaaatgtaacttggtggtccatattggtacagcatcttctgttctaatatagcatcttgtagtattttgcacatttgcatctacgacctgatatgcaaagctactttaatgtgccccttacctttccatagggttatgmcccaggtgggcaacactttaatagttcagtttttcactgcccatctgccaggccattggctactgcccataagtcagcaaaaacccaaacacaggggcttttatcattcgattcttctatcactgcaaggaaaacagcatgcaattcagtccactgaggtgatttgttcttaccttcttcaaagattttccatcctcagtcagagtgcaaaggccttccaaacaaggtctttctacccataaaccaagcagctttttgttgttcaaccaagagctgttcatagggccccttctatgtggcactaggatccatcagctcctcggtgcttccaaagttggccctagggggaaagaggcttcctgctcctgaataccattagcacctccttgcattccctgagcagcagactcctgaataaaccatttccattttattcaggaactcttctgggcactgccttcgttacaaagtgttcctctgacatcacccaagacattatgggtatttcaggtttcaggattattttgtgtcctgccgtcatggaggcagtttcaggaaacacccaagagccagctagtaattgtctctcaaatggcctataccatacaccgcctggaaatgttcyggcccaatctcagccatcaccactgagtgcacctcccaggtttctgccataagcccttccgatcgagtctacacagggccattgtacagagaattggccacaccagtatgattaaagtgctaacctccctttgtccaccagctattctacaccatctcaaattagcaaccagtgtgggctcaggcagtcggacaggtactttactgcccaaagaccctacttgttccctcagccctgtatgtcactccaacccacaaactcctaacacacacacacacacgcacgcacacacagcccttgtccagtcccagggaacatgccttgaccagtctaycacagactctagccttctcttctgtcctaatggggtggtggtggtgacctgacctgctcctatccctgtctctgcagtgagatttactgccacggggagctcctaaaccaagttcaaatggccaagctctaccaggatgacaarcagtttgtggacatgccactgtctatagctccaggtgaagcacctagggctgaacgtcctctccagagaaccttctctccaaagaaggcagggggcaagaccaagtagagaggcccctgtgattagggagtggcttgtgacaccctgctgacccctccctgctgcctgctctccagaacaagtcctgcagaccttcactgagctgtccagggaccacaatcacagcatccccagggagcagctgcaggcgtttgtccacgaacacttccaggccaaggggcaggagctgcagccctggacccctgcagactggaaagacaggtatgactctggaaggggaacaagagagggttccttccaactgagctgcctccttgaaccctgtggggcctgtgttctttcagcccccagttcctgcagaagatttcagatgccaaactgcgtgcctgggcagggcagctgcatcagctctggaagaagctggggargaaggtatcagcgtcctgggcctgcccaaggcctgaccaagggaactgaagagaggaatgtgcctggggcccacagtgtcttcggagcacagatcaggtttcctttcctgagaaaccagtccctggyycctgggtccccaaatagaggccctctagaaagaacttctgaggtcagaagggcagcatctacttctaacatctcgcctcctccaggaaggctccctagcctccccaggaaaccctagcctgccctgccacctccaggctgcccagcactgcctctggcaccactgggtagatgttcactgcctgctgggctctctccttccctgagctcctgggccaggcctccgtctcaggaggaatcagtgctactgctgcgtggggccaggccctgtgttcagccctgtcctgagctactttgctcatccacatcccctcacctggggaaagggtttggggttttatccccacctggctcagagaatgggggtgatgggccaatcctctgggcccggctgggtggtggcagcaaggatggggagtagagcggaaatggggggctggcacccccctcacccacccagcccaccctgggtcttcgtaatggccactgcttggtggatacctgcccagtgcctggctcagtggtcgggtcttctacccggcaccaagttgagctgggactcccaaggccrgcaggtgagggatgaggaccccaaggctcccagcggccaggccttgattacatggctgagtagcagtggagccagcgctgaacccaactgcctggctccaaagctgtgactcccggggcctcagatcccccagctgcctgtagcctctgcttccgtggggattctaggctccccttgccctctctcccgactccagatgaagccagaggttctcagccaccctgagcggttctctctcatctactcagaacatcccttcattgtgcctggcggtcgctttgttgagttctactactggtgagcgcccaggcccaagagaccaaggggcctgcaggactggcagtggtggagaaacccagggccagcagggtgtcttcagcagggcagagtgccccactggctggtgtgcagggcagagggaggcagcagggtggtgcctaagctgccccttccccagggactcctactgggtcatggagggtctgctcctctcagagatggctgagacggtgaagggcatgctgcagaacttcttggacctggtgaaaacgtgaggggggscaggcacctccagcctaggtggggaggagaggcaggtgtgccacgggcatgcagctggattgccttggtgccagttgctggggagagggcatctcagcaggccttccccttggcagctatgggcatgtccccaatggtgggcgcgtgtactacctgcagcggagccagcccccactcttgaccctcatgatggattgctacttgactcacaccaatgacaccgcctttctacagtgggtaccaccctccctgtgctgctctgcagacccacccatccctcagacctctcagggctggggatgggcagcacgcctgggctgaggtgttgtctgcttcactccagggaaaacattgaaacactagccttggaattggacttttggaccaagaacaggactgtctctgtgagcttggagggaaagaactacctcctgaatcgctattatgtcccttatgggggacccaggtgaggaactgggcagcccacccctcaatctcttacctgctcactctggttagagcatcacaatgccccgggcaggaggaggagtgacttagcctggcctctcagatggtgacaccgagagccctctgcaatcctgggctgtggggcccaagggcagctggatcaagatggctcagcctcttcttgaccacagaggggcttagtagctactagtgccaggctgcccacctctcctcyttgccaggcctgagtcctacagcaaagatgtggagttggctgacaccttgccagaaggtgagcagcaggagggtgagggagggctgggggcagggcagctgcacacctgctgtgtcaggctctggtctcctgtcaatggctgcctatcctgcagccgggactggctggttccctgctctgtcctcacaggagaccgggaggctctgtgggctgagctcaaggctggggctgagtctggctgggacttctcttcacgctggctcattggaggcccaaaccccaactcgcttagcggcatccgaacaagcaaactggtgcctgttgacctgaatgccttcctatgccaagcagaggagctgatgagcaacttctattccaggctgggtgagcaccccagtagggaagggaaagcagggagcttggtttcctgctcaggcttggcaatagaactggaagtaggacccttgtgtgacaggccttcagcaacttagcctgtcgagccccgccctagtggaagcctgcactcacatttgcgtaccagacaagagracaaacggagccaaccctaatcctctcttcctccctttcttactgtgagggtctctagggtctgtgaggggaaccctagtccacgcatccaaaatccttccactccctctccctcagacagctgcccttgaccccctaagagctaggggaatccacccagccagtacccttgggaggatagaccctggagaccctggggacagatcagctccagtggttccctgggagcagtgcggggccayaggccagaaatgtggtgggctccagatcggcacatccccttggtcatcagggtgtctcagcctttgcagagaaacacaaagcggggaggctaaagtagaaccacgaaaaaagcctggggcagcaggcagggcactggctgctggctctaaaggcagcactgccccagggaacgactcccaggccacgaagtacagaatcctgcggtcgcagcgcttggccgccctgaacrcagtcctgtgggatgagcagaccggagcctggttcgattacgaccttgagaagaagaagaaaaaccgggagttttacccatccaacctcactccactctgggccgggtgtttctctgaccctggcgtggcggacaaggctctgaaatacctggaggtgagggcacagcaggtggctcgggtccactgcaggcagcaccgccccctcccgaccctgaacaggacctgcaggggagggcgcttcctccggctatgccccttgtcccagcctgcgggtcccaccagagccaccggggggcagctgtgagccgagaaaagaagagccaggaaggggacgtctggcttcccgcggggtccagcgtcctgtcctggctcccagtccagccccacccacagtcatgggaatgtctgggaccttctaggacaaccggatcctgacttaccagyatgggatcccgacctctctccagaagacaggccagcagtgggatttccccaatgcctgggcccccctgcaggacctggtcatcagaggtagggaggcagggctgacacagccaaggacccttcccagggtgtagaggtgggcctccctggtgctggggaggcatgaacaaaagacacaagaggccccgtatcctttctctcgctcctctgctctcctggcctccacttgacacttatgtccacccagcctgtccagtgcaatcagtcctgttcgcccttcaaaccagggccgtcgattaagggcagtttggcctgtggtctcaggaaggaagtcttagggcccaggcctctttccctccttggggagagtagggtgcagccactgctctgtctgggatgggagacctggaggttgagtcctgcctgcaatggggtctaggcctggccaaggcacctttacgtygggcccaggaagtggctttccagctggctcagaattggatccgaaccaattttgatgtctactcgcagaagtcagccatgtatgagaaggtgagctggcccaagcccyccctgcacccccaggctgtcccagtggccactcctgagcactgcaggrgctgctgggcaggcagagcagcttctccccaggggctctggttgtttgttgttcctggagctggggggcagtacctgacatacagcccacccgcttgtccccagtatgacgtcagcaacggtggacagcccggtgggggaggagaatatgaagttcaggtgagcaggccaggggtgggctggccaacaccagggaactcctgaactctgctgctcatgacccccgccccaggcctcagtgtgctcacctgcatgtgggccygggggaggagctgactggtgcttcctgtaccgctggggttaggcagggccagtgcccctggggagagagcccacagcccccaccaagggtatgaggcttccccagaaactggccccactgccctgcctctcccaggagggatttggctggacgaatggygtggtcctgatgctgctggaccgctatggtgaccggctgacctcaggrgccaagytggctttcctggagccccactgcctggcggccacccttctgcccagcctcctgctcagcctcctgccatggtgacagccctcctctcctcacctggmcccagctcctgccccattaaacctctgcaccagttcctgccttcccctgcctcttcatgccctcctacctcccagcctgtcctcagagcgaagtggagggcagggtcacgacctggaggtcatgggtaggggcctagctccctcctggaaccttgaatagggtggaaatcctgctctggagggaagacctatccccaagtgcctcagcgccaagccccacaccggccttccactcacttccgtagtccaaaggctttattgttctgctgaaatgcttacaaatactgaaaacccccagcctgggcccaggcaaccaagggctcaatgctgggaaggagagcaggggaggtgggcttagtrttaaggcgtgaagggcgaggccagacagctggaggcctggtcctccactctccatttccatcacccttcggaggctgaaggaagggcggcggcaccacagggcccttcccctctgctgcatcatctcctgctcaggctttctctctaggagcattggaggaatcctctttccctgtcggaaactcaacactgtacagaactccaaccataacccttctagcttcctctcccaactgcatcgctcctcctctgttccatagatcccccggcttcatcccttctggctctaagcaaggcaccagtggaagggagagggctggactggggggctggcagcctgtgcatcagggctgaagacacaggcagggggaaggaaaaaggtattcagtcccttccccccagcatgagatgcccaggggcctgggctggagagatgatggcacgtaccctcagatggcccacagctgaagcagtgggctgggccacagagctgcagcaattagtatgtaaccatggcaatgaagcagtcactatggtaaccatggtgatgagtctgcaactaggggatggagctgggacctcaaggttgacacttgagatctctggcccttgagcaaggtaataaaaagtataagggaaaggagaacaatggggcagagcggggtttgagaaatgggaagcgggccgcctgagctattaccccactctggatgtggctctgctcagcccccaaagcccctggcaaaggggtctgaggcaggaggggatctttggcagcttatggtaccataatttgtcttttagaaaagagaaaacaggctggggagagcaggtgtcaggtcagagctgaggccctctctgtgacagctcctcagccctggctgggcctggggcaggaccctaaagggttactgcaagttctgggctcccaggaggcagcaaagccacctctacttttcttcttctggctggttcttcaggaggccagagcccagaaactcacaggaccaagctccttacagaatattaaagtcttcttatacaaaagccccagttgtgctctgccaggaggcccacggcagttagttcatgaactgagtgtagccctcagcccctgtgacaatgacatccatccagatacgcatggcctctgcagatggggccaccatgtagtacagccggtcatgggtctttacgcagaaggtgagggctgggttcgggctctgccaaaggaagasaggaaggtctaagatggggctcacccatgcccaggaatattctcacctgcctccctatctgccctttcccctcccagcccctagaaagccctggagcttagtcctaaataggtccagagcctagaccctaccagtccatgtgagccccaggctgaaatgttcccttctcacaccacagcagtcctgggctctctaaactccctggamcctgacagagctataccctgacaaggggggcactggtccttggcgccccaggttcaaaagtgagtatcaagaggatcaaacacaaaggcttttccagtgaggaccagagtttcctctcagcaaaacagcggcagacagaaaaagcaacaagtaggatgccaggccctgggaccccagaggagcagagatcaggactggggtgggcaccagagggctgggggcaggaaggctgacttgcactagggaagcaggccccagcctccaatatctcctgtttatcaatttctccctattaaatctagtctttaagggtcccctccaccccttccggccatcccttctctatcaccagacccccatggggtctgctgtcatttccaggagagggaggcaacaaggagagagaggcacccaagcccacaggagcttcttgctctttgcaacctgctttctgctcctcccttgggcctgggggaagggagggggatgaaggggaggtcaagggtcagggatgagtggggtacaggaggtgttaatgtgctggttacagctaagtggggaggggtacctcagtcaccatagtgaagcggaaaaacctcttctgggaaggggagagggagaaaggaagagaaagttgacaaagagaacaaggactgggttggagcctctgtagagggcaggctggaggcctttgctcccagagccccaccaggccaccccttccccatggctgtccctctggcccccctctggtgccctccacccctgaccttggctgcactgcgcaggtggtcgtagtacacttcctcaatggcctggaaatagatgactcccttcagcttcgtctcatgcttgtctgcaaagcaagtaagggtgggctatggagccggtcacacttcaggtctagctccatttacgtggagctccatggcctgagcttccaaatctgggaaatggggtgaagatcctagtctcccaagacccccaaacagaacccaatacagaatcctaaagatatggataatgctcagcctcactcataatcacagagaaatacaaatcagaactccactgagataccacttctcacctaccccaatgacaaaaacatacaacaaatatacagcacacttttggcaagtctatggtgaaggaggcagtctaatgacatgtgggagtataaattggtaaaacccttatgaacaatttggccatgtctatcaaaattagaaaggcatttatcttttgatccaatgcttacatttaggagaatttctctttcacatatacaaagtaacacacacaagattattaagtatagtattgtctgcagtcacagaagattggaaacaaccaaaatatcaatcaagtggagactggttaataagttagtgtgtgtcacatcatggaagactaaatacagctgttaagtaaaatgatataggccaggcatggtggctcatgcctataattccagcattttgggaggccgaggagggtggatcacctgaggtcaggagttcgagaccagcctggccaacatggtgaaaccccgtctctactcaaaatacaaaaataagccgagtgtggtggtgcatgcctataatcccagctattcgggagcctgaggcaggagaatcacttgaatccgggaggcggaggttgcagtgagctgagatcacgccactgcacttcagcctgggcaaaaagagcaaaactctgtctcaaaaaaaaaaaaaaaaaaaaaagagaaagaaagaaatatctgatacagatacagactcagaaataagtctataatttatatcgagatataatgtctagatatagataaatttgatataaaatgatctctaagacacattaggaggtaaaaagaatgtactgtatgccaccttttgtgcaagaaaaagtatttgtttatattctcctatagaaactctataaggatacacaagagatttataaaattagttactgtagtgggtggggcataattctcaatttaaacctttttatatattttttatttttgaactatatgaatacttttacctattttttaaaaaaaaagataggaagcacactcccttgatgtgtacagagcagttagcatatacatatagcatatagcctctggaggtcagaggtggcaggaaaggggcaaactacctgagcagaggtgaccattcagtgagaaggggcaggatccctgtcaagggaaagcacagggcctgggccaacttgtctgtggcactgctcagatgctacagctgacatccttaacagtgagcctgcgtcctacaggagaggtcacgcgaatcactaaattcaatggtgccggctggaagtaagttccttcccgagtgctcctcctctccccgacctctgcagcttggtaaaggcaacttacggactgctgccaacatgtccctccagccttgtatcataaccttcccctgcatgagtcccaagtcctatctgagcttctcactgttcccttaataatacaccctgtatgctggaactatctcctccagcccatttccttagcaaactcctaaatgatcttcaagacccattgcaaaatgtcaccacgacagtgcacagttgtgctctcctgtgttcccaaagcacagatgctcctctgtatagaacttatgctgaatctgaatcctcctttatccattccatggtctacctcccccaacacaaacaactatgtgcctggcacacagtaggtacccaatactgaaggaatgagtcctagacactgggattcagagagaagtcagagacccttctcttaggaaactacaatctcacagtgaggaaaatacagacacacagctatgtaaatagctactaaaggcatggctaggaaccccatgagaccacctacgcatcacaggttgtcatgagtattaaatgaaagaacacatttaaggtattcagcacagtgtgtggcacataacgtggcactgttattatatcattacactcctggattgatgtcacatggaaaaacagatgctggataatgcaggggttcagaggagggtgggaatcactcctagtaaggtggggtcaggaaaggcttcctagatataatacgtaatctggactccatgcaatgagggggtttctatcgagttggcaggaagagggtccaagcggaataggcaaggcacccatggcccttatccagccacaggcccatttctgacatttcctccttggtaaaggaccagccctgcctggctctgggcctgctcagccctccagctcctgttctctcccatcccttccttcacaggaaatagtaacacactcctgcctccgcttccttaccacccacctatcctcaatcttgtgcagtctggctcctggccccatgcacagcagaaagccttctcttgacaagctcccatccctgagtctaacagcctttgggccacatctttcttggccttcctgcagcatccatcactgctggtgacacctcctgcttgtgaatgtctgctcctttggctggcttccttccctgtttctgctcccatttctattcctgccatctgaacttagtctccttttgttccacaggcgctaactaaggccacatatgccaagcaccagcccagcacctggcatgtggttagtgctggcttcctgtctcctgccccttctccctctgctggtctctcctctttctccttccccacacgggtaggcctgccccagggttcggccctctccctcccctcttctctgctctgcagtctgactgcccaggttcagtcttatctctgtctcttaggagctgtgggaccttgggcaatttacttaacctctctgagcatcattttcctcatcggtaaaatggcataaaaatagtgtttccctcataggattatttcaaagattaatgagatgatgcatgcagagtgcttagcacagcgcctggctcatgcaagtgcttgataaaggtgatctgctattactattattccacctgattcaactattactccacctctaatcctgaccatcctcctaaacctagatgtcccagaggcacttcaatctcaacatgcctaaaatggaactcctttccccaggcatgtttcttcctctccaaagtccctagtccctctaccttcctggcccagagagaaacatgggacacctgtgcttctggtcctcctgcctcctcaaaacacccaagacc

SEQ ID NO: 95963 - DNA, 19079 bp, Homo sapiens
ataaaatactttacagacaagcaaatgctgagagattttgtcaccaccaggcctgccctaaaagagctcctgaaggaagcgctaaacatggaaaggaacaaccggttccagccactgcaaaaacatgccaaaatgtaaagaccatcaagtctaggaggaaactgcatcaactaacgagcaaaataaccagctaacatcataatgacaggaccaaattcacacataacaatatcaactttaaatgtaaatgggctaaatgctccaattaaaagacacagactggcaaattggataaagagtcaagacccatcagtgtgctgtattcaggaaacccatcttacatgcagagacacacataggctcaaaacaaagggatggaggaagatctaccaagcaaatggaaaacaaaaaaaggcaggggttgcaatcctagtctctgataaaacagactttaaaccaacaaagatcaaaagagacaaagaaggccattacataatggtaaagggatcaattcaacaagaagagctaactatcctaaatataaatgcacccaatacaggagcacccagatcataaagcaagtcttgagtgacctacaaagagacttagactcccacacaataataatgggagactttaacaccccactgtcaacattagacagatcaacgagacagaaagttaacaaggatacccaggaattgaactcagctctgcaccaagtggacctaatagacatctacagaactctccaccccaaatcaacagaatatacatttttttcagcaccacaccacacctattccaaaattgaccacatagttggaagtaaagcactcctcagcaaatgtaaaagaacagaaattataacaaactgtctctcagaccacagtgcaaccaaactagaactcaggattaagaaactcactcaaaaccgctcaactacatggaaactgaacaacctgctcctgaatgactactgggtacataatgaaatgaaggcagaaataaagatgttctttgaaaccaacgagaacaaagacacgacataccagaatctctgggacacattcaaagcagtgtgtagagggaaatttatagcactaaatgcccacaagagaaagcaggaaagatccaaaattgacaccctaacatcacaattaaaagaactagaaaagcaagagcaaacacattcaaaagctagcagaaggcaagaaataactaaaatcagagcagaactgaaggaaatagagacacaaaaaacccttcaaaaaattaatgaatccaggagctggttttttttaaaagatcaacaaaattgatagaccgctagcaagactaataaagaagaaaagagagaagaatcaaatagacgcaataaaaaatgataaaggggatatcaccactgatcccacagaaatacaaactaccatcagagaatactacaaacacctctacgcaaataaactagaaaatctagaagaaatggataaattcctcgacacatacaccctcccaagactaaaccaggaagaagttgaatctctgaatagaccaatgacaggctctgaaattgtggcaacgatcaatagcttaccagtcaaaaaaagtccaggaccagatgcattcacagccgaattctaccagaggtacaaggaggagctggcaccattccttctgaaactattccaatcaatagaaaaagagggaatcctccctaactcattttatgaggccagcatcatcctgataccaaagccgggcagagacacaaccaaaaaagagaattttagaccaatatccttgatgaacattgatgcaaaaatcctcaataaaatactggcaaacagaatccagcagcacatcaaaaagcttatccaccatgatcaagtgggcttcatccctgggatgcaaggttggttcaacattcgcaaatcaataaatgtaacccagcatataaacagaaccaaagacaaaaaccaaatgattatctcaatagatgcagaaacagcctctaacaaaattcaacaacacttcatgctaaaaactctcaataaattaggtattcatgggacgtatctcaaaataataagagctatctatgacaaacccacagccaatatcatactgaatgggcaaaaactggaagcattccctttgaaaactggcacaagacagggatgccctctctcaccgctcctattcaacatagtgttggaagttctggccagggcaattaggcaggagaaggaaatgaagggtattcaattaggaaaagaggaagtcaaattgtccctgtttgcagatgacatgattgtatatctagaaaaccccattgtctcagcccaaaatctccttaagctgataagcaacttcagcaaagtctcaggatacaacatcaatgtacaaaaatcacaagcattcttatacaccaataacagacaaacagagagccaaatcatgagtgaactcccattcacaattgcttcaaagagaataaaatacctaggaatccaacttacaagggatgtgaaggacctcttcaaggagaactacaaaccactgctcaaggaaataaaagaggatacaaacaaatggaagaacattccatgctcatgggtaggaagaatcaatatcatgaaaatggccatactgcccaaggtaatttacagattcaatgccatccccatcaagctaccaatgactttcttcacagaattggaaaaaactactttaaagttcatatggaaccaaaaaagagcccgcattgccaagtcaatcctaagccaaaagaacaacgccagaggcatcatgctacctgacttcaaactatactacaaggctacagtaaccaaagcagcatggtactggtaccaaaacagagatatagatcaatggaacagaacagagccctcagaaataatgccacatatgtacaaccatctgatctttgacaaacctgacaaaaacaagcaatggggaaaggattccctatttaataaatggtactgggaaaactggctagccatatgtagaaagctgaaactggatcccttccttacaccttatacaaaaattaattcaagatggattaaagacttacatgttagacctaaaaccataaaaaccctagaagaaaacctaggcaataccattctggacataggcatgggcaaagacttcatgtctaaaacaccaaaagcaatggcaacaaaagccaaaattgacaaatgggatctaattaaactaaagagcttctccacagcaaaagaaactaccatcagagtgaacacgcaacctacaaaatgggagaaaattttcacaacctactcatctgacaaagggctaatatccagaatctacaatgaactcaaacaaatttacaagaaaaaaacaaacaaccccatcaaaaagtgggcaaaggatatgaacagacacttctcaaaagaagacatttatgcagccaaaaaacacatgaaaaaatgctcaccatcactggccatcagagaaatgcaaatcaaaaccacaatgagttaccatctcacaccagttagaatggcaatcattaaaaagtcaggaaacgaggtgctggagaggatgtggagaaataggaacacttttacacttttggtgggactgtaaactagttcaacattgtggaagtcagtgtggcgattcctcagggatctagaactagaaataccatttgacccagccatcccattactgggtatatacccaaaggattataaatcatgctgctataaagacacatgcacacgtatgtttattgcggcactattcacaatagcaaagacttggaaccaacccaaatgtccaacaacgatagactggattaagaaaacatggcacatatacaccatggaatactatccagccataaaaaatgatgagttcatgtcctttgtagggacatggatgaaactggaaaccatcattctcagcaaactatcgcaaggacaaaaaaccaaacaccgcatgttctcactcataggtgggaactgaacaatgagaacacatggacacaggaaggggaacatcacactccagggactgttgtggggtggggggaggggggagggatagcattaggagatatacctagtgttaaatgaggagttaatgggtgcagcacaccaacatggcacatgtatacatatgtaacaaacctgcacattgtgcacatataccctgaaacttaaagtgtaataataataaaatttaaaaaaaagaaagtaatgcaaaaactgcaaaaaaaaaaaagaaaaagaaaagaaaatgggcataacacctacttcctaaagttgttgtgaagcttaaattggaataaattagctaacatacgtaaacacttagatattgcctggcatatgataggtgctcaataaatgttaatcttatacctcaggtgaatttgtgactggccttttgctttcttgggaggagagacacaggcattataaatttcacctgtccatgtggtttgtactcttcctttcttctgtttagcaaaatgcccttttaaaaagtcccaaccttgcttcagttgaactgatgggcaaatgtgatttcccacacctgagctaggggatctaggctctcagactgccctgagagctgtgctgcagaggcctggccagaaccctcagagcagctccggactccttcctctgtcactcctccacattcaactagaatcctatgtctcccgagttgaccctgttgcaaatctgtgccccttttcatttgcatgggccctgccgaaattcagaagcttagttcttcccatgactataggggcctcgggcaggtctcttgctctgtcaaggtcaaaacccctactttcctaaattcaaccattgattctccatcttcatcttacttgatcagccacacttgacatagttgatcacttctccctttaaacatcttcacatggcttctgggaccttttgttttcctcctacctccctggccactccttttcagactcctttgctggtttgctctcatttttccctaacctttacatgttgatatgccagagcacctcaaacccttagacctcatctctgctactcgtgctcccatggtgatctcatctagtctctggtttcaaacacagagtgatcactcctgtacttgctgtttcccttttcctggagttctctctgcctcctgcaggtaggaagtgattcgagataagagagggagagaactcttctggccaggatagagggtgattctgagaaggcttcaaggaagaagtgagcatttgagcacggctacttgaggaaggctaggccatggacattagggtgcaggcaggagcagagcaaacatgcttgtaaaaggaacagcaattattctgttttatatttatatcagcccatggtggcccccacagcagagtggcttgatctctcacctccttcaggtctttgtttaaagattaacttctccatgaggccttctatgaacataacctttaaaaacataaatccccttcctactgggactcccccagttcccaccctgagaccccctatctctcttctcgattttatttctctccataggatgtgtatcaccacctgacttactagctatttactatatattagtttatttcttccccattagaatgtaaacttcctgagggcagggattttgtctgttgagttcagttctgtatccccagcacctaaaacagtgcctgtccataacaggcatgttaaacattgttggacagatgaatgagtgaatgaaaaatggtagtacctttcctcctccagtccatcctacacaaagaggcaagattaatttccctaaatgcatgagcattaggaagtgggagggattggaggaggaaattataataaggaatccataaattacttaagcccataaaacaaaggtaggaaacattcaagataagagacctcttctggccaggatagaggttggttctgagaaggcttcaaggaataggcagacatttcagcaaggctgctgaggaaggataggctgtggaaattaggatgcaggtaggaggatcacagagcaaacactccaaggtgggaaatgcaagtgtgtgtagaaggaacagcaagtattgttgggttgggctggcttatgaagttgtgacgggctgagggagagacaggactggaaaagcacgttggggtcaggttgcagaggtccttgactgacagagaggggagcttggtctgtggggaatcttctgctctgtgtggtcagaggctggtctgactctccggccttgccccagtcttcctatccttcatccagccccggctggctcggtaaaaacggcgcgaatctcgctctccctgggtaactagggtccccactgcctggctagtggtgcttttcgcgtcttcactggcaccattaatgaatgaagtctggctcccacccgcggggaagggaggagcctcaacctcgggtcctttgctctcctgcascactcctgcccgggtcccgcctcggggtcgccaggccctgaaccccaacgccggcattagtcgcgcctgcgcacggccctgtggagccgcggaggcaagggacggagaacggggcggaggcggagtcagggcgcccgcgcgtgggccccgcccccttatgtmgggtataaagcccctcccgctcacagtttccctagtcctcgaaggctcggaagcccgtcaccatgtcgtgcgagtcgtctmtggttctcgggtactgggatattcgtggggtgagtgccgtctcaacggtagagccgctcggtcaaagagactgacgcggagagggcgggtctctgggtccgcgatctccagcaggagcagctctacgcgggagccttttcgagctgccgagccacggatgtcgacccctgcccagcctctgggatcgcgggccctgtggggaggggcggaggagaccacgccggagccgggcctaggggccgcttaaccaccgccccggcaggacgcagggactcggcagccccgggccggggaacgttagcgggcgggggttgggaatgggtgggagctgcgcagtcgctgaaccgctgtcttccccagctggcgcacgccatccgcctgctcctggagttcacggatacctcttatgaggagaaacggtacacgtgcggggaaggtaatgccgctccgcgtgcccgtgcagccaagctggccctccacctgccctggtcttcttacgcccagagggtggtggcgtcgcgccaaggccgggtgggacgtttgccccaatctgggtgaatagagacacatcctttatctggaactgggggttctctttttaacatagcccaaacccgtcttaatgcttaaccaaatagggctcagaggctcaatggttatgcttttggggcctgggaatttgaggtattgggaccaagtcatttctttagatcttttgctcttgtcaggtggggtattaaggaggttgggtcccacttaattccgtctcttacagctcctgactatgatcgaagccaatggctggatgtgaaattcaagctagacctggactttcctaatgtaagtggctttagtagaggtggcgggcagaagggaaagccttcaagtatatccatccttgcctctctcctgcctggtacagaaggatgcaaaataggggatcttaaccyggatagaataaatagaattcaggggtccttgaactggatggatatgtattttcattcccattaaccactagcaaaagttatttccttttattgtgaagagagacaataagtgacattggttattagccatgtctgtcactttgtcactagtagaaatcaggtattttcttttttgtgtgtttcttgttcttttgttttgagacagtgtctcactctgtcgctcaggctggagtgcagtggcgcaatcacagctcactgcagcctcaacctcccaggctcaagcagtcctcccacctcagcctcccaaggagctgggactacaggcacacaccactatgcccagctaatttttgtatttttgtaagagacggggttttgccatgttacccaggctgatcctgaacttctgggctcaaacagtcctcccacctcggccttccaaagtgttgggattacaggcatgagccactgtgcccagcctgaaatcaggtagtttcatattctataacatgcgttgcagatattttaagtgatatttatatacatgtaagtaaatatatacatataatgttatttactttgagattatgttagtcattacatctgcttgctatttaatgcactaataggcacatgttactcttatttgaatttttaaaaatattttttgattgtgtaaattatctattttgcttcatgcatttaacaactttattctgagaaaaggtccatggcatgcacatacactcacacatacacacaccaatttaagaacccctgtctagaatcttgtggacccagttgctaccttctacttattttcttttttctcctaacacagcatcttctcactcttgttcactgccctgcaagtgttcttttcccctggagagagaggtagggaatcaagagagaggcaggttgttcatttgtcctgtccttttcctttcagctgccctacctcctggatgggaagaacaagatcacccagagcaatgccatcttgcgctacatcgctcgcaagcacaacatgtgtgagtggggtagggctggtgagggaccccaggctggtagtttgtctgagagtggatgatgccaagggtgatttgttgtcatttggcctacaggtggtgagactgaagaagaaaagattcgagtggacatcatagagaaccaagtaatggatttccgcacacaactgataaggctctgttacagctctgaccacgtgagtttccttagcacacatctgctgaatggmgtatcagaaaaaggggtatttaggaacccaagggttatctctgttccattctgctgctgctaccttcccaccaatccagattgttagaataagaaacagaacttatattttttggtttgttttgtcatgtaattctggtgctggtgcctcttctttctaaactcctctttccccaccctgccatcctcaagtgaaggcaatgagaacccacctagagaaggggctactaagtgtccatcactggcctgtgccctgattaactacaaagatgatcaccactattctcattctgttttttcctctcaggaaaaactgaagcctcagtacttggaagagctacctggacaactgaaacaattctccatgtttctggggaaattctcatggtttgccggggaaaaggtaggaagaagggaaaagaagaggatacttctctatctctgcaggctactactcctcagacctaagcatcttattgcttttcttctagctcacctttgtggattttctcacctatgatatcttggatcagaaccgtatatttgaccccaagtgcctggatgagttcccraacctgaaggctttcatgtgycgttttgaggtgacgtttcctgcacctttctcttataaaaacactcacaggctcccctgggacctgcaggatcccatagtggaggattcttccccggcttttgcctaatgggatcaatggttggacacctctagacctttaagtcttgggaagagcctaacttctataccttgraggcactgtctacaaaaaaatggaggaggtagacgcaggcaacacgtgaatgttgctgttctggtatgcatctgttggactgggttggggtckttataagatttggtgtattttcctttcaggctttggagaaaatcgctgcctacttacagtctgatcagttctgcaagatgcccatcaacaacaagatggcccagtggggcaacaagcctrtatgctgagcaggaggcagacttgcagagcttgttttktttcatcctgtccgtaaggggtcagcgctcttgctttgctcttttcaatgaatagcacttmtgttactggtgtccagctgagtttctcttgggtataaaggctaaaagggaaaaaggatatgtggagaatcatcaagatatgaattgaatcgctgcgatactggcatttccctactccccaactgagttcaagggctgtaggttcatgcccaagccctgagagtgggtactagaaaaaacgagattgcacagttggagagagcaggtgtgttaaatgggactggagtccctgtgaagactgggtgaggataacacaagtaaaactgtggtactgatggacttaaccggagttcggaaaccgtcctgtgtacacatgggagtttagtgtgataaaggcagtatttcagactggtgggctagccaatagagttgggacaattgcttactcattaaaaataatagagccccacttgacactattcactaaaattaatctggaatttaaggcccaacattaaacacaaagctgttgaaatattgatgaaaatgtaagaatttttgtgaccacggggtaggagaagtttctttaaagacgtaaaaagaaaaaaccataggctgctctgcctgtggagtarccattctttattcttttactttttaaaataataacaatcacaaaggaaagatttrccaattgaataggatcaaattctacaacttttcctaaggcacccacaaataaatgacaagtgagacaaaaagcactagtataaagattatataaagacctataaatcattaagacaactgagtttttaaaaatggacaaaatccatgaacaatttataaaatagaaatatagccaaaaatgtctaaaagatgtttatgatgtaaggaattatcaattacaacagtgagaaaccatatttccttctatccgatgagtaaaaagtttctaaagtgttggcaaggcttaggaaagtgatatgcatttcctgctggtcaagttgtaaattagtatagctactttggaggacaattgtaaaatttaaatcatatcctatgacccagcaattccatgctataaaaactcatccatggccgggcttggtggctcacgcctgtaatcccagcactttgggaggctgaggtgggcagatcacgaggtcaagagatcgagaccatcctggccaacatgatgaaaccccgtttctactaaaaatacaaaaattagctgggcatggtggcatgtgcctatagtcccagctactcaggaggctgaggcaggagaattgcttgaacctgggaggcagaggttgcagtgagccgagatcacgccactgcactccagcctggctacagggcgagactctgtctcaaaaaaaaaaaaaaaaaaaaaaaaaaaacattcaaagagacatatactaagatgttcactgtggcattgtctgtaatgacaaataagtggaaaccgtgtaaatacctgtcaatactatggagtaccatgtggcaacggaagaatgagactgaactgtgtgaactaacatgcaaagatccccaaaacaggccaggtgtggttgctcacagctgtaataacaacaccttcagaggctgaggtgagaggatcagttgaggccaggagtttaagaccagcctgggcaacatagtgagacccctgtctcccaaaaattttttttaattagctgtgcgcarttgctcatgcatagtcccagctacccaggaggctgaggtgggaggatcacttgagcccaggaatttgaagctgcagtgagctgtgttcttgccactgcactccaatctgggtgactgagcaagaccctgtctcttaaaaaaataaaaaagatctccaagcatagagaagagtctggagggaaacaccaaactcataacagtcttactgcaggcaagtgggataaaggcccagactccatggtggaagttaaagggcatttccaagttaaggctaagacttgcttttctaactaagagaatgtgctcatgcattgcttgtgtagtagaaactagtttttagaaaagaaagcaaacttaagaaacactgactcctgtggagatgacttggcaccactctcctttcacagagcagagtctgaatagtcttcagagataggcctgtgggccagattgccatcccctatggaccagaagccaaggatctctctagtgatggtcagagggcccaaatggcagggatacccagtgatgtcaggaggaatagtrcagacagaaggtgctaagcagacaattcaactgccatgttttgccaccccctgtgagcagggattaggtgttcaggccagtatcttgggcatgggggagcctttggccagaagaggtataaagctcagaagtttttcagtctgataactattgatataatttccatagtgtgagggagcggtatgctctacccttgtgtatttaaggcaggacagagaaattgaggatgcccctggggctagatcgatgatatgaccagaaatcaaaaagggaatgcattatttattgctgtgtaacactgttaagagaggaggtagttaagggatggataggcacatagagagggaaggtctcaggagaagggatagaaaggaactatgttcacaagaacaacggcaagacagtgcctatactgcctctacagttaataggaaaaacggaagaagttacccttaagctaggatgttgctcagaagtgaccatcccaactttggtgcgggcacaataaatcagcctaaatgtccctaatttaacccagctcrttataatgtcattaaacatgacattagcattgtggttttagcacccccatgggttttgcttaggcactcatgggtaataaccaagatggagtccctttggcaaaacttaggcatgcacagctgtagtaccccaagaagaaaatgttacttctctcatctgggcaaaacccacagaagacttcccagcttctgccacataaaagacacagaacacagacgccttactggcaacctgctttcaagacccctgtctttgctgagagctttcctttttcccaataaattctactctgccctactcactctccatgtccatgtgcctaatttttcgtggtcatgggacaatagcctgaaccttgccatactccaggggcaaaagaagacttctacactattcccacaaatttagcagctaaaacaatacatgtttatggtctcaaagttttgtggattaggagtctgggcacagctgaactgggtcctctgctcagggtttcatctgaaaactgccatcagtgtgtcatccagagctctgatctcatccccaggctcagtgggagaaggatctgcctccaagtctgtgtaattgttgatagcgtcagttctttgttccctgtgggacagaggccctccatttctcattggctgtcggctagagccaccttcagttccttgcaaaagggatctcctcaacacggccacccatttcaccaaagctagtaaaggagtctgctggaagaaggaacactacagtcctatgtaatctgatcacagcagtgacatcccatcacctgttcttattctattagaagcaagtcaccggccccacccacactcaagggcatgagtaccaggaggtaggatcatgggggccatcttagagtctgttcaccacaagagaagaaggaaggaaacaggagattggtcctgcagtcctatgagaaaaaaatcctgggaaagacagatgacaggagaaagcagcaaggtagggaatgagcagtttgcaagggagaagtttaaaaagcccaggtctgcaggtgaaatgtatttcacatgaattccagatggacagatcacataggcaaatcacgtttcaattttttttaattattatgtttgttagtgaaaatccactcaacagttatgcaaaacctggaccttactggcccagaaagcagggaaggccactgagaggaacagatcctttccacaagagaggtggatccccagttctcaatcagctcccagctctaactctaatataggccaagaaaagaatgccgtaacaacggctgccttcaggcaagtggcagatgcaggggggtggctggggacacatccaaggcacagaggcacaatagtgatggctttatacaagtaccatcagtaagggcttaaaagaaaacttgaaacaggtgcattagatttggtggagcagttccccaaaagtatcagggaaattcatttgtattcattgttgaaggttgagcaactgggcgtttctagttcagaaagaaatagcttatgtgattaaatgaaagtttgttatagagttgtttcactgttaccagggaaaggagagagggacagggataggcatggacacagatctgcctttaaagccagtttaagaagcacttatgaaaacacctggactgtgtatagagattgcacattccttatccttcagctgcaggacaggtggagcaaatgaaccacgcagaaaaagaggacttagggagttcagatggatggtgggggaagggaatgaaataaaattcagtgggtaatctttctaatgtgtaaatttgttcatgtcactcccctgcttaaaggcgtttagtggcttctaaaacctcaggaaaaaaaactgtcttctcaggcttaccttcacagcctcacctctgctccctttccagtgacatccttggcatgtgccctcctcctgctgccctggagcacggggtccagcctttctgaatttccaagggagcagcactgtgtggtgctcaggagcatggactccggagccgggccgtctgggttcagatcctggctttgcccctggtaaatggtggcctcctgtgctcagtgtcttctttgataaatgaaccctccctcacaaggttgttatgagaagggaggagaccacccctcatattgtcttatgcccaatttctgcctcaaagaaaaagtaggagttaaagaaaagacagaaatgaaatcagtagttagcctggcactgcattccaggcctggtagttaaagatcaacccctgacctaactggttctgttatctatagattccagacattgtatggaaaagcactgtgaaaatccctgtcctgttttgttccattctgattaccagtgcatgcagcccccagtcacatatcccctgcttgctcaatcgatcatgaccctctcacacggacccccttagaatcataaacccttaaaagggataggaattgctcactcagggagctcggtttttggagatgtgagtccgccgatgctcccagctgaataaagccctttccttccacaactcggtgcctgaggggttcttgtctgtggctcgtcctgctacaatgagaatgaagtcaatatttctagagcacttgggccaggcgtggtagctcacacctgtaatcccagcactttgggaggtggaggcaggtggatcacttgaggtcaggggttcaagtccagcctggtcaacatggcaaaaccccatctctactaaaaatacaaaaattagctaggcatggtgatgcatgcctgtaatcccagctactcgggaggttgagacaagggaatcacttgaatctgggaggcagagattgctgtgagctgagatcacaccactgcactccagcctaggtgacaccgtgagactctgtcccaaaaaaaaaaaattttagagcacttgaaacagatcagtgttacataaatttataaatactaattgccaaaaagcaccacattcacttttatattttcacactttaatacatgctgtcccctctgcctcttgcttttcccccaactcccttagccttcaaatcagatttgaagtcacatctgataatccctgtggtgatggtcaccaaagatttctgattgttttcccattgggaaaacttcatgacactctttaacttaaatgtggtctcctgagttgtttggccaattaaacacaagtagaaattacacacattttccaggcagaagttttaaaagccagtgagtaagtcactgtatctgaccaccacagttgtctagactcagagcaggtgccaagttaaagcctccgtcggcctaggtctctaaaagactacgaatagcagggcccctgttgatcacatccgacatgaagggtaagtaagaaataagcgtgtattaagccactaggatttggtttatcctgactgacatttctctacctcccacaggctaatttaaatgcacatattttaaatttttgttcccacagggtacaatgctttcctcgatcaggacttaacacacaactccagttgttcatttagatgttagtctttgctgctaaattataagttgcctgagagcagagactatgtcttatgcaaaattttatatttagtgcttgcacagagcctgacacaaagtaggcactcacaactgtgcactgattcctgtcatttactgagaattggaagaaaaaaagaagagtttgcttgataggtaaatgcctaatgccctcaaggaactttaaaaaattcctctttgttttgactgagagacagaacccagaaaaacagaatgccctgtcttaaaacagagagagttcaggtagaagtacctggagtcagaactgaagttcgtattcagggaggtctcagaggatcagcaaggcactgaggctggagagtaggttatatgagtttgtgaaaggaaaatatcttgagcccccaaaatcagtaagctaaaaagaaaattcaaactggaaactgctcaggacaaacctacctcccattctattcaaagccatccctctgctcattgaaatagatgcatattctgattgcctcctttggaaaggcctatcagaaattcaaaagaaggaaaccatctgtctctcacttacctgtgacctggaagcccaaccccctcccccctgctttgagttgtccccacctttctggatggaaccaatgtaccacttacatatattgattgacgtctcgtgtctccctaaaatgtataaaactaagccgtgccccaaccacctggggcacatgtcatcagggcttcctgaggctatgtcacagacacacgccctcaaccttggcaaaatagactttctaaattaactgagacctgtctcagattttctgggtttacattttggtaaccatgaagggattctgggtgaagatgcccctgacctttgacaaatgtcctattggtgcttggtaccagcatgagctaactttacggctcaaaccaacaggacaatttgctgaggtctgagagcaccccctgcagagaatccctgatttccaaaaatttggttgagatctaaaatttattttcctgtacaactcctcttttctttggaattttacttgcttccaacaaggaaggcaagttttcctgcttccatgatgatggaaggcaggaaactccttaatggagtttgagctagcttctaacagggaagatgagtcttttttttcctgcttctagaattgtagagagcagtctacagcctgagacacaccactaggtaagaaactggtctgggattctgtctggcaaattatttttaaatgactaaagttagcattaacaaccagctggtgttaatttctgcttacacttagagcattcagaaatcatttaatttgtgtgatcattgttagttttgcttaagtattttgttgtttgtttctgtcttgttgggttttgtgtgtgtgtgtgtttcggtcctttccttaccagatttgaccaactccaaaccctatacctcatgagtgtggaatcttccactctgaagaaataagagcaccttgctcccctgagcctttaggggcattctcaggtgactgagaatcacgtgagggtgtctgggaggaacgctccctagacctgcagcggctttaaataggttttcccctcaggagaacattcttagggcctaatctcagccagcaggtgcaatataaggagctggctccgcccgcaccttgagcccctggcacactgtgccaggtagctgcaacacaggtggaccaaactggttcagggtgtaacggccctgaaaagctaggtctgcaagcagcacattttgggtccaacacacatcctgacttggtcaaatccgaaggggaactctaaattatgggtaacaagccactgaagtggctaaaatacccacacacacaaaaaaaggtggtatgggccaggcgtgatggctcacacctgtaatctcagcactttgggaagccaaggcaggcagatcacgaggtcaagagatcaagaccatcctggccaacatggtaagaccccgtctcttctaaaaatacaaaaattacctgggtatggtggcacacgcctgtagtcctagctactcaggagcctgaggcaggagaattgcttgaatctgggaggcagaggtcgcagtaagccgtgatcatgccactgcactccagtctggtgacagagcaagactccatctcaaaaagaaaaaaaaaaaggtggtatggtggggggagaaaaatggccagcaaaaggaaacaaaaaaagaggaaagagaaaaggaaacaaaaaaagaggaaagattttttattttgactattaaagggactttataatgtaacaaggccacctttttgccagccagaccaaattgaaagcattggctggccccccacactgcagttcaatagctaaggttctgccttctttttttctactatgacacgtttggttcctaaatcaagcccttgctggtttgatacttggtacttctgaaatagcagcaatttgtcttagctgaaatatagtaatgagatttaaaaatatttttttaaaaaggagctcaatggttaaatgtcagcttaattaaaagctatcatccaagatatgtgtgtgtgcataagtgcgtattcgtatttaaaaggcctttttgtttttgtttttctcttctagaaccttgtatttttttgagcaaaagttttttttcttctgagttgactgaattctgttttcacctgattttttaactaaaatatttattgcaacagaggc

SEQ ID NO: 95964 - DNA, 18022 bp, Homo sapiens
gctctggcggtgaaaaagccgcttattggattaaagtaatttctaaacaacagcccacctgcaccatacatattaaaggaaaaaagtttgagggcctagtagatactggggctgatgtttctattatttcctctaatttatggccttcttcctggcttaaacatcccactaacatgggactagtaagggttggaaaagctgatgaagttcaccaaagcacatttatcttgccttgcactgggcctgatggtcaaaagggaacaattcagccttatatcatgccaatccccattaatctttggggtagatatttgctggaacaatggggggctgaaattaatattccacataactcttctcgtgctcccagtcaacatataatggaaaacgtggggactgttcctggactcagtctcggtccaaaacatgaaggaattactaaattcctttatggtttaaaagcataatttaaccactccccactcccaattccatttagcattgtttactttaaactttctaaatgttcctaaagacaatactctgactgcagccgaacaccattatacaggcaaaaaattctccctaaatgaaagcaagccagtgttatggaaaaactcccagacaaatacctgggaacctggaacaattataatgtggggaagagggtatgcttgtgtttcaccaggagatcatcaatcccctgtctgggtgcccactagaagactttaacttcgtgtgaatactgacaatgaaaaacacagggaagagatgtccacgtcagagactgccctcatacctggtgagatctgtgccaactcctcaaaaactggcacaccaaatcaaaatggatctcattcaatcctccctaatggcaacagagacccctctaactaatcccacttctcctaattacctttctttttctccttacaaacctgaaaatctcaccatttctattagcctgaaaataacatccctctgttcttctcttcctccttcagcactggatctcgcttacaataggttttatttaataattctactccttatactttctgtctcaccagtttcccctcacactgatttgcctgctacacaaaattattcttattgggcttatgtgccttttcctccacttattcgacctctcacctggatgaatgctcctgcggaaatctacactaacgatagtgtgtagatgcctggagctatagatgaccattgccctgctcaaccaggagaagaaggcactgcatttaatgttactatgggttataaataccctcctctgtgcctcggacatgcaactcgttgtatccatctagaaactcaagtctgggctgcttatcttctggagagattagctacaggaaaatggggacatttggtctccggcctctccctttgtcctttaagacaaatgaaaaggggagtaataggagataccccatactttcaatataaacctgtaggaaaactatgtcctaaaaattttgagggcccatctaaaactttaatttggggagattgtgttaactcacatgcagtagtattaaaaaatgactcatatgctttagtaatagactgggcaccaaagggctatttaaaaaacacttgctcctctgggggaggggaattcctggaggctacttattttatttcttattgggaggacgaggatcatcatcctactttgcataggtggttcggctcattctttaccttaaaatgggaagataaggacattaccctccacccccaaggccttgtatgatattccccattctgagcccagaacacccagaactttcgaaattggctattgtcatgtctggactgccagtatctgtgattctgaaccccatgataaatcccctttgaacctttttcctctttttgatgccgatcctcctttacgggactccaattggcattacgataattcttatcgacccaggtatgcccctctacttcttcagcatccccaggcacctcggtttgcttctttatggtggagaacatcgggcattgccaccgccgctcctctccctcagtatcaacatagattcaagcattctgctttgtttacctccaacctgactattcctatacagagttgtgttaagcttccttacatgctgttagtggcaaatatcaaaatttggacaaacaatcaaactgtccaatgcattgtcatttatacacttgtgttgactcccgttttgactccaggaaaagtgtaatgttggttggagctcgagaaggaatctggatactgtgtgccggaccagccaaagaatcctgtgtcaaaaccgagagaacgaataagccttcatcaccatggcacatttatataaaaagaaagggagagatgttgcgggaagtcagggaccccgaatggagggactgactggagccgcggcagaggaacataaattgcaaatatttcattttaatatggacatttatcagttcccaaattattactttttacatttcttacgcctgtcttactttaatctcttaatcctgttatcttcataagctgaggatatatgtcacctcaggaccactgtgataattgtgttaactgtacaaattgattgtaaaacatgtgtgtttgcacaatatgaaatcagtgcaccttgaagaagaacagaataacagtgatttttaggcaacaagagaagacaaccataaggtctgactgcgtgcagggtcaggcaaaatagagccatatttttcttcttgcagggagcctataaatggacatggaagtagggaagatattgctaaattcttttcctagcaaggaatattactattaatactctgggaaaggaatgcattcctggggggaggtctataaacggccrctctgggaatgtctgtcctatgcagttgagacaaggactgaagtacaccctggtctcctgcagtaccctcaggcttactagggtggggaaaaacctggccctggcaaatctgtggtcagactggttctctgctcttgaaccctgtgttctgttgtttaagatgtttatcaagacaatacgtgcactgctgaacatagacccttatcaggagttctacttttgcccttgtcctgtttcctcagaagcatgtgatctctgttctgctttttgccccttaaagcatgtgatctttgtacctaccccccgttcgtacaccccctccccttttgcaatccttaataaaagcttgctggttttgaggctcgggccggcatcacggtcctactgatatgtgatgtcacccctggcggcccagctgtaaaattcctctctttgtactctttctctttatttctcagccagctgacacttatggaaaatagaacctatgttgaaatactgggggcagtttccccgatagccttgctgaggaaattaaatttatgttcaagtgctatttctttatggaaccaaggaacaagtatttcaaacaatactaatgtaacagtactggttctatgtgtttcaaaattattattctcatgagtgttagctttcttaaaaaatcgtttttatcaattggatctagacatcttatctttcacagctcaagacccattaactcaaaatcataaactcttaatgcataatgagaaatataatgattcctagggccaggcacttgtgtctgtgctggtgctattgcctcaatgcaggaaaatctatgtgagaattcactgtgaggccaaaactgcttcctaaacatggatacctgccaggtatctgagctgggagtactgcccaggtctggatgggtggggagtgtttgcaacaaggactgtgccttgccagcctcagtgacacagtgtccaagtgccccaacttagcagccacctgctgaccacctgatttctgtggcctaatagggatgtgatgaagtctacctgtttactcaaccccaaaccacacattatccaggtggtttgaaacttttttgatatactgggttcatcctctggagtcctaacaatgttttagctaatttacaaaaaaacaaaaacaaaaacaaaaaacaaaaaactactttttttgcagcacaacagcctggtttacattgcaaaatgatttctcattaaaggtctatcatctatttccatatatccattattatttgtaatatcctttaaaaaaagcagtcaaccccaggctaatccattgcacaactcttttgaaagtcttccttctaccttgaaagaagaaagttggcaggttggacattgttcttgcggaggttgtaccatgggtcacatatcacggtgtgacttcaaaggccactggagccaccgtctcatactgaagaacacacatgggtcaggagccaggtccaggtccggcatggtggatctggagaggggagagtccctgcctgtgatcctgtggggagccctcaggctcctctctggccaccatcctctgacctccctcctcagcaggacagggttctggcttctctgagggacaggttctgtggcaggccaggtgtcactaacacaggcctccataacaactgtttcagtactgactgagtgatgaaattaaatattaaaagctgaaaaaagccagtacctttatacagaggctggatgtaacaaaagcccaccaagagttttgcttaggcctttcctgggccttaaagcatgacaaaacaacgaaggaattcttaacaggacctatttagaattaaacaagttttattgtgagtctgaagaaactccccaggcctccacaaacaagtttactgggcatctgaaggaactccccaaacctccatgatttagcaggagacaagataagggcaatcatcccccgcacctggacccatttagattaagtaaatagactgaggctccagagtaaggtcctcaggacccagacctcagttacagattaaagaagttaatcacttatgtctttagatgaatgcacacttacttgtagacatataccttagaaggtatatatgctctggaaaactttaattttgagttggtctggtagtaatttccaggccttctccctgtaactggttgcagaaataaaacctctcttcctccccatttgatctgcatctcgttattgggcctagagaaatagcagccggaccctcagtttggtccgggaagttcttccatcctccctcgcctgctctctgtggccactgcactcactgttgctgttgctgttccggtctctgtgaggttcacctagtggactggctggacatttctagggggcacctcagatacctcaccaacttgctggatctgatccttggatttcgattcataaattgtgccaaaatacgaagtggctaatttacatagtacttagccagatgaccgaaggactcagtatccaaaggcccctaacagaaaacacagaccacatttcctttactctggcccttttcctgggggtccttcctataccactgacactgttcctgtgtaggcggggctagaggggagactaagccctcggagtagctttcggatcagaggaagttctgctcttacagtgacaggggctgaattaaattcccaggttggggccaccactttttagtctgacccctgcagccggagtctcccagagcccttgggaactcggcagctgagagaaggctgagggattcygcgggcagggaggagaagggagaagagctttgctccattaggatctggctggtgtctcaagcgcacagccaagtcgctgtggacctagcaagggctggatggactcatggagcctcagggcgggttggggaagctgtcgaggccgagccccgctttgggcttctgggcgccctgacctcgctcccggaaccctggggactgggaggcgggagggggcttattgattccagccccgggcgctcgctcgggggcctacagaatggcgtgtttcggggttgtggcgggccgaggggcggggtcgcagcaaggccccgcctgtcccctcctgggcctctcaaagtctgagccccgctccgctgatgcctgtctgcagaatccgcaccaaccagcaccatgcccatgactctggggtactgggacatccgtggggtaagcgagggtcctctggtgggtgggacagggggcggaggcggggatgtgtggagtagctgcaggactggctctagggaccgttcctcttcagggctgcccgcctcagaagggcctgtgcatgacgctgtgtgtgtgtttgggggtgggggcgggtagaggaggcgacgggtacgtgcagtatagactaggggctsgcctggkgcagagaaagtcaccaagtcagggaccctccatctctgacccgagccgcgggccatctctcccagckggcccacgccatccgcttgctcctggaatacacagactcaagctatgtggaaaagaagtacacgctgggggacggtaatggcaccctcgtgtccgggccctgcccactcacgctgagttggcaccaagcaacccatggtggccacctgtggctgcctctgcaggcctcccctgctggagctgcaggctgtcccttccctgagctcccgtgagtgagccctctggccttgcaaggcagaatgctggggmgggatgctggacaccctgtctaattgggttgggtgtccctcagagcttccctaaaccctggaagccttagccgttgtggggtccagagccctcagtgggattctttstccctgaaccctgggatgtgggactgagtggtcagattctagatccacctgtctcagggrtcttgccactggctccttgggagggtccccrggaaggagggctgggctctggggaggtttgttttcacttcttccccaccacagctcctgactatgacagaagccagtggctgaatgaaaaattcaagctgggcctggactttcccaatgtaggtgcaggggaaggggcggttttgggggaaagtgcgacgtgtctctgactgcatctcctctccccaccttagaggtgttaagatcaggagtcttctgcccaattcctctcactcttggctgtctacacagcccttgcatgatgttctgtgtcccagctcatttattagtgtgacagtatttctatctcaggcctgccatgagcaggccctggtctcctctctgcccttgcatatgggaaggggatgctggggagcctggtggcccarctgagcttccccggtttcccatctatccagctgccctacttgattgatgggrctcacaagatcacccagagcaatgccatcctgcgctacattgcccgcaagcacaacctgtgtgagtgtgggtggctgcaatgtgcggggggamsgtgacctcctccttggctgggctgtgatgctgagattgagtctgtgttttgtgggtggcaggtggggagacagaagaggagaagattcgtgtggacattttggagaaccaggttatggataaccacatggagctggtcagactgtgctatgacccagattttgtgagtcccacaccccactcccagtcacccatttccctgccttttggcccagaccagggagggacttccaaagtcaggtctgtagcagactccggccagctgactggagacgtctataacctgrttctccaaaatgtccacacgaatcttctcctcttctgaagattcttgtggacattttggagaaccagaccacggacaactggatgcaactggtcatgatctgctaccacccagagtttgtgagtctccccagtgagctgcacctggcagagtttggatttggggccaggactcttgcattcctgcacgcactggtcttttcttaagtccttggtaccactcatcctccaagtgctttcccatactatcagcagttattctcacgactccartgtcatgtcaacaaaagcagaggcaattcccaccaatcttaggacacgatccaggcatcccacggtggaaattcaattcctagatggtaaaatttgtgttcagaatctccttcatctcctctggcctctggcctctgtcatgggtcatttctgtcagttgatttatatcacctacctgctcctagaatatacagactcaagtacaagaccaaggaatgtaatggcaccctcaaattgcatcttctcctcaaagttttccaagtgctgtcattgacatgcacmgggatctgygcattttcataacagacagctcagaggcagccagagggcctttattcctctccctccttcctttcaacttgaacttctcatctccctggaaactagtcaatgttcattgttttcttctgtcaccccattagaaggaactttctacttctttccctgagctcctttagttctttgcatccttgattctgcccctgtctggatccagaggctgccaggtgctcgggcgctcatgcggctgacccagaggctattgggaggccagtgaggacagattcaggaagagcatctcattctgatcacttcagatagggtctggcacccagtcagagtctaataaatgctgatgtatccaattgaagcctgggcactgccccggttttagttgtggggaagatggctgcttgcctgtggccagcctgggccatctacagccctggggaggccacgtctgtgcagggwgcttttgtctgagggtggtgacagctgttttctgcctcaggagaaactgaagccaaaatacytggaggaactccctgaaaagctaaagctctactcagagtttctggggaagcggccatggtttgcaggagacaaggtaaaggaggagtgatatggggaatgagatctgttttacttcatgtgtttcggggttttcagcccacacattcttggccttcttcagatcacctttgtggatttccttgcctatgatgtccttgacatgaagcgtatatttgagcccaagtgcttggacgccttccyaaayytgaaggacttcatctcccgctttgaggtgatgcccccatcctcctttctctttgatgccccttgttcctttctctcctttcagatgctttcccagtcctggagctacacamagaataactcgtatgtattgagtacgggcttcatgccaggaatcatgcccagcacattatacctatcgtgtagaatttgaaatttccaacattcctacagggtgacagaattatcttgcccattttagagataagaaaactgagaatgagagggtcagtcctttgctcagggtcccagagccagtggaggctgtgctgggctccctgtgagcctctggatctatgggtggcagtcagggctctcccatttgtgacaaaaggagaagcctcaggcctcatccagcctgggtttcacagcccagaacactttgaaagaggcagagcacttcaggaccacggatgcagctggcaatagtaggactgacacacagtggcattgatgttgagtactaaacctgcaggcagtattcatagccrcccycagaagctttgcatgatcggacccccatgtggaaaatcctgagatccggagctgtggctggagctggattagggtacatatgtgggtgcccctgttgaagcagtgtgtgttgaagtgctctgtgctggggcactctccttctttatctttcttcctctctttttttccctccaatgttccacgtcttccccctgtgagatgagtagcacactgattttactcctattcaccgaccttctcctctgcatgaggcagggtgtgaggcacagtgggagttgcatagatgactgccccatcctggaaatgagtgcagtgagaggcctgcaggcagagcagcctgtgaggtgtgtgtggcaccacctgggtaccgggcctggggcctgcccctcactcacggggaaccatccctcacctgtgttgaagttgtttgagagcagcaaatcctactttagtacagatttggggatttgaggcattagtccaacaggcttctgagcctagaatctgtttccctttcccactccccatcaagaaatctgcttgctcagctagttcccatcagctctggttctggtccagcctgagcagccttggggttatgtaagaggtggtgggaggggagcggtggggaacagccgagggctgggkcatggagcctgcctgggcctggccctggccctttggggagagggagccctggatctctttgaattctttagaagttacatggtcattgaatcctggtaagattgtgtgcagcacacctgagtgtcatgtggcctggctagcagtagtagggctggagatgtgatgggggcacagggacatagggagatttagctcaggtaccaggtggagaagtttggactttatgytttaatgggaatgattagagcctggtctggccttcctttrgtggttcacccttaccctattcagtttcatccaggttttgctaagtcattgggtgagatctgtgctctcttcttggctrcacaggtgtgttctgagcccctttgttctgctggaggtcctttctgtgtgtgcaatcctaggcaagccaagaacctccctgtgaaaaaggagaatgtttgtgccgacaaggagtgacaggatctggcatggggtgtggctgggtggaagaggaggagaatttggcaaaaacatgctagaactgaagacagaaccaggctatattccagccctgtcccacttactagctatttgagtgtgaggaagttgctgaacttctgttcttctatatgagaaacggtgataatagaactgaccatggagggtagtcgagtggattttctaagcctgtgttgtaatttctgttggatataaagcacccagcacagtgtagatctttcgtaaatggtagctgttattatggtataacattacttaaaggaagttggaagagttaacttagaagagctggggacctaagagaccgtgtgatgctccagcacttgagcccacatggaaaggctgtggccagggccctgacctgctgtgcctgcagcaaagctacttgagcccttctagacagcagacctggctctggccccttcttcccgccctcagggtttgaagaagatctctgcctacatgaagtccagccaattcctccgaggtcttttgtttggaaagtcagctacatggaacagcaaatagggcccagtgatgccagaagatgggagggaggagccaaccttgctgcctgcgaccctggaggacagcctgactccctggacctgccttcttcctttttccttctttctactctcttctcttccccaaggcctcattggcttcctttcttctaacatcatccctccccgcatcgaggctctttaaagcttcagctccccactgtcctccatcaaagtccccctcctaacgtcttcctttccctgcactaacgccaacctgactgcttttcctgtcagtgcttttctcttctttgagaagccagactgatctctgagctccctagcactgtcctcaaagaccatctgtatgccctgctccctttgctgggtccctaccccagctccgtgtgatgcccagtaaagcctgaaccatgcctgccatgtcttgtcttattccctgaggctcccttgactcaggactgtsctcgaattgtgggtggttttttgtcttctgttgtccacagccagagcttagtggatgggtgtgtgtgtgtgtgtgttgggggtggtgatcaggcaggttcataaatttccttggtcatttctgccctctagccacatccctctgttcctcactgtggggattactacagaaaggtgctctgtgccaagttcctcactcattcgcgctcctgtaggccgtctagaactggcayggttcaaagaggggctaggctgatggggaagggggctgagcagctcccaggcagactgccttctttcaccctgtcctgatagacttccctgatctagatatccttcgtcatgacacttctcaataaaacgtatcccaccgtattgtaatcatggtacttgtttttcacccaaactcaatcataaatttattgaagagaaaagccatgtcttactgaactttttacctcgagtatcattcacagttcctgaaatacagtaaatgtttaacacatgtgaaaatttgaaagaattccctcaagggaagattctgccaacctgtacagtcattattgggatttagagctctggatatagttgtattaaccagagaagatataggataacgttcagaagattttacatgtacgtgtcttagagaatgagccagcagctctctgtaacttcagctttaatagctgctagctgtcctttgaatagcttaacctgagatggggcagcctggtttgttgggtcacacagtagcaatctgtgtggtcagcaggtgtcagtattttatatgaagtcatctgcaaaggagcaggactcattggataaccatctgatgagcaggttcctccaacagtggctggatagtggagttgggccttggtaaggcccagccttgagatgtagcccagaacagggagattttgaggagagtcttgtggggccattgtccagatgatcactgcctgcagctgcacttgaaaagggagcaataggtgtaatgttaaggacattaagaagtaaatgactaatttgctgggcacaatggctcactcctgtaatcaatcccagcactttgggaggcccatgctggtggatcgctttagtctaggagttcaagaccagcccaggccacatggcgaaaccctatctctacaaaaaatacaaaaattagctgggcatggtggtgctcacccagttaggaggctgaggtaggaggatcgcttgaccccgggaagtcaaggctgcagtgagccaagatcgcaccactgcactccagcctgggcgacagtgagcccttgtctcaaaaaaaaaaaaaaaaaaaaaaatttgagcaaagttagaatcttatgaaactggtaagaaaaattagttgagccaaatatttatgaatgcttaacttcaatacagaagggataaaaataaaaaggaaaaagtaatagaagttaggagttaatactatgataaaagataagtagacagtatgaaaatattagacgagtaaaatagacatagatctagaacagatgtcagcaaacactttttgcaaagggctggtagtgaacattttaggctttgcaggccaatgggctctgtcataatgactcagcgttattatcatagtgtaaaagcagtcatagacaatacataaatgaatggtgggacactgcattccaatggaactttatttacaaacacagatgactgcaacaaaacaaaaaccgaacaacctgattcaaaagtgggcaaaggatttgaatagacatttctccagagaagatataaaaatgtccactaagcacatgaaaaaatgctcactatgactcatcattagagaaatgcaaatccaaactataacgagatgccacctcacaccggttaggatggtattgaaaagcagaaaatcacaagtgctggtgagagtatggagatactggtgcactgttgtgcactgtcggtaagaatgcaaaatggtacagccacagtggaaaacagtatggcagttcctcaaaaaattaaacataaaattactatatgatgcagcaattcaatttctgagtatacacccaaaagaactgaaagcaagctcttagagagatacttgtacacccatgttcacaatagtattacacagctaaaatgtggaagcaatccaagtgtgcatcaacagatgaatgaataaatgaaatatcatgtatacatacaaaggagcattattcagccttcacaaagaaaggaaattctgacatatgctacaacacgggtgagccttgaggacataatgcaaggtgaaagaatccagtcacaaaaggacaaaaactttatgatctcacttatgttacatagtcaaaaaacatctaaagagaaagtaggaagctgattgtcagtggctgagagaataggaaaatattattttaggtgtatagaattccagttttataagatgaaaggagttatggagctagatagcggggatagttgcataacactatgaatgcatttaatgtcagtgaattgttaacacggttaagatggtaattttgtgttatgtgtatattaccacaatataaaataatacaaaccaaaacagaacaaaaaacagcaggtggtggtagttttctgattcctgatttagaagctcaaattaaaagtgcatagttatattaaaggtaaaatattacatttaagatttgaaatgtgattatcaaaaacattaactcaatcctttaaaaagggggaagatgtggtaaacaaagagaattgcaaatgaaaatgattttctaaacattgtggtcaaaattataaaagataaaaacatacatacattctaaagtcagagacagaagtagtataacctatatacctcacactgagccaccaaaaaggataatgtaatggtggctagtacctagcagaagtcctggaccgtgagattgttcggtgcctcgtggcagtgctcatacggtgttcagtgcgtctcccccttctattaacagaatagaatcagaaaatgagatgtgctcagaaaacacagcagcctgtgttggcggcttctgcattcatctgtaatcatctgttgttaattacaacttctatgccttatatgtacccattacccttgtattagcagaaaaagatgaagctgaaagagaccccaagacagcagcttatagaaaacagtttattctccttttgtgtaacagttctacagggaagactctaggttgttgggaagccgtcctgctccatgaagttactcagggactcgagctccttccatctcgtgcctctgtcattccttagggtgcttccttatctccttggttagagctgtattgcccaagccaaggaagcgacttcctattatgcaagtgaggccgaagttgcccacatcacaaccattcacattccattggtgagattcagttgtgtggctatatctagttgcaaggatagatgcatattataatggaacaatggattttggtagccagttacatctctcccacatccagaaaagtagagataaaggttaattaaacccaagtttaggagaaaccttgggtttgagacagtgtttcaaagcaggtaggatagaggctaaggtattaaagataagatctttatcttctgctagacctgaggtgggtggcatatcacttagagttccttgttgctaaaacagcaaaagaatttattagctatatcaggtagttcactgaatccccgggagggccagggagttggccttggaacctgggtagccaggaaatatgcctaatcatatgtgggattattctagagaaggcaacacagccattgctgggcaccaacaccagaacccctacccatgacatgtggcactggataccagtctcaccactgctgtctccaaaatcctgatccctccacctctgcccttctcataagaaaacaaagaagcagggcttgcttctttaaaactgaagtcttccacaactgtgtgcaattaacagagtctggggcagaggacttcgcctcagccacaagggaggctggaagatcaagtggattagttcacattaagttctgctatatatagccaaataatagcagtggcttaagtaggacagacttctatttctcatgtaaaaaggttttttgaggcagacagttaagtgctggtaatgtcagcttcacaatggccttagtgacttagcttgttaactttatcttcagcatgtggtttcccttctccatgtcacctctttgtccaaagtggttgctagagtccaaccatcacagctgcattccaaacaacaggagggaaaaagaggaatgggagttgctccttcccttttaaagaaacttcctagaaataacatacatcatttgtgcttatcatcattggttagaacttagtcacattggaaatgacatcttttgtctgggaagtaatgtgcccgggagaaatgaagattctatgacaaaagaagatagggagaatggatattgggaaagcagtcttctacctcaggaaggtgagacttctaatgtgagaaattccccacctataggaagagtgttaaaaagacgcagatgagagatacctgacaaaagcattatttttctatatgtacatttccatttattaccgtaacagtcactactataaaatgctcctgcttaacatatgcaaccatgccttgtacaaatgaaaacacattcaccctctttctcctaaaacagaaattaagcaaagtgtcatttcctgcatccacttccaagtttggaatctgtgggtaatgttcatattgatattttgaaaacgagagactaaagtgtaaagttaataacccccaatttgggcagggtgtggtggtacaggcctgcagtcctaactatcctagaggttaaggtgggaggatcgcttgaggacagaagtttgcagtgagctatgattgcacctgtgtataatcagtgcactctagcctgggcaacatagtgagacctcatctctgaaaaaaaaaaaaaataataaaggacgaaagaaagagtaaaaacaaaccccaattcaccctctataaaataacaaatgaaatgggaagtggaaaaaagggaaaaattaggtaagcctatatgatacagtagaaaacaggctgcactcagatttgcaaataagctgttttgcatttatttacaatgcttatagaatgcacttctttggtgaagggactctgaagagatattgygtaataagacttatatactaagcattgatatgaacaacccaaagtcactccttggattggctcttgtctccatccctctgtgaccccactcaggtttactgtcatcccactttgttaccctacattttttaggctcatgtggcttgtgtggaatggtgagggaaactcttactgatgacagagacacagagacagactggccactaccacatggtaacctgagacttggaagcagtgagcgagagtggtccattctgatgggttccggaccaactctctctgcaaatgttaattgtcatactccttgtaaacagatctggttttccacagaggactccgccttttggaatagccccaacaaatcctctcaaagcatattctgtccaaaaggcccaacagacaccctacattccctgcatacctttagttctcttccagttgaaacataatttttttttttttttttagacaaggtcttgctctgtcgcccaagctggagtgcagtagtgcaatcatggctcactgcagccttgacttccttgggctcaggtgatccttccacgtcagcctcctgggttgctgggactacaggcacatgccaccatgcctggctaattttttttcctgtattttgtagagatggggttttgccatgttgcccaggctggtcttgaactcctgggctcaagtgatttgcctgcctctgcctccctccacctcccaaaatgctgggattacatgcataagccactgcgtgcggcctgaaacataattttggaaagaagcagatagggtcttggtcacagttcaaaaagagtatctgttaatataattgaaagtgttgtactacagaagataaagtacaggcctatttaataattctaattttccttcaaacttccaatacaacatgaacattattagctggtgtgttctattcctattattttgcatcatggaaaacatctcctgcgaacactaggttggcccgctgtctccaagtcaggccacacagmagcacctattcatttaaaattcaaatatacccacacccatttaatcttttcttccagatttaagtctcacgtgtcagttatctgtaattatttccattgtaaaccccataagaacattaagagccaatccctg

SEQ ID NO: 95965 - DNA, 24206 bp, Homo sapiens
  misc_feature (1)...(24206): n = A,T,C or G
ctttgggaaattggactccagactctggcttctcaaaggttggggcagctctctctccttctggctctcatcccagctgccctttcctgggggaaaaatgagggtgcagtctagcaactgcctcacagacatttaggactccacaggttgtactcctctatgccaattatttcagtttacttaaatgagtgttgctggcggagcctcctcaggtggagatgttttagaattttgttgcccaaaatgtggatcaagagccagcaacatcagatcacccggaagctcattagacatgcagaatctcaggctttaatccagaacttctgattcagaatccgcagtttaacaagatctcaggtgactctaaagacattaaagattgggaagtactgccctagggacctgttttccgctaaacttacctaatcctaagaatcacctgggttgctggtgtctgtgtttcctcaagtcttaggtgccactgactagaagattaccctgctttccgagatgttaaaatagtgtatgtttttaaatggtatgttagcatcaaactccagagccagagaaaatattttaagctaatacaggtagttatcacatctgtgaagtttgaaaaaccctggcctgaaacagttctcaacttttagtgtacagtggcatttacctggagagctttttaaaaaatactgatttaattggtctggagtgcagtccaggcacaaggatttaaaaacgtccccagctgattctagtgtacagccaaggtggagaactactgaggtcgaaggatgtaatttgctctttcattttagagctggacttgtgcagcagtggccagttgggactgggaaggtcaggagtagaatctaggtctccctgcctatcaggtaccctgagccatagctaattatcttcctccttcgcaccacctttcagtgactgtaggggctgatggagaaatatgcagctgctgaggtgctttccatggtagccatgttttcccaatcaaattggcaagtccttattgacttaaggaaaaacaggagagtctctttgaaattgtgactatcttggaatcttggttataaggtttcagtaattataccccactgctagccctgctccagcgtactcacaatactggtaactcacactgaggccagagccatgctgaaggctacactgttcaaggggctgcctggaactattaataattattatgttatagttattataattaataactgctgaacaatgtaagtggctcataccagttaattatcacaataactgctattgtccccaatttacagactagattaactgagacttgagagttaagtaactcatttaaagtcagctgggcatagtggcgcatgcctgtaatcccagcactttgggaggctgaggtgggtggatgacctgaggtcaggagttcctggccaacatggtgaaatcccgtatccactaaaaatacaaaaattaggccgggcatggtggctcacgcctgtaattccaacactttgggaggccaaaatgggcagatcatctgaggtcaggagttcgagacagcctggtcaacatggtgaaaccctgtctctacttaaaaaaaatacaaaaattagccaggcatggtggcaggcacctgtaatcccagctacttgggaggctgaggcaggagaatcacttgaacccgggaggcactgcactccagcctgggcaacagagcaagattccgtctcagaaaaaaaaaaaaaaaagaaaagaaaagaaaagaaaagaaaagaaaaagcccagcatggtggcatgcacccagctacttgggagatagaggcatgagaatcgcttgaacccgggaggtggaggttgcagtgagccgagattgcgccactgcactccaacctgggtgacagagtgagactctgtttcaaaaacaaaaaaacaaagttatatggcctagtaaacagacaaaccggtgatccttctttctattacttccacataagtagccagagagagaaagcatggacaaatgcatgaactctataacagcagcccttgttaaaggaaccactaagttgtttcacacacagggaaagtgggcttgttcctttttctgctactacctctgcaaacttctgtgctgcttctgctttgttccctaacttactggatggaagttcccctttctcactgctaagctgagagagggaactgctagccctcgcctggcctgagagtacagatccattactgtgcatacatcatcctgatgtctgtgacctcctgcctctgcctctatcgtcagttcctgtgcctttcctgtggctgtcccactttatgatcacatttacgaacagtttcctgatgaagtaaataaggtatgtagtgctagttccattttggaggtgagtgaactgaagtacagaaaagtgatcctcacattaataagcaagttggtatcagaagccaagccagagctcaggtgttttgattcacagccctttataaccattatcattttgaatgaaaagtaaatcactgtttcttagtgatttgggcatgtttcctgagttaagggatctgtctgacatccgtggtaagccttgtcttaagtgaattgtgggtaaagacttgtcccagatggagtgggaggacatgaaggatgaggaactaccttcaggaccttccagtccataggcagaggtgggggaaattcacagaaaaacaaatgagttaaagggatactgcagtagtgctgggaaattcagagctgtttaagacctagcattcacccctggtaggaaaggcaatcaaacacacatctgactgtcagactgacaaagttctacagcggaagaaagaaaagggtgattgtgaaatgaatagactttccacagagaagcagaataacagtggaagtgggagatacgcattttggggaaaggaaagagcatgaaaaaagaggtagaggcacaaagtacaaggtgtgctcagagaagactgggactttgatgtgactggactggagtgaaaggtgcatggagtggagggttgggaggtgaagatgaagacaagaaagggaaattggagccagccagtgaagcgccttcaatggcaaggggtttgactaaaatccactggggtcttataaacaagtatagatggaaacagctgtatggtgctataaacacaatgctgggtgactgaggtgagggggagagggagctggctgctgggagaagctgagaaaccagagctgaacagcttgtttctagaagggcctaggcataaggtatggtttgggaaattgccttggccaaggacctttttggagctgcagatattctctcccaagtttagtatctgtgaagattgttctggcctagctagggaggcggacatcacaagtgagctgaagtccagaagcaaagaaaagcacttcttcagagaaacaggagtgcaccatctttagggagctgggattccgggagggccagttaaggagccatgtggggaacaggctaggaggggaggaagctgtgtttggagctagggaatatctcagaggctcaaaggcaatgaatgttaaggcctcagtgtgaaaaaagcccaggccataggatgactcactcctttatttcccaagctctgttctgcgtagacaatgaaacctcactgagattcttgctggtatggagtgggtggagggattgatgcctaactataatcagggccgacttcctagcagcaacaatacaccagatgacctggaaataggggagggttgtagagtgaagggtgtgttgcagatgggactaggggactagcataaagggactaatgaactggtttgcctgggctgggtggagggcaaggattgccacctattggctgctgaggtaggtaggtctgcattaagcaggatgctcaagagacctggcccaatgcaagatactatctttaaaactatgtcaacatttgcatcttatcagaagatacatgacatttatgtagttacatggtgcttgatttttgagattcattttattcattcttgagagtccatcagcctcaaaatccctaagcgccccaagaccaattcagtgggccataaatgtaaacagaatagtttaagtctggggttaagaccccgggaaggctgggttggggggactgtggaggcaattacagatttttacagatttttgttgatttctatccccttgattataaaagttatgggtatgtattataatttctaaaatgcaaataaatataaagaaaataaatataacccataattccatcactacagataatcattggtaaacttgttggtgtgtttcttttctacccatgtatatcacataagtaggaccatactgtgtatagtgttttgcatccattcttttacctaactttatattgtaaacatttccacatcattaaacatttctccaagaacaatttttaatggctgtatttcatggtatgaatattacataaacattcccctattgttygacctttaaagtatctaacttttctatgcaatacacattgtggtgctgaacaactttttgcatacatatttttctggcagctctttttagaaaaacaacttccagaaagttgattactgggtcaaataataagaacctttttgaaaattttgattctatattaccagatggctttcagaaagattatatcagtgttcaaggccaccagtaatgtgtttgtgcacatgtacgtgtgtgtgtgtctcccatctcactaactatacccttgccaacctgcattagcgtttattttttggttttttgttttttagtctttgctattttgattaggtaaacctggttatctctgttctctttttagttttatggattctgtgtgaggtgaagaggccaagttttttttaagtttgttcagggaacagtagccagggatcaatggaagtggcaccagatgcaggtggagaaaagggttcagggtccagaatccagcgtggggagagaagagggaggcagagtttgggaaggatctctgctgtgggagtggtaagaactgggaggagccagacaaacagcattagaacaactgggtgtggggggcaaaggcctcccacaagagggaaaatagggaagagattaattcctgctaatgcatttaattatattcagtgaagtcttagggacttccctccacaagttccctttaggtcggattatctaccccttggcagtggggatgcttgttggatagaccccagaacggctgcaagtgaatcaacctgtgagtgtcaatagagaaccaaggccaaggctaaagcaatggtaatacatgaatactgagtactaactacaggccaggcacagttctaagcagttaacttatattaactcatttatcttaaccaccatataaagcaggtactcttacactcattttacagacgaaatagaagcacagagaagttaggtaacttgcccagtatcagtcaggaagtaggtgaaatctggatttgaacccagacattctggctagagttaaagctcttaaccaccaaatacagaaatgtgggaaggggagccagaattgcagggcacagcctcctacctacgccggccggaagaaaacagacgaccaagtgagattgcaggggcaggacttctgcttaaaatgaatcctgggacaatgataacagctacctttcactgggccctcacttcgtgccaggcactgtgtaaagggactttacgtttaatcttcacagtaacccctttgagtgaggtactgtcattaccccatcttactgatgaggaagctgacgcacggaactggcccaagacccagggtcggctcaggccagccctaccgcggtgtggtggctgcccacgtggcgcccaggaagagaaaaaaatggcgaggcggggtcggcaggcggaggcggggccaggcgggggcggggccaagggccgcagagcctggcgcggagccggcgagattttggtggggtctcacctgttgcgtgactcccccacagtccggccgcgggagtcygaccctgaatgcccagggagtgttgagagaaatctggacgagtttcgggtcccgctcccttgggagcacgtggcctaccagcctctcgattgcagggttgggtggtcgcgacaccggggtcgccttgaggccagtccggctgccgaggtctgcgggagtccacctccggccagctggcaattttgaaagactgccttactttccccatctcagtgccagggcaggggcccttggagtgacttggctggggtctgtggcccgatccccctgccgtccctcaggacccgggctttctgctgtacagacttctcgtgggcagcctcccctcggaactcgggcatcatggcctcaggtgagtgtgtgtacgtgygttggagggagggtctctgggacagagaagtgctgtggccagagtgacaagagggtgggagtcacagcacagcagcaggacctagggaaggcggtcagctcctcccaggagggcctggggagcagagccagagtgtgcagagacagaggaaaaatccraagaggctagggtctctgtcccagacccccagacaagggggtctcctggccttcctgccttcctgggaggtagctatttggcgacggtggaattttcccgggacaggcccctcyctcctgggctgggattctcggttcttccccctcctcccagagctgggctaccccgggagctgagggtcagatgtggaaggaaagtgggtgctgggttttcacggagtatgcctgccctgccccgggaggactgtgtttgagcttggactcgctcgctgctgaattcctgtttgttattcttttttcttccaggctagctggaaggaccagctagcctggactttggcttctttgcccgggagccctggcatgatggggtgagggctcttggtgggttagtggagagctgggggctggcccttccccatcttcttttctacccaccccctccccgccccccgccaggcccagccaccatcagtcacgtcactcctgggactgaggaggcaggggagggataaggggcagagatggaggccccactccccgaggttgcctagacaacatgagaaatcgtggccagggcctcttccgcctgcggagccgctgcttcctgcatcagtcactcccgctgggggcggggcggaggaaggggttggatgtggcagagccaggccccagccggtgccgctcagactcccccgctgtcgccgccgtggtcccagccatggcatcctatccatctggctctggcaagcccaaggccaaatatccctttaagaagcgggccagcctgcaggcctccactgcagctccaggtgagtgtgtgcttcctggcctcaggatagatgctgggctctgtcttgccacctctcgcccaaggtgctggtcccctcagagggggccacctcctccggcatcctctctgtggtggtgcccctcaacctcagtcccagggacagccggcttggaaggtggggtgaggggtggtggggggcggggggtggatctgagatatctgtgccagggatgctgtcctctgtcacaaggagtgggcatggtgtgggtgcagcaagaggtgtgtatgcacacgtgtcagcgtgtgcatgtgctaagactgcgtgtgaagcatgtgtgaatggagcgggggtgtgtgggactgactgttttgtggactggccactctgactggcgcctgtgcctttaccaggcaggcttaggctgttctgtggctagttccactttttaggaccccacatctagatccccctcactgggggtctgacatctgggcacaaccattgctggctggcatcccacaactgggggcttgactgtatctatcgtttgctatttgctcattcctggtctatattgtgagcctccttaggagtatggggtgtccttggtcaggtccgtgcagggttcaggctggggctgctgcccgcactgtgtgtgcttctgcaccctttggttcgtctctcactctagtaagcatctctgcatcatttggagcaggcagtgaggtgcggcagtgcctgtctcagtgagggcttggctgcctggctctgtgcttgcagagggatatctgcctgctgtctgctcccaggccttgtggctaaggaaagacccaccctgactttgatgaccagatcatgccgactgcccccacccttgcagctgtctgtagctatagcccaagtatcaacctcctatatttttttgtttcattgaagatgactggtgcaaggtctctactgtcctgagggtgttctctgtgcccaggtctgtgccatccagaaagggtgtcccctgggtggggcccttcctggccctgtttggttcagcaatagggcaactgatacggatctagcccagagctggagacccttcggtggtcagatggtaagagcatctgatacttgtggggtcaaagccgtggacacccctgtgcctactgaggcagtcgtggcagtgtgtgaggggctcctggtcgagaggggagatggggtgctcagaatctcagagttggtgggagtggctctggagcagcccactctggcttttgcttgacttctccgtaagtgtgggtgtatgtgtgtggtgctgacccctagagaaaggaccagtaggcagctgagtcttctaggcctggcctctgagaacgtagcggttactgcccgtgtgccaccttcagtgagcctgcggcagccctggagagtggtctggcaggctggggggatggcactggctgttggaatctgtcctgctcaccccaggattgctgtggagcctgagacccccctgctaggagagggggttgagatttgagcctttgactcaactcctgctgacccaatatgaaccagccatggaggtctgtggtcggcctcccctagaaggagtcagaagtggtctggggccatatgtagggaggaggtgtgtaaaatcagggttctcgggcaagaaaagatcttacactctgggggtgagacagcttcccctcttttcttcctcttcccactttgtccttttccaagtaagagatagagtcaccccatctccactcctgccaagttcacttcactgccctttactggcctattgcctttgccctgcactgggcccagggaacctcccactgtcctcagtgggcggggctacaggtagaatgtattttgagggtcccaggagttcataattgcaggccttgcctcaacacagagcctggtgttttgcagaacacttgcagagccattatctctgtgagccttatggcagttgtggctaggcagggaagggaccacttatcgccccacttgtagatgaggacccaaagcctcccagaggtaggtagagacatgcccggaagcaggaacagaatcagatccatgttctccaaattctagccccctttctcccaaacttattctggacagtttgtcctgtccctgatgataggcttggatcaggggttgcaggtctaggggcctgcgaaccagccccctgagcagctgggcagcggggaagcctcagtgactggcccctacctagactgggccatttccccagctgccagccagctcctaccccagcaaaggccctgtctctcctgagggatgccataatcagggcccagaggacagtggtgagcaacaaggccactgccagaagaggccaacctggggctgtgggtgtgatgaagagcgctgttcccctcctttttctcccctcttactctttggccagccaggccctgcccactcactgtcccctagggcagtggattttaaggaggcttggctcctccctgtcggcctgccctgcccaagtcagcctaccctgctactcccccttaggagcctcacatctggctgggtcttccctggcactgtagaggtggaggccctcttcagttctggagttcgtcttatctcccaactctgatgctccttcccttggtttctgggctcccttgaactcccctagctccgtgctcacggccatctcagggtctcccctgcttgcagctgcacttggtacagcctgtgccagcccctgagggaccggctgcagcttcactggcaaacaggcgggcaaggggcacagggctgctggccggagctgcctgcactctgcaggtagggttcaggcaggggccggggtgcgcaggggacggggtcctggatctggggcaggcccctccctcttccctttgtccagctttgggaccagtcctggagtattgggaaatgggcgcagagactttaaggccggctacctaggcagatcctgtaatccttccctaagccagggtggagggtgctggaggggagcactccttacagccggctgagagaggcagtttgggtgtggaaagcttctcactgaggagctggggctgctgagcccagggagggtccttcggggtaggctggaagccttggcagcccccatagaccagcagcttcacggccctctggtgccagcctcctcgtggtacagatggaaagtctagtcttgatgaagaaagacccctggcttctgacactcccttccccagggccctctgtggtgcccccggtccagatcctggggcctgagtggcatagactgtttgtggcagctccttttggaggggcaggctaaggccaggccacattttggcagccctggggccctgggggacagggcgggcctccagggaggaggtagggttcccttgccaaccaggccctccacttcctctcctcttcccttgagggctcgtccctaggtcagagctgagcagcagctgcggcttctcttgtgctgcacaggtctaggatgtcaggcacagggccctgcccctttgagtggagaatctgctagtccaggggcgggtctgatcctgggttgcctgccctgggagctgcaggctgggggtccctggtgtggccgcctggtccttaccaagcacctggtgtgtgtctctgagggtgtctgtgtgcgtacgtgcatgtgtgtgcacacgtacacacgtgcacctgcctctgggaggtagtcacgtggagattctcatggcctgagggatcaggctctagtctcatttgtggaggtaatgaatctacttgttctaggggcagactcagaatccccaccccaagcctggaatgggtgaggggtccctgcgttagaggtgagggtgagccctttgggagccacacacacaggcctactcctcagctactgaggagggactgccctctttcccgaccctgggctctctcgggagctggcctaggcagggcaggggcccagggctttcaggggctgcccctccaccctttgaccctggcatcactgtctctgcagaggctcggggtggtctgggggcccctccgctgcagtctgcccgatccctgccgggccccgccccctgcctcaagcacttcccgctsgacctgcgcacgtctatggatggcaaatgcaaggagatcgccgaggtatcacctggcaccacccgcaccctcaccccgtgtctccatgccctgcctctgctccccacacccctcacctcaagctgtcccctcacctcacgcttggctgtctcctgatcctcagcctctcccaggtacccctggtcctgctgccctcaccccatccccagactctgtaggagagtgcccgagggcggagggccagccatgctgaccttccttccctccccccaggagctgttcacccgctcactggctgagagcgagctccgtagtgccccgtatgagttccccgaggagagccccattgaacagctggaggagcggcggcagcggctggagcggcagatcagccaggatgtcaagtgagcccggcaggcagctgcttagtctccctccatacccttccagaccctttcagagccccttttctgcctctttccctcgcaccctgccttggggggtctgcacagggagcatagagtgggctttggagtcgggctgctgggttctgttctgtcttctagccgccggtgtggctgggtcatgttgcttaacttatgggtctgctttctcatctctaaagtgagtgagaacagcacagggttctgcagctctgcctttgaggatcacatgtgacaacatgtgcacagcacctagtgcggtgctgggacctgggagcaagggccgtccctcgggatctgcctgacttctcacccctcttgcctctaggctggagccagacatcctgcttcgggccaagcaagatttcctgaagacggacagtgactcggacctacagtgaggagggcagaggggcacaggggatgcggagctgsagcctrcccttctgccggctctaaacccctcccttgaatgcaccccctgcaggctctacaaggaacagggtgaggggcagggtgaccggagcctgcgggagcgtgatgtgctggaacgggagtttcagcgggtcaccatctctggggaggagaagtgtggggtaagtatggggtgtatgttgggtgagtcgccatcacctatgtcttagtgggttcccccagcctggagagctgggggtgggggctggaaagggcgtttctctttccagcagctggaggggcggaggggcagaggggctgcntaggagccacttgatgtgctggaccagggtgatctgagtgttcctgggggtcagggcctgtgggaggtggggatagtttgggttctaagataaggccttagggaggaggtctctgagtccaagactgaggagagtgatcgcatatcctcatctccaggtgccgttcacagacctgctggatgcagccaagagtgtggtgcgggcgctcttcatccgggagaagtacatggccctgtccctgcagagcttctgccccaccacccgccgctacctgcagcagctggctgaaaagcctctggagacccggacctatgaacagggccccgacacccctgtgtctgctggtgggactccccatctctgccccatgccatgtgccctagcctcctgggcttctcagcctggtgcctgggcacctctgccctgcctgcctctccctacaacccaggctcattccaacctcttggggtacaggggtggaggttgggcaggagctgtctgacctactgggtcttcaacatctcttgccctctgtggggcctttgggttgggcagtgggtggcttggaagagccctgctctgactttaccctcctcacccctgcagatgccccggtgcacccccctgcgctggagcagcacccgtatgagcactgtgagccaagcaccatgcctggggacctgggcttgggtctgcgcatggtgcggggtgtggtgcacgtctacacccgcagggaacccgacgagcagtaagaggggtgtggtgcrtgttggggggatgcagcrtgggaggttgcgttggcttgggagaggccacagggctcggcttgctctcctcacccaagctcccctccatgccagttgctcagaggtggagctgccataccctgacctgcaggaatttgtggctgacgtcaatgtgctgatggccctgattatcaatggccccatgtgagtcccctgccatcccagacacttagctcccctcccagcccagattctccagccccagttctgccccagactcccatcacctggtgtcttgcccttcctagttgctgagccctcgacttccccgcagtctacttccctcttggcagcctccatccttaccctcccacctgctccctctgatctgctacccaagccctccccaggtgcctcccttcagggcctaagtccctgccttgttctcctcatgcccagaaagtcattctgctaccgccggctgcagtacctgagctccaagttccagatgcatgtgctactcaatgagatgaaggagctggccgcccagaagaaagtgccacaccgagatttctacaacatccgcaaggtgggccctcaccccgtggccgtctccatgtcctcatcccacacctctgcccagcctccccttcaagggccaggccccccacacagcatccagtacagagggtcctttcccattgyactgccccaggccccagaccttcctggcctctggtggatcagcagtgccctgttccattccaggtggacacccacatccatgcctcrtcctgcatgaaccagaagcatctgctgcgcttcatcaagcgggcaatgaagcggcacctggaggagatcgtgcacgtggagcagggccgtgaacagacgctgcgggaggtctttgagagcatgaatctcacggcctacgacctgagtgtggacacgctggatgtgcaygcggtctgtgccagtggcgtgggctgtgggactgagtcagtcaggggaccaggagtcacgggtgacctgagccttcccatgtcccccaggacaggaacactttccatcgctttgacaagtttaatgccaaatacaaccctattggggagtccgtcctccgagagatcttcatcaagacggacaacagggtatctgggaagtactttgctcacatcatcaaggtaaggaggcagccttccctgccaagcctcgagcctgaggatctgggggcttttagggggtgagactcaaggagggtaggcagatgaccccctgaagagctctgactcagctcacctcatgtctgactcagctcacctcatgtctaggaggtgatgtcagacctggaggagagcaaataccagaatgcagagctgcggctctccatttacgggcgctcgagggatgagtgggacaagctggcgcgctgggccgtcatgcaccgcgtgcactcccccaacgtgcgctggctggtgcaggtgccccgcctcttgtgagtgtccctggagtgggaggggaacctgcggggtcatattcaaggggtcagggcctgcctcctgccctcctaggatggctgagcctcccttgtscctgccaacccctctgagtgcaaggargggcttcctggtcccatccatggtctgtccagcctggcccacctgggtatccttgctttcccaatatggttcagatgcgcccctgcgctcttgggccaagctctgacccttgctggaccgctgggtttcctcccactggccctgacttgcacmtacctgcatgttgtctcacctgcagtgatgtgtaccgtacmaagggccagctggccaacttccaggagatgctggagaacatcttcctgccactgttcgaggccactgtgcaccctgccagccacccggaactgcatctcttcttagagcacgtgagcaggcagcgcagagctgggtatggggagggcagccggcttcgcatccagctgcagctctggttctgaccccagggttctgtattaggtggatggttttgacagcgtggatgatgagtccaagcctgaaaaccatgtcttcaacctggagagccccctgcctgaggcgtgggtggaggaggacaacccaccctatgcctactacctgtactacacctttgccaacatggccatgttgaaccacctgcgcaggtgcctgcaccaccctgtgtctgcttgctatgccatctctcgcccaacaaacctcactcttggcaccttgggccagggccactagacctctgacccacctgttgcctggactggatgggttctytctctgcccttggagctacatctgtcacccctcacagccagtaatctacccctgtcccccttatcccaggcctgcatagttattggctggaggacatatgcgtgctgggtggggggtcaggggctcyggtgagcccaggtgatcccaggctcaggagctgacactgtcttcatgtcccccaggcagaggggcttccacacgtttgtgctgaggccacactgtggggaggctgggcccatccaccacctggtgtcagccttcatgctggctgagaacatttcccacgggctccttctgcgcaaggtcaggatctgcacccctagccttccctcccaattgttcaccttcctctgaacmattcgggccccttcagcaaccgatcctcctcccacccagccctcagattggattctgccttcccartgtaactacccttccccaccccagccttcagcctggggccccaacttggattttgactaattcaccctttgcacatcaggccaagcctggattcccctccccctgccctctgctgtggcctggacccccagaaccactgtgccctgcccagcctcggggccacctgacaggccctccctccctgttgcctgcccaggcccccgtcctgcagtacctgtactacctggcccagatcggcatcgccatgtctccgctcagcaacaacagcctcttcctcagctatcaccggaatccgctaccggagtacctgtcccgcggcctcatggtctccctgtccactgatgatcccttgcagttccacttcaccaaggtcagagcccagcaggcagccaggcgggcgggcgtcccaggacsstggggtctcccgggttgggtggggggcggtggggggggcggtctctcgggttggtgctgccccctgctggtagagcatagctggccaattgacaagtcttatggagttgaggggttggggggttggggggatgggggggcgggggtggggagagtgagtgaggaggctggggaagggaggcaggggcagctggccagggcgcactcgtctgagggaacctggcccgtgcaggagccgctgatggaggagtacagcatcgccacccaggtgtggaagctcagctcctgcgatatgtgtgagctggcccgcaacagcgtgctcatgagcggcttctcgcacaaggtactacagcgcctgcctggaccttggcatggcatcactcctcccctcctctgcatttggggtcctgacctgtccctgggatggcttggggtggggcatgacccctcagcactggctgcagccctgcccattacccccgctccttgcaggtaaagagccactggctgggacccaactataccaaggaaggccctgaggggaatgacatccgccggaccaatgtgccagacatccgcgtgggctaccgctacgagaccctgtgccaggagctggcgctcatcacgcaggcagtccagagtgagatgctggagaccattccagaggaggcgggtatcaccatgagcccagggcctcaatgakcctggtccatgaagtgcccaccacatcgcagcacttttaccacgttttgtcctcagaccccgcccatgctgtgtggtctctgcatgtctccattcttctctgtctctgtcttgcatgtctcctaccatgtcactgtccctgggccacccagtgaaagcaaagcctgggaatctgctcattgttgtttgggctcaggtattgagcctgatggcccaggtattgagggcctcccctgctggtggccctgtcctgggatcctcagaagcctgactgtcctatgggcttctccagtgtccacaggggcttgggatggttgtggggggctggcccctctagcctttccggtccttcctgggcaaatctaagccttggccagggccgaagtttaggcccctgtcttgttcatgtagccgaggggcaggcgggggayctctacacctctgctgtgggcacggggctgctgagggtctgtggaactccagcagctctgcactgggtagagctgggcctagagctcagtcacaggcctgggcttcctggcctgagtgggtagacgcaggcggcagaggtgctggaccacatctccgccaagtcactgcccagcagccttctccgtcctgtccccagcccacgtgctccttgggtgtcagcttcctgtgcctctgtgggagagggcagctgccttgtgttatgtctggggccacagttgctgcaaagtcctggatctgccactcaaccccgggagtggtgttcccagtgtggctcccagagctttgaccagattgtgatcccagctggcccctatgttgtgttctggactgaggcctttgctgtgaactgcagtgtttcatacgaaccatctttcctagtgcatgagaaataaagattatttaagtaatgaggcaggtggggtttctgttgggagagggaacgccgtggtgggaggtggctgtggatggaggcaccgtgcattctgaggggagggactaggcttgggtgatgtgtatgttgtgcatgtggaaactgacaaaagaagctgtgggagagaggagatgcccatccaaccctcatccagcctgttccctgtgaggggaacacctagccccgggtctgtggcacatccctgtcacaccagcttgggggctggtgtctgtttcccaccttgtacttcctcccctcttccagcctctgaggggatggcctggtagatgggaaatatgcacctacagacaaacctgagaccagggtcttctggggggggtcttgtttagatggccctctccaggccatactctcagagattctgattcaataggcagaaggtgtggcacagacatctgcaaactctcgggcagattctattgcaagaggttggaacaagcctgtgcattccgattccagccccccgcccccgccccaatcccatctcagcctctgtcccatgtttaatacacaatttctggagcacctccctggcacagaggttgctgaagtctgttccccaggtaaagaaggaaagtggaatgtgccctgggctgtgcagggtcctgggtgggcagagagaagcctgtcgctgcccctgctgctggctggggaggcctgtcctcccctggctggctgcctcagaagcaattagccctggaacagcatgagcctgtttaattgagggcctgcccagagccagagcagctggagcaggagggggaggctgggaggccgctggcttcctcctcctttcttgtcagctgctctcccccaccccagcctctttcagcaagcaggtctgcacctggccctgggtctcccagtgggtgccccgggaagaagctctcctcatccctctccacttcccattggccaagccctctcctggtcaagacccaaggcccttcagttcagaagacaccccttgccaattcatcctggccacttacatgtcacagaattgaacgttggagcccgatgagggtgggaggtggtgagtccagggctccttcacccatgctgggcctcggctgcccaaggatcccccttagaagggtgaggggaactcacttttcaagtaggtgaataatttaataacacaagtgagctgtgtcttgtctttgttttaacaaggaagcaggattaaaagatttttctagaaggtcttttggaggcaagaactgcctgtcctgtctgccagcacttaggactccatatttacttgttgaatttgtcatttaatagaatccttcagttcactttcttgtctcctgtttttcttagtgtgtgttgaggcttagctctaagaatattactaatttaaagttccttagcagcctcttcacggtttatttttgaaacgaggtcttgctctattgtccaggctgcagtgacctcctgggctcaagtgatcctcccaccccagcctcatgagtagctgggactacaggcacgtgccacctgtagacggggtttcaccatgctgtgcaggctgatcctgaactcctgggttcaaagtgctgggattacaggcgtgagccaccgcacccaacccacaatttattttttaaacaacttgcctctggtttcttagtttctcagaaatttctctttcaaatatttatcaagagaaaataatcttaaaaggccttaatacttcttcctatttgaaaagaaaatcattttcattaaaaaaaatttggaaaatatagaaaaataggaagaaataaaagcccactcataatctaccagtttcaccaaatatttgctgcatgcctgagatatatgtagatattttaatacatatctgtgcatatttctgtattcttttcagttctttttaaaatgctatttttaagttgagatcacaagaatgatttaggctttttaaaattttttattattattattatttttgagatggagtctcactctgtcgcccaggctggagtgcagtggtgcaatcttggctcactgtaacttttgcctcctgggttcaagtgattcttctgcctcagcttcccaagtagctggaattacagttgcgtgacaccacacctggctaattttttgtatttttagtagagacggggtttcaccatgttggtcaggctggtctcgaactcctgacctcaggtgatccacgtcagcctcccaaagtgctgggattacaggtgtgagccaccgtgcctgaccccggcctattttaaaaagtattttaacatacgtctttccacatgtcatcaaaatactctgcaaatatgaatgtgaactactgtgcaccacccccggtgagcctcccatggtttatgattacagctctcctctgttaagaatgactgtgtcctaatgtgaccaacagtgtgcactctgggtttgacttctgtttccaccactttcaggctgtgtgaccttaggcaagttacttcccctcgctgtgcctccaggtcctcacccatttcatggggataataatagcacttttctcacgggttgattttgaattcattcagccactggatataaagcaccaagcaagaactcagtaaatcttagctattattatctttgcctaaatctctccagattattcccttagtctagatgccctgagtgaaatcaccaggtccaaggtagaattttttttactgttcttgatagaaatgaatcaaagtatgtgagcagaaataaaaagtcatttccttgccctcgaccttgcctgcaccttccatgccagcccgccacctcctctcctcttttggagccccaccccctgcccttcctctcgacctgctgtgtgtgcctgcgtgtgtgaaggtgcccgcatcttcttcctggtcaggggccagatctcacatggaatgggggggtgagggggaaggagggtgggtggcagagggagtaaataaaataggcaacccaacctgtctccttccaaggtttgggacctgtcctgagtgaagtcgaccctgggggactgtccctcatctgtccctaaagctctcagactgggaagtatgagggctgtgtgccaggccacatctcacatgccctgcacggggtcccctctccgtgtccactcctgggggrgtggaggggagcaagtggggagctatctgggcccccaggctgcggtagaggatgggtaagggtgtttggttagggtgacaataatcctgatttctaaaccctacatcagaacatttaccctatcaaagtattgcctcacttatgaatgtattcatatgaaattccaataaaggcttaagccttaactcaggtttaatccaatgtttgagaaatcactatattttcaaaatgagagtgaaactgcccaaattaggatgccctgggcaacctggggtgggtggtttccgcagctgggcctgaagcaggcagcctgcaagtctagaaatgggggcgatctaagtgccttgcttttgtgcgcatacctgtcttctcccggcagaccctcaatgtcacccccaccccctggcaacatgggagagctgaaagaaaacctctgagggctgcaaaatatggaaaaaaaaaaaaagttgaaattgacaaatgtttaatgaaatgccttcagaaagtagcatgtcaacttcaatatttgttaagtcacatgccattatatttgaaaacaatttgtaagttggatttttgacaagagttccagaatatgcaatatgattaaagagaaagcatagccaatagtaaattaaatgagttactcatagtcaagtaatttcaaaagcaaatttataaaaacccctttaaagcaaagcagttatatttaatgagggggtgtgggtgcattttaaatgcaagtgagtgtggggcctccaagaatcagatgcagggtctataaaggacttacttaaaatggctcagccccgcagtcccactctgggccaggggggttggctcagattttggtcttgccgtcaccttcaactctcctgcctccctaaatagtctgggcagatttggagcagctactgctgccactggcatcttctctgaatctgtgcaacagatatgcacagctggaatttctgtctcccctttgcagatgagagactgacctgggtttaaacctgagtgttctgtttattagctgggcaagtcagccctcctccctgacttcccaggcctggaggagatatgcaaaggggagtggctaccaatccattcccaccagggtcccaagctactgctggggtatgctggtgtgtctactacgcatttgccatggtggggtaaaatacctatgagcacctggcattgggctgaactctttgtaagtgtgaatgtacttccagctcctagaactctgcatgatatctatcaccatattccctcgcgtcaacagggagaatgaggttcgggaggttatgtaacttatccaggatgactcagctaatgagtgccagagctgggatttgaccccagaactgtcaggctgcaaagtctttgttcctcctactctatcatggtccctggggtacgtgtctggttgagggggtccctctaggggtggggtgctcagggaagggacagggtcaggctctgatgagcagaaggatcagtgcgggtgagtctagaggcagaagggtcatggaggaggctcctgccacatcccgggtgtgattgacaaggacctggctggtggcagtgtgggtggagaggagcttttgtggggaggctgctaagaccagtagttaagacagaggtggcagaggtggccacaggattgtgattggctggcacagcctgatatgagatcgagaatgtgaatgctctgaggcggctattagcctgacccctcccggttaccttatacccatcccagtccatacactgccagagaggtactgggtttgtgatccccgggctctatcccacggcacagctgtcacttattagccataagatcctgaaaatttctaggaactctgagctttagttctctgatctatcaaatgaggatatcggggtccacgtgtattggtttgctatggagattaaatgctgtttataaggcagagttcaacgacaggggacttgaacaactatggagctaggtcagaaactccactgcggggacagagaagggtgggctaattcctttttggagaaaatagcaataataccatgcttgctttgtgctttataattttccacatttggtttttgcaacagccttttgagttggtcaagagtgtgattattcctcccagcagcctcaaatccttttggaaccaggtgtgagctaaacaaaagttataaaatgttacaagtccataatggataatggtactgaaagtcagagagtcccatactttgcctggtcacagggataggaggtggagagtggagtgaggacctggtgctggactcccagcccagtgctcttattttgagctccctttgggacctgctggagatttgagtcagagcctggccagggggctaattgggggtgggaggatggctccaggtgaccgtgaagctgaggtggggatggcgagggtggaacagggtgtgaggcctgggccttgatggggtcactaagactggttttttatttatttatttatttttgagatagagttttactcttgttgcccaggctggagggcaatggcgcgatctctgctcaccgcaacctctgcctcccgggttcaagcgattctcctgcctcagcctcccaagtagctgggattacaggcatgcgccaccacgctcagttaattttgtatttttagtagacatgggtttctccctgttggtcaggctggtctcgaactcccaacctcaggtgatctgcctgcctcagcctcccaaagtgctgagattacaggcgtgagccaccgtgcctggccaagactttcaaaggcaagtgcccatgtg

SEQ ID NO: 95966 - DNA, 63832 bp, Homo sapiens
  misc_feature (1)...(63832): n = A,T,C or G
agataaacctctgggaggagtctgtgccatttttaccaaaacaatgccccctgtcagcaggaagcagttaaaaccggtcatcgtccatattctaacagcagttagttgtacctcttcagaggggataaatgatatggaagtgctgagaagggaagagcgtggtccctgtaaatgatacagaaaggggaaagggaagtgctgggtagaggagggtgtgatccctagctagggctttaccctcacagacctaggtgaggacaggcatttcctgccaaatgttgcatttcccaagaccaccgtagcctgccatgcccccatcctgtacctataaaaacctccaagaccccagcaggcagacacagaggcagctggactcaaggggagcacatcagtagaaaaacacataggaggctgaaggttgagaggaacacaccaaaaggcaccagcacactggcaggccaccatctggcagaagtagaacgtcgcagagtttggctggggcagttgaggggagcccaggccgctgagtggcctgattccaggggaaaacctttccactccatccccttctgacttcccctgagctacctccactcaatataaagcttgcactcattctccaagcccaggtgtgatccgattcttccagtataccaagtcaagaacctgggatacagaaagccctctgtccttgagacaatgtagagggtctaactgagcttgttaacacaagccacctatagacagcaaaactaaaagatcaccctgtaacacacgcccactgaggcttcagaagctgtaaacatccacccctagacactgccgtgggtcggagccccacagcctgcccatctgcaggctcccctagaggtttgagcagtggggcactgaagaagcgagccacacccccatactgcccaaggtaatttacagattcaatgccatccccatcaagctaccaatgactttcttcacagaattggaaaaaactactttaaagttcatatggaaccaaaaaagagcccgcatcgccaagtcaatcctaagccaaaagaacaaagctggaggcatcaccctacctgacttcaaacaatactacaaggctacagtaaccaaaacagcatggtactggtaccaaaacagagatatagatcaatggaacagaacagagccctcagaaataatgccacatatctacaactatctgatctttgacaaacctgagaaaaacaagcaatggggaaagtattccctatttaataaatggtgctgggaaaactggctagccatatgtagaaagctgaaactgggttccttccttacaccttatacaaaaatcaattcaagatggattaaagacttaaacgttagacctaaaaccataaaaaccctagaagaaaacctaggcattaccattcaggacatacgcatgggcaaggacttcatgtctaaaacaccaaaagcaatggcaacaaaagccaaaattgacaaacggtatctaattaaactaaagagcttctgcacagcaaaagaaactaccattagagtgaacaggcaacctacaaaatgggagaaaattttcgcaacctactcatccgacaaagggctaatatccagaatctacaatgaactcaaacaaatttacaagaaaaaaacaaacaaccccatcaaaaagtgggtgaaggacatgaacagacacttgtcaaaagaagacatttatgcagccaaaaaacacatgaaaaaatgctcaccatcactggccatcagagaaatgcaaatcaaaaccacaatgagataccatctcacaccagttagaatggcaatcattaaaaagtcaggaaacaacaggtgatggagaggatgtggagaaataggaacacttttgcactgttggtgggactgtaaactagttcaaccattgtggaagtcagtgtggtgattcctcagggatctagaactagaaataccatttgacccagccatcccattactgggtatatactcaaaggactataaatcttgctgctataaagacacatgcacatgtatgtttattgtggcattattcacaatagcaaagacttggaaccaacccaaatgtccaacagtgatagactggattaagaaaatgtggcacacatacaccatggaatactatgcagccataaaaaatgatgagttcatgtcctttgtagggacatggatgaaattggaaatcatcattctcagtaaactatcgcaagaacaaaaaaccaaacaccgcatattctcactcataggtgggaattgaacaatgcgaacacatggacacaggaaggagaacatcacactctggggactgttgtggggtggggggaggggggagggatagcattggtagatatacctaatgctagatgacgagttagtgggtgcagcgcaccagcatgacacatgtatacatatgtaaccaacctgcacattgtgcacatgtaccctaaaacttaaagtataataataaataaataaataaataaataaataaataaagtaaaataaaacaattacaatctagcctttgaggtaaaagtactgtttttcacaaaaacatttgcaggtaactgtttttgaaaagactttaagctatggaaggagtacttgaaaaatgaatgttccaaaacttatctattgatacgtgactttcattttttgccaaaactgctatgtagaaaagtttttatatgtgaaaacttaaaaaccagaattttaattgaattggtgaaagtgattaggaaattattatcaagatttagtgaacttagccataattttttttctattttaggcttactactatttttgaaataaaaagctacgacagtatccttttaataaactttcctgctaaatcagcctatcagtttcagttaaatggctgaaagtcttgcttaaagtctcagttaaatggctagctattatatagtgtttatatgtatgtgtgtatatatatatatatatatatatatatatatatatatatatatatatgtaactaaatttttcctttataaattgtgcattctttgaagactagcaccgcaccatctcttctttaatttttatataagcgtagtgggctggagtcacatattgggcacataaacatgccaggctggtgctagtgtgttacagtctatccttagaacaaacttctgacatgataccagaatctttccattttacaactgatgtatttgaggtgatttttcaaagcacagcaattaagaaatagtattgagatgtgaactcagacagcctgaactcagagtctctgtgcttaaccataccccacactgccaggttaagagcatctaacactttaaattacacaaagcaggctcattattgatacaaatgagcaaacaagtaaaggaacagaacaacaattccagggtttctcactaaactaaaattattgtcattttctttgaaaaagacattattgctatgcatggtcgttaaattgtagtggcagctcatattgttactacttcttaaaaactcaaatgaaaagttgcataacaatgggaaaatacatagttcagcaggatctcctgcctcaaaagagaaaggaaaaagaaacttacatttgggaactggtgaaaaggattaaaatgaaacctagtagaagaaacttgacagaggaaaacaattaattactcaagtgaaaaacagaaaataaactaaatcatgatgcaaaaaatatagatgaaaaaaggatacattgtgagagattgtgtcttggcttttgtttccttaacctcctttctccaaaaagggtcccatcaagactatgggagattcctaaaaaagaagtcccttccacccacacctaatcctcatcactcagacctcatccagcagagagactcctacttgtgagaaaatatgaattgttattgttgggtattatgtgatgctaatagggttagaggaggatgactatttgggaaatcaacctgtgaaactgtaatatacattattatgtagatttactatggtcttcagggcatttatcctcacctgcacattgcatattttttagtcattacttaccatctatcttcccactcccattagaatgtgaactccataaaagtaggagctttgttaattttattaactgcacctagatcagtgctggtcatgtaatagatacttaataaacatattttaaatgactagatgatacaatgaatgatataatttgaatgccaaatatttaaatatctttggtttaaatgtttattatttgagaacaggtcaaataccaaacatttgatcctttctcttccagagcaacaattaagtggtatgaagaaaataacattaactggttccccatattcagtcagcaaccccttctcattcccccatgtttgaaaccaagaaacagaaggataagtgccaggaaaaagaatgttttttggtttgttagtttgtgctttaacatgttgaataaaacccactggcagctgggggataggagtatgtttttgcaacagccttaaaagatattttcatagacccaatacttaaaattaataatttgagtgcttttgtagaaacatctaattggattatcctctatctgggtacaaggtcatctcccaaaattaagtgaaaaaggagtagggttctgtgaagaaacagaaaagaacagtataaatcaggcctacctgcaagcccaaggtttcatttacttcaactttcagtgtatttaacattatgccagctgctatggtcaactcaaatacaactcccaggagagatgtcatcaagagcccaccagttgtgagtagtgtactagttactatgtaaatatatcccttcttcaagcagcttacaatccttcaggggtagaaaaagccttgctacataagataattagagaataaaataagacatgttaccataaagtgctcatttggatattttgtatgcccctagtaaacactcaccaagactctgtacttctattatcctgttcaaagcactatcaggttttcctggcctacacagactttattgaatgtactttgctaacagattatttttcctaaatatgtctctttgataacctaaatgatctctccatcctttatataattctggaccatgagattctagttatggtgcgtatgtgcctaccacccacagtcacatgtggctacagaatgccttcagaatgagtagtaaccttaaggactcacatttatgtggcttctgtaccaaaatgaagctgccatttttcagtgtgaatatgttttttttctctcatgacatagacaaatgttgatgtttactacaagttggtacattagttgctaattaagttcctagctgctccagccaaaacttgctgtattgaatccaagaaaagaatggcagctatatcaaaaataagttgttgggggatttttttgttttgttttattaaaggaaagttgtatattaaagaatatagggaacttacaagctgggatctaggaaactttaagtcttggcttccttctaagctgagttggtggttcaagtccatccacatctgttaccaggtcctggtcaaagctgcataaataccagcaatctaaatatgaggcagtaaagttaactgtttattgttactcactttttcgaacccacctccaaattcccagggaaacaagttagtgtttgggaacccacaggaggtcaggtttattttaggaaggacttcctcctgtcttctccacatctctgcaaagatgtcttctgagcttcatctctcacctgtccctcgcagtctcaccaccctcagccaggcctgcctacattcaccagccgagggtaactccctgttcacgtccgggtctgtggcagtttctgttcacttcccctttggaaagtcccaaatcacatgcttttatgccctgcacattttggcctacaaaggaccttattgttaaggcagaacctgctgggaaaacaaaatatccgccggaggagctttgctagagcgttggtcttggtgtcagagagaattcgctttccttttctgtttcccgcggtgtccttaaccaaaggcctcctctcttcacccgccccgaccaaaaggtggcgtctccctgaggaaactccctccccgccaggcagattacgtttacaaagtcctgagaagagaatcgaaacagaaaccaaagtcaggcaaactctgtaagaactgcctgacagaaagctggactcaaagctcctacccgagtgtgcagcaggatcgccccggtccgggaccccaggcgcacaccgcagagtccaaagtgccgcgcctgccggccgcacctgcctgccgcggccccgcgcgccgccccgctgcccacctgcccgcctgcccacctgcccaggtgcgagtgcagccccgcgcgccggcctgagagccctgtggacaacctcgtcattgtcaggcacagagcggtagaccctgcttctctaagtgggcagcggacagcggcacgcacatttcacctgtcccgcagacaacagcaccatctgcttgggagaaccctctcccttctctgagaaagaaagatgtcgaatgggtattccacagacgagaatttccgctatctcatctcgtgcttcagggccagggtgaaaatgtacatccaggtggagcctgtgctggactacctgacctttctgcctgcagaggtgaaggagcagattcagaggacagtcgccacctccgggaacatgcaggcagttgaactgctgctgagcaccttggagaagggagtctggcaccttggttggactcgggaattcgtggaggccctccggagaaccggcagccctctggccgcccgctacatgaaccctgagctcacggacttgccctctccatcgtttgagaacgctcatgatgaatatctccaactgctgaacctccttcagcccactctggtggacaagcttctagttagagacgtcttggataagtgcatggaggaggaactgttgacaattgaagacagaaaccgggtaggtgtctgttcagatggagctagccttttaggcagattttgcaaagcaggcttccttgtgcgtttgcccctttccaaatgtgcttgacctctttgggcaaatctagtttcttcctttgagaagacaacatctaggcactttaagacaattttaaaaatttaaacacaaaagaactacttttctaatgttttcactgaagtaaaaaggagttaactctagaatcgtaatgtgtattaacaggtaacttttattgaacacttactatgtgcagttggtatcattttcaaaatgtattactacagttcatgttcagagtaacccactgaggctcctaatgttattaactccattttacagatgagaaacctgaggcaggttaaataatttgtccaaggtctcccaggaaaaacagtggcagagctaagaatttagcttgtgatagtgttgaatgtttttcttatttaatgtagttccatggagcaggggttagtaaactacggcccatgggctaaatcaagcctgctactgtttttttcaggcccacaggctaagaatggtcttcagatttttcaatttttaattttcagtgttcataaagttttattggaacacagtcatgctcgtttgtttacatattgcttgtggctgcttttctactccaaaggcaattggatggagactgtgtgcccttaaagccaaaaatatttattatctggcattttagagaaaaagttttccaatctttgccctacattacactttgtgccatttagtcttagcccaaatgggtaaattgcaatcacacacacacacacacacacacacacacacacaccctttttctttaatcaaagtttcaacattctttgagaatcaaaatttagaaacaattcattgaaagaatgtgttgctagtttcagtttttcatgttagtgaagaaactcatttttcttaaggtagcattttgacagggcgaattttactgatgactttacattgaatgtgatatgaattattttttgataagtgaagatgtactgtgatgtgtataaatgctgacctgtttgaatgtgacttattcaggctcgtaagtcaaaagtcttgttttggaagacatgtagacaaataaagccatgactaaaagtcaaaggctttgtctacaccactctatgattttcacatggtttttttctctctctctcttttgggtcatccattgtttgtatattcatacaaacttctgggcatttgattgatttgctatagcctatgatgcaatttagtctttagtgaataaagttagtgatcttttgtagacttgacagacacagggcctgtccaaagacccaaacatgcatctaattttgatggccagttttcccaacaagtaaattactttgcactgttgtctgtaatgtttatgtcgttttgtgtattgagaaccagctagaacgcattatagtagtccagctggatatgacaaatgtgtacatcactgtggcagaatcttaatttggaagaaagtatgcagccttcaagccagctggagatggaagatggcatttccagccacagtagctgttagaagtccagaagcaacagagtccagtaacaccacaaagctgtttatgtttggtgggtatgatgtcccgattgccagcgaaacagcacttctccctatttactctaaatacttctgcctatcagcatcacttttgtcttgcctggattgaatttccgccagctagattttatccaagttcttgattctggcaagcttggaggcagctagcagtaatgcaagggatttgacacaaagaagatatagagtaacgggacttttgtgtactggtagcagttaaggccaaaacaacccaaattctccctctgattcacatttcaaaggagrccccaaaagactgagcagctataaatttgaggctctctaggaagcaatagtttctctgtgagagtgtggaataatttttgtgtgcatcatttacatgtattatcagttccaaaactaagatatggtggacaatgagacggaagcattamgtttggtagaataatctatattgaggtggtggtcattgacaaatgtttatcttacagcagcaaagtgtgataagactgtagaaggggaacacatggatttgaggtccatcttggcttcttactatatgcgttactttgggccaaattactgaagttccctgatgctacatttacctgtgaaaatggacatcataaaatttctcacagtattttagtcaacatcaaatcagaaatagtgtttatgaaaaagcttataaatcagagctatttgatatgataatggtgttgacttttgtaaccattcatctggttacatttctgtgtaaatttaagtttgagagattgaggtaaattccccatgtcgcaattgagatatacttcttaaagtccctagattatactgatttgaaaaagaaattacctctttcatcccagaacctaactaggattaggtatagggttggtgtttagtaagcattgattacttgattgatagactaattgaatttatttctgaaagtgtctggaataagcgttgaaaacacatgacgtattgaattgtgttgccaggcgttagagaatggatgaatgatgaaaataagatttccaaatttgcttttttgaaggcttaaaatagcatttaactaagtaatcaagacttctataaaatggtcttgtattttcattctttttctgtttccccatagacattttctacttgatctattattttaatttaggattcccaccccatttcctagcccctgcccgtaattacagcaggccttctgaaaatgactttatacataggtttgtgtccagcaagtacccaaaaacttattcattcattcactcattcattcagtttgaatttattgagtggcatctttgtgccggatgccatgctagtggtgaaaagataggagaaaaacacagagactgttttgtcctttcgtgaagttgtgttgtagtgttaattagtgttgataaaagaatgtctactgtaggccagtcatggtggcttacgcctgtaatcccagcactttgggaggccgaggagggtggctctcgaggtcaggagatggagaccatcctggctaacacggtaaaactccgtctctactaaaaatacaaaaaaattagctgggtgtggtggtgggagcctgtagtcccagttactcgggaggctgaggcaggagaatggcatgaacctgggaggcggagcttgcagtgagctgagatggcgccactgcactccaccctggtgacagagcgagactccatctaataagaaagagagaaagaaaaagaaagaaagaaagaaagaaagaaagaaagaaagaaagaaagaaagaaagaaagaaagaaagaaagaaagagaaagaaagaaagaaaggagggagggagggagggagggagggagggaaggaaggaagaaaggaaggaaggaaagaagaatgtctactgtatacaagggactattctaaatactagagtttcagcaataaatatatgccattttatcaatcattataataaagcaatccttaatggtaagggggtacccctgtactgccttgctcctcttttaggatgctaagttacaatttggcattgttacatcttagttataactaagttacaacttggcacacccatcaatttaggcagtcatgaactctgggaacgaaagtgatcatataaacatttccatagtgtcttaataatcaagctgaacagctaaagagagatgcatgtttcatccctggccagttcagaacacaatgcatctgtagtcctggagactccacacaccttccatttacacagaagaaccagagatgccatgactagtccacctaagaacagtccagttctcccaacatgaagttgagcacccaagtcaatctccccaggaacattgtattgtctggcaaattaggaaagataagaatttcatctgcaaaaaaaaaagtatgaataagaaattagctatgtcaatgtgacaataaatattcattgggttaagacattaactttttgtgggaaactggttctttaaaattcttttttaacatacaggttttgcctcctgatttacttttatctgagagttgaactctgctgggttaaaaaaatcaccattatatttaaatagctatctaaggttattataaagggaagaaaacattttcattaaactgtacaattgtgttggtaagccagtgctttatggaaatgtcattggtttcttcactgatttctgttggaaagaaaaaacatatcaaagaatttagaatatgaaagcattgagttgtattattaccaaattaattttatttcgtatttcataaattagttaacaatgtattaatagactacatagtgaaaacatccatccatttttaacttcacagagaaaacttcgagtgggggaggggcatgggtgagaattgttttatgacttgttgcagtctcaaatgtaaatattcacctcccacgaatttctgtaattgtgtttacatattgggatcaatatctttacaatgttttaggagaacatattaaatttttaaaattatataattgcttcaaagggagctgatgtactttccagcaccaaaactgagaagatttcttaaaaattcagcatcttgatgaggctgctaaaattgcacagatatatgtagttccacattcaaattgtaagaatatgtttaggaaataatgacatcatgatccttatatgcttggactcaataacggcaaagaaagcttgaaaaatatgattccacagtaaaagttgacttaatagaatagtggttgaagaaaattttgtggatagaatatgcttagggatttttaataacagcatttgttgcctcactggttctttttaaggaaatccttcctgattgcttcagtcaaatatatttaaagctgattaaaggatggggtaataaaatatgagaatggctgagttaaaagaagacactgaaaccagtcttatttacatctatagcaattacttgttaaattagcagatgataataaagatgttacaacatcagggaagccaaagaatttccattaggagactaagagagctagaaaaaaatggtaaaaaatgagcaaaaatctgcttagaaaatgttgtgggtgacatggactgaattcacttgaaatttactgagttcaaatagttatttttaaccacttcttgccagaaaatgaatttaaaattggagaaaattataagctataattatagttcaagaaggcaggattcagcctctaaattcaactgcctgggatcaaattctacttctgccacttactcactttgtgacctcagagaggtacctaaacatctctgtgcctcggatttctgatctgtaaatgagttaatattggtacctatttctgggctgctgggttaatatattcaagttccctagaacagcatgcttaactactagatgctaagacggaaatatcccttgggtagagaccatgctgtatgtgcttgtgcaggtgaggtgtttgtaacaataactcttcccaatcatccataatagttctaacactgaattagtgccagacattgttccaaaaatgttaacaaatttctgacataaaaggttatggaatatatttatagaactagaaaatacataaatttgtaggaaagaactaaacaatccaaatgatacatgtggaagattggcaaatgttgagaaggacctttgataatatcaaagtcaatatttcttatctgggaggctgatagaatcacatgagatgttttactttttctttaatatctgagttcctaacatagacaaaataaatcataatcttttaggggtgtttcctagacatcagtattttttaaggctttacggttgtttctaacatgcagctaagatatagaaactctgaaatttcttttcagctgccttgtaaccacatattgtaaccaaggtctagggagatgaagtaaattgcctaatgccacagaaagctaatgatgtcctgcctaacttctttcatgtctaaacatggcttgagttactctttcctccaaatccttattgctatattaggacctagggaaatgcactgtgacaatgattacacaaaagatccacatttaaaagaaatttactaatctaaaagagaaaataaaagaaggctaaagactctaatgaatggatataaaaataattctgccccatatttccaaaaaaaagatatamcaataaatttcccataacattaaaaaaacacaaatttgagaaaaattgattatagtaataatcaactatgcaaatattacataggaaaaaatataaatctgcagtagtaattacttatttcataatgataatcatgaagaaaggagataagaaatgtttgatttcccatttacagactccatagattgaaaaaatatagccagccctagatatacagaaagaaattggtgaaaatagacataacatggctgcagactaaagatactttctcttctatcctttattcaggaatggctgaggtaaaatttattttctaggtgtcaggtttgaataattcaatagcttttaaaaaaaatggttcatatttaaaaggacacttggtccagagatttttgttgttgttgttgttgttgtyccggagatttttttccctgccgacttcagaattgctacaggtaacattgctattttcttcaatgtttcaatgtaagcctttatttatacttatgcttaattgctcagtttttctaaagggtatttcctgtttaaggttattcagaagatgtttgatcttacttaattctaattttctcttacaacagattgctgctgcagaaaacaatggaaatgaatcaggtgtaagagagctactaaaaaggattgtgcagaaagaaaactggttctctgcatttctgaatgttcttcgtcaaacaggaaacaatgaacttgtccaagagttaacaggctctgattgctcagaaagcaatgcaggtatttgtaattttactgaggaagattcttcaaattctgcctagtgattgagaattcaataaagcagaaagacacaatgctaaacaccaagatttttagaatcaaaattttaagagtggarcatatgtgatagatcatctattttatcaccttaacaaatgaggaaattgatgcctgggaaaatatcaactgatcaaagaccatttttcatccaaccaacactctttctactaccttattttaaaaacaatatgactaccagaaattttatcaagattatgtaacattaaatatacacaaatacattggaagaaagtattttagtggttataaaaaatctgctgcatattcttctgaacatttttatacattttaagcaatgtattaagcatttgataaaaggattgttttgtcaatatatctcaaccttacctaatgtgagattttaaacagcattcaataatagtaataacataacattttatagctccttctcctacattatttgtaaatctcacttaaactgctatcttatttttcttttcgtagtatgcatcctatgtttccaaaaatatcatatgaaagacaaattgaaagttaactattaattaattataatcattgcagttttgttctggtgaccctaactaatgaaaactttgctgtaaaaagtggggtgctgctgtaacaaacacctaaacgtgtggaagtggctttggaactgggtaattgatagagactgtaagagttttgggtgaatggtagaaatatgggtgttcagggtgattctggtgaggtcacagagagaaatgagaaaaatgtcattggaaactggaagaaaggtgatccttgttataaaatgggataaaacttgatctcacaagtaatggatttggatatttggctgagaaaatttcttagcaaaatgctgaaggagcagcttgatttcccctaactgcttatagtaaaatgcaaaagaagagaaattaattgaaggagttgttatgcaaaaaggaaccaaaatttaaatatctggaaaattctcagcctatccatatggcaaaaaatgagaaattgtgttataaagagaacaaccaattgataacaagatcatgggtgctactgatggacttaatcagccatttcagcagaaggtaggagtagagatatattataccagcaaatacacttccagtttgaactgaaggagacagagaaagcaggacagaatgagaaaaggatactggactttctggattctacagaaccagaccatagagctatttggctgtgaatgtgtactattcttcagggaaaggaaagaatgcccccaaaagtgatacagaagtcatcagggttgccacttccaccacagacccagaggccaaggcagtttcctttttggtttcaaagggcaaaactgtctctctggttttagtgagccctcaggatgaccctgcctagtgtctcagaagcagagctatcctcacagaaagctgtgtggatggagcccttagagagagcaggctgtcttgcagagccctagaacctgccattccrtggacctggaaggcagagcatcaaaccaaacagagctattctcaagccttataagccttaagatgtgacagaatttaccttaataagttttggatttgcttgggacccatcacccttgctttctttcctatatctcctttttggaataagacgtccatcctatgcctgtcccaccattgtattatggaaaagaaacatgtagctcaactggtttcacaagttcacagctggtgatgaatttgccttatcatgaatcacacctctagtctcatctacgtctgatttggacaatgtttaggtgagacttttgactttagacttagagttcatgcttcagtgagttaaggcacttgggctgatgagatgagatgaatgtattttgtatgtagtaaagatatgaattttgggaagccaatggtaaaatgctacagatggaattttgtcctcctaatactcatatgttggaacctaatatgactctatctggagacagtgatagtaggagatagttaagattaaatgagccaggccaagcgtggtggctcacgcctgtaatcccagcactttgggaggccaagacgggtggatcacctgaggtcaggagtttgagaccagcctggccaacatggcgaaaccgcatctctactaagaatacaaaaattagctggggtggtggcatgcagctataatcccagctacttggaaggctgaggcagaagaatcacttgaaccaggaggctgaggttgcagtgagccgagatcatgccactgcactctggcctgggtgtcagagcaagactccgtctcaaaaaaaaaaaaaaaagattaaatgaatcataagaatggggccttaatctgatagaattgtggccttttaagaagaggaagaaagagaaaaagagaaacatctgtctctttctctctcttaaccgtgtgaggacgcagggagaacgtggccatctgcaaatcaaggagagagtcctcatcagacattgaccctgctgtcaccttgatcttggacttccagtgcccagaactgtgagaaaagaagtgtctgttgtttcagccactcagttgatggtgttttattatggcagcataaacagactactgtaggagcttagactctgggtcctgatacatatcggatcctgatgcttatcaaatccaggctccttccttgaatgtgtgacctttggccaggttctcgacttctctatgcctcagtttactcctcagtaaaatggagataataatattacttatcacctcagtaaaatggagacaataatattacttaccatctaggtttattttgagacttaaataacttaatgtatgtaaagtatttatattgtgagtgcaaaataaattaactattataatagtccctaatgtacttaatatctaactgcaaacattgccaagttttcttcttgtccaaagtcacaacagttttctttaggaaattttccatacaaagtggggcacattttcactgggttctttaagatgagataataaaaaatgatacgttagaaaattttccttatggcatcagtcttctctgacagattgcagcttcataaaggcaaaaactcttgattttctttttaacccacataagcccttaataaaatacccattacatgtagttgaagtaagaaaagctggaagtgaggaatggaggaaagaagaaaagaggggcacaaaatatttcattaaatgttttaaaaatccccagaaattcagaatacatgaatataggctgacattaaagcagatgtacgtctcgtgcagaacacacagtgaggaaacaaaatggcaagagcaaagctaaagaaaactaccaaatttgcattttcattaattcagccttaaatgtaactttgtgtcactgaataagtgacttacttcctaaacrtgacggtcagacaggaaatcacttttcttgtgattagcataatgcttatattgtttttttagctacagtctaatcattacaaagaactactcgttgtgtccatattaaaattaaaagtaccttgccataacaaaagcacattctaagcctttcgaaatgtcaacatattaaaatrtattaaagcaatctctattgcgggctctccattttgttttcaaaataacaataacagctatttatattgtataaaatcttgcattgcaatacaatttacattctattcagaacttcaaagtatttaaatatattcaggcaatctctattaggaacctctagtttgttttcaaaataacaataacagttatgtatgctctacaaaaacttstatggcactatgatttgcattctaatactgttattcacagagattgagaatttatcacaagttgatggtcctcaagtggaagagcaacttctttcaaccacagttcagccaaatctggagaaggaggtctggggcatggagaataactcatcagaatcatcttttgcagattcttctgtagtttcaggtacttgaaacacatacgtactttaatacagtaattactacttccagaaaaaccaactgggcagaacctattaatcagagggagaaaatgtgggcattaaggttagtaaacatttatattaaaataatatttttagaggagattaaattaaaataattcttggccaaaatgctttctaaaactaatccaatatcgatgtgttataaatatgaacacaattgcatctaattttaatttataagaaatccatagtcattgtaagataagtataagaatgccttatatttcctggttttcaaagtacttataaatagatcagtcaatttaattcacccaaaaccctgaaaataaaatagattcattgctttttttctctggtttaaactgggatggctcagagaggttcaactgtgtcgtaaaaattaaaatcaaagctataaaaaggaagatgaacagatgctgaactagggttggcttgaattgcattaactaatcggtgaggactgaagactaccatgtccacctttttgatactgaaacagccctggcagaaacaaattatttaattattttttccctttctaatctgctcgtgataggagaatccacctctccccttctctgccaaaaggacttattctgttttcacaagaaatagttgcttaaagcctgtggtgtgctggtgaatgtaacaagtaactctggggaaaagaaaaagccctagtttgtagcatttgctagtctctgtggtttaaatattctcattcaggcttatttcaagcttccaacataagatcactgaacacaaagctgggaagagctgtgcagtggcacatctttatacagcattcccaccgtacagatgcaaaagacggagatagcctccagatcaaagatgatagttaaatgattaggtgatgagttttaaatacttacaacctttgcctgaaaataatttcttttatggtaagtttatacaatttaatttttgtaatggctgtggttaaaaactcagaaaattcctgaaaagttaccagttagctcctgtgagcccatataaactaactctagcacaccactgcaaagtttattatttttatttttttaatttcattttattttattttattttatttttggagatggaatctcactcagtcacacaggctggagtgcagtggcatgctcttggctcactgcatccttcacctcccgggttcaagtgattctcctgcctcagcctcccaagtagctgggattacaggcacccaccaccatgcccggctaatttttgtatttttagtagagacagggtttcaccatgttggccaggattgtcttgaactcctgacctcaggtgatcccccccactcggcctcccaaagtgctgggattacaggcatgagccactccgcctggccttgttattttgtacttagataagtaatatgcatgcattgcaagaaatctgtaatacacagaaacacacaaagaagtcaccaatattcccagaatgtggatattacacttaacatttgggtatgtgtgcttctgggctttttacatacctgaatgtgtatatatagtgtcatttctcttatgttcattaaatattcttctacagcctggtttttaatgactaaataatggtcccaccatttggatgcagtatgattaattgaccaattgttgaacatttaaataatgcctcgatagctctctttgtacttatgtcacagtttgctttttaaaaacatattatataattggaatttctgggtcaaatgatttatactattttaacacatttgatacttaatgtcaaatctcactccaggaacttgtaccaatttacatgttctccaagagtatgggatatgagtgcttatttccctgaattctcttctacgagaatgaataatattatcatgttcaatcttttcaatttggctgctattaaaaatggtatttcgttatttgaatttacattttcatatttctgctgaaaaagaatttcacaaattcattctctttgttttgttaattatcaatacttttaaaattcacttttctattagggtattcatcttctttttgctgacttatatgaactatctaagtatataagatatcaattcattgtcataaatagtaccaatttttttcacagttggcttgctttttagcctgtttgtggatttttctctttttctttttttgggggttctgggggcaggcggggacagggtcttgctctgtctctctgtcgcccaggctggagtacagtggcacaaacacagctcactgcagccttgacctcccaggcgcaagtgatcctcccacctcagtctcccaagtagctggcatcacgggcgtgcgccaccatacccagctaatttttgtattttttttagagaatgrggtttcaccatgttgtcaagacttgtctggaaactcctgggctcaaggaatcctcctgccttggcctcccaaagtgctgggattataggcttgagctgctgtttgttttttaatgtaatgcgattccacctttctcataaactctggtgctgctgctgctgctaatagcaaagcttatacaggatagttttttttgttgttgttgttgtttttcatttgagcagctgcaccttcctttagaaatcatgattctataggaatgccaaaattcactatctgagtgtggagttttcatgttttaataaatgtcctttacaagctactcgacatctctatgagttactggccattttctgtaaatccacactagaaagaagggaagatggagctactgctgagagatgaccctgcatcttaaatgagggtttatcatcaaagattaccagactaatgcattgcattagcttgtagttaatctgctctgaacttctagtgaacaaaattaaaggcaaagttttaaatttttttaaatttttacttcttagtataaaacttaaagatgtatcttgtgaaaaaaattttaataatgatattaggggacagaaaagctttttatttttttttttcctcttgggttccttcctctctatctccctccttcccttcccttcctttcaccctaacttccttccctctcttcctttcacttctttcatttaacaactattttccaaactcctatcatgtgccaggcaccttgttgtatactgtgaactcaggaacataacagaaatggcttcatggccatggagcctaatatgactctatctggagattgtgatggtaagagataattaagagtaaatgagtcaggccaggcgtggtggctcacacctgtaatcccaggactttgggaggacgaggcgggtggatcacctgaggccaggagttcaagaccagcctgaccaccatggtgaagccctatctgtattaaaaatacaaaaacttagccgagcatggtggcagatgcctgtaatcccagctacttggaaggctgaggcaggggaatcacttgaacccaagaggcagaggttgcagtgagccaagattgcaccattgcactccagcctgagcaataagaacaaaaaaactccgtctcaaaaaaaaagaaatgacttcagcccccatggagctttccactgagggaggtgtcggcccagcagtagtaactgtatagctacacttttagtaagtgccatgaaagagtagtacagagtattaaaatatataatagtctgagagcatgtaagagtatacagtaaactgcacagtaatccgaggatccatccaattcacaaacatcttaatggtcttctagtccataggttctttatgatatctggatttctcatgtggatttgaaagcaggttagtttaatccattctggccctttccagagcactagcaaagagtcacttatttatgaaaatgtagtgtgtttgcttcagacctttgctttagactgctgctgtcattccaggtatctgtttgtttccttgttatcttaaggactaagaattactgatattaataacttataaagtaccattagtccagagaaattattgagttcttttgattgaagtttttgttgcagaatttactatggaagggttttgcctgcataggcattttctgacagaagtaacaatcaaggtaaatgtgaaagtgctccatagcttctaatatgcatttgtgtagttttgttttgtgtatcttcttgatattgataatgtttagtctttattttgaattccattatattaggttaaagtttcaaatagttgccaagatagcactgaaaaaaacttgtcacaaagtctgtaaatatgatttttatgtgtataaagaaaagactcaaattatttgtaattttaaattaagatatttataattattatttctgaaccagtttatcaaatattttctcagtgcatagtagtcttagtgcatgcaaatattaattatttatagctttaatgcaaagattatgtgtgtgtgtgtgttttagcaccttttaccccttaacacatctgatggataagacacactaccatcagtaacagtggcccaccttgaaactaattttaaacacatatccctttggcactagaggtgacatatcagagttctctagtggattgttctagagagtgatttcatcatatctccaaacttgcgggttgatatgtgtcctttttcctcctcccacctatgtttacaaatcaattgcttctcattaaaaaagtggttagtaattgatatatcaattttttatttgcccttttccaaattaccaaaacaatttctaaacaaaatttgaacagttctcagactattaatggcaatttaatgctggatgctatagttctgctttctgaagtcactggtcgtcttataacaaaagataactgcaaaactttggtgtttctctagatcagatttccctaggaaacatcagagagacactaagcctgctttcattttctattaaaagcattttaattatagcaaataattgacttctatatagcaaatattttacttctaaaagcgaacagttaaattagttgtgcagtcagtctttgtctgctactgctgctttgtcaaaacaagtgaatagttacttcacattaaccttttttcattatactattttaggaattaatgcattacaataaaatcaaaggaaattaagtgacatttaaaactaagtcaactttattgcatttggtataaacttttatgcagaatggagcagaaaatccccccaaacttctttaatcattgtgttacagctgccctattgtgaaaactagaaaatgcaaatgcctcagattggccagcagagggcgcctttacatttataaagccaatggaatttcactgtttcagcgtgaaagattataatgtaactgtagagtgtgccatgtgtgaatatacagtgcgcatgactgtgattgcatgtgtatattttgatttatatattcgttcacgtgaagattttaaaattccaccccagctaatgagcttaccaacctgcttgttttcagactttaataccttctttctcatatttccccatatgttccactccttaggtttatccggtgacattatgctttggaatatattgtggatatattttgcatagatcatgttctgtaggaggggtttaaaaattgacctttacaaaacagccttcttctccctggtccaatctgttatagcactttttttgttgttgttttgttttgcctttttatagactaaagtccaatcttagatttggtctatactaatttctgtaaaagtgccacaaaatttatccttgcacttgaggaccagaataatgttctgtagcactaacctctagaaatctagagatttttagaatctctagaaataaaaccatagcatttgaaacctaagtggaaaaaaataattgatacagtagtttacaataagactgtttcagaatcattcatgctatatcaggactggtttgaagtaagagcactcctttactttttaatttttctaaacttagttatcattaattattgagaactagcagtactactgaggcaatccaaaagacacatattaatttgagctgagagaaagagagagatgctgatgctgacactgatattggtacttgttaaaggattatgtaagtttgtattttatttgaaacctagcatgaggtatctgggtcagttatatggcttacagttgcataatagtcctaggaggattaccattcatacctcaggaatggggacataaatattatgacagaaagacagaaagaaatctccccagtgtgcagttaatacatgttggatttattttcatgatatctgtttatgactacaaacataaagctgtttttttagcagagttttaacaaaagcagtgattttaattttgactatcagatcttcccttcacaattttaggatgtgaatgaggtcagaagccagagaaataggaagaaggaggtgagttggtcagataatacagtatcattgagagaaccaagcactgaggaattgcgttcactctcaaaaagtttatactctaatgaaggaaaacaagtgacatgcctccacaaagaaactgtaatctagccatggtaaaagagatgcaagatctatattacaggatgaagagagaagatctgtaaaagaaggaagactgacgagagaaagcttaccagatgaggaatatcagatatttcatctgagccttgagagcactatgctggatttgtaaatagaagtggcaggcaacatttcaggtttcagaggcatcatgagcaaaagcacaagcacaagagagctcaaaatgtgttcagaggaacagtctgatgagagaggagcatttgtggaggagggcggtaggatttaagacttctaagatcagtgaaagttaacgagtttctctaacagtaatttttacaatgctttttctcacacacacacacttttaaaagtacaccatttatcatttggataattatacaatgccagcacaatgcatgtgtgtacaagcatcatctcagatgatgattgtaggaaagtccttaggtagaggaatatatctagcagagcgctggaactggatcttactggcttgtaagaccccagtgtgcacatctctttccagctccacacaggacatcatgctggaaattggccacggtgtgaatatttacaccatggaaattgacaaaccttttaaaaatcctgtctccccccaccaaagggccagttgttgaacatttacctgggcacccttagtgtattcgtatctccctccattctttcatgtctgcttaagtttgcttaactcctacagcctttcctgaaaagtgcttaccagccaaagaggtttctaattcacattctaccttgccgtctccaaaccttgttattgccaagatttacttcccatgtggttacctggcttctcactattaactgactctactctaggactttttgcctccattactgactggcagtgaatgaatgggtcattctggtgtgtgttgttatccttgcaacctgtgctttaataactacctctctttattagaacctaagtgcaaaggctaaagggcatagatgatacaatctaagccaacctcattacacacaattcaaatttaattctgttagaaacatttcagcagtagaaattctataaacaggagcagaggagctccatggatagccatgtgggcctgtggctctaggagagtgatttttctcgttggggaactcatttcctagaagcttggatccaggagagaatatgcaaggtgggtggaggtggcttctctccattctgtgggaacacatgttccctggcacggagaggaaaatctgacagaccaaaatgtgagtgtgtgtgtgtgtgtgtgygcgcgcgcgcgtgcgtgtgtgtgtagatccatatacatagagctgaaaataaaagtgatctatttcctctcaaaaaagattaagttatttcaaaaggaaaggaaatatatattattagcagtatgagtgtaagcccacttgagaagcccatgcagtctttgtgtgtgtgcccaaacgtgcacacatgtttcaagctttcggggtagcttggaccttccaggmgtgaggattatgaaactggagggaaggtggggatagctgcaaaggtgaagctaaaatgcatcacaaggtcagaactagaataaacatgaaattaccatgaaaagtgaaattggactaaagaccttgtcaccactgactcgcaggagaacaggagcagttggtgctgttctttctcaatatgcacagaggccctttcccctcgcgtttcctgctgtaatgcaaaaccacttttcgggaaaaatagtgtgtggcagactgaagccaggggaaagaaacgaaagatattctgtggggtgataaatgcctctaggccaaaaatagaagaggtactacctggtaggaatagaagcaagaatcaatttgaattttacctaatggagcttagctctttgaataaagaatgcctacttgtccactacttgccatgttagctttttccagcagagggcagactttacattgaaatagatctaaaaaggccttcaacctcttgctttatttatttattttttttggtttgaatattttaaagttcaatatttttggtttctaaatgatttaaaaatattttaaagtatttaaggtctagagtatgttaaataagaaatttcttggatttcagttaatatttctgccttattagcaaaatactcaagatgtgattgcaaaataaggctttttttttccatggcttttgggctggtcttaggcacttgttgtcattgtaggcaaggctgttcttttttgtgttgtttacaaaattatgaaagaaaatcctatctcttaactggatggttataattttcattcattccaatagcttttgatataaataactgcttttctttaacagttcaattactaccatcttctaatctgtttcatagttagctttgatattttccctagaggaaatgacacctatataaaacttaactaaacttattatacaatataacttcaatattcaaagcccttttaatgagaatttaaaatttgtttctcttcgagtttcattttcttggtctaaccgaatcattctcacaataagtgagaaaatagagactactatctctctctatatattttttaaaacagaaggttaatttgcttgtaagtcgtggctacgttcgatctggagacttatctgttggactccaaagcacaaatttttttcatagcaaggcctgcctccaattaactccatgcgatctacttataaaatcataaacgcaggactttattcattaggacttaaatccagactgacatagtttgaaaaatacaaagaacaaaacaagataaacctaaataaatcaatttcagaaattcttggcatttaaactcaataggtcggtttaattttggcttcacgcaaacactttcttgatctcacttttttgggagtgtgtgtgtgtttgtgtgtaatacggtttttaaagtgaatgcaggaggaagatctctggggaaggcattctccctattataagaaatacaatatattttcttttattattaaattttacttatatttctatgaaagcaaaaacgtatatcaaaatgcataagaatttgctgcctaggaaacaaaattatttttatgtggagaaactgaagatttatatacccttaaaatgacaaagaaatcgagctccatatattcactttcattttcataataatctctacaggattactgcaattaattttatgtaacgagaacagaggtgttctttttatttgagtgcagaaaaaagtttaaaaagaggtgtggacacttaaatgtaaagttagtgaaaatctatcaatgaaaccagaaatgttagcaaagcaaaatcatctctctaagttcttttcttggaaagataagctctgtttcaagatggatagaaatgtgacaatacaatgaaaatgtctcttgctgttgaaaaacaccaccaccacagctcttaattcagttaacactgtgtttacaaaacttcacccaaatcatcagccatgcttagtgttagcggaaaaagcactggaacactggacttggattcagaaatgaggattctgccccactgtagctgtgtgatctggatatatcagttaacctctcagcgccttggtttctcacctatgaaacaggagataatatgtatctaccacacagaatgttgagagattaaaatgaaatttacattacatctgtgaaaactctgagttcagtgtcttcctgacacattggtgattggtttgttagatcaaaataatccagataatagactttattaataataccctattttgggtagcaacttttaaaacaattcatcaattattcgtgcacattgcataaatagctccctcccaaaacttacggatgttagaacaaagcttgggagaaatcttgactctacatgtagatgaagtaggtttaagattaaagtttaactgctagtgattagaaaatgaagtggaaatcaaatataattttcatttttattatacttggaaaatttaatgatacagtcttagattttagatatttgttagtattttttcagtaattttggtattctcttcagttctcaatattacatttaaaacagcaaatgaaaagcatgtcaaaattcacttttttgcctcaaaaatcttagcctatatttctagatctagaattactcttgcaatgacattttccccatctcattttacaccttgccttttccttacaaatcatattctcttttcatcagtacatctgcccaaaacgctcttctacttgacagttctatcccacactcgcctctgagcttctaacaagacatacctctgggaattgcgaggtgccatattttaaatctctcagtgagatatacaggttttcccgtgtgatcataagggattcctcaaatctgagttttagaactaatctgcgacaactgataagcacagtattttcacattagtatatttatgttgtgctaatatacttaaacagtatgtatgtccattgagaatttttctacaaatttcttatcagcttacttttaatttttaagaaagataycttacatatttgattggcattggctgtaattctgttatagctcttaaactaaataggctcatccaaattggatgggagatgtaaatgtcacagattctcagtggaatactagtcagcaataaaaaggaacaaattagtaatacacacaacaacgtagatgaatcacaattactataaactaagttttaaaagacagacataaaggctacmtattgcatgaatccattcatatgacatcctggaaaaggaaaaactattggaacagaaaccagatcagtggttgccactggttgtctgatgtggaacagaaaccagattagataaccagagggatttactacaaagaggcttgaggagacttttggggtgctggaaataccttaactgtgatggtagttgcgtaactgtatacatatgtcaacctcttcaaagttgcaaaactgtatacatttgtcaaacttctcaaactataaacataaaaagtaatctttttagtaagtaaattatatcttaatatagctgacttgaaaaaattaactacttaaggaaaaaggaaatatttgcagttttgagttgtatatcatctcttttcagagaagttttattaaaacatactatgtgtctattttttcatccatttttatttccagccrtaaatatgacactcagactagttttaaatagctaagagctacctcattggtgtgttaagaggctttaggatgaaatattatctaagtataaatattataaaatatttttaattaaaagaagaacattatctaatggaactcctatcctaagaatatatcatttcttgatttttatttcattttctaattgccagcaattaaagtcctgtgccaagagcttgttgtacctaatattacttaaagattatcaagggctgtgaagtaagtgggattagcctcactttaaaacaaggggaacttgttaggttcagagcaaagtgaatagcaaattttgcaagtccttctgattccaaagccaatattagtaaccaccattgctttatttttaccagtttaacgatagttctggtgcttgaggatgaggttgtgtaagtgtttggaaataaactgtaagaaaagaattcttctctgagggaaagaaggttttcaaaaagaattgatcctgagttctgaaaacagaatgtcaggattcataaatgaaggatgtgcactgctattcatccatattaaccataactctttgatagaggcttaatctaattatagtaaagaaaaacagttatttccaacctcacatgagcttctagtacaactgtgatgccaggctttagtgatattctttttgaacaaattctctttgagattttacatctatgtttatcaccaaactatcattttcataactgatcagtagatccaggtactttattaatttttgtactttattaattccctatcattttaaatgaaaagacctcaaaggtttctatgtattattttttgtttaaaagacatatcaaacctaaatagtgttttcttgggcaacatttacatgtagaagggcaataaaagttataaacccttaggaatttgctttagctctcatactggatgtgtagtactttaagtaggtaatatgtatttgaatcactacccagcagctgctcatccatagtggatttttcttaatgtagcctgccagaagcgcttaccttttattcataattgtctgggtgtgccttccccacttgaattgaactgtatgtactgtgtgctgtagaggtgtgcagttaaaatacgtttattctcagaaatattttaaaaatattttaaaatgttttcctttgcagaatcagacacaagtttggcagaaggaagtgtcagctgcttagatgaaagtmttggacataacagcaacatgggcagtgattcaggcaccatgggaagtgattcaggtactgcctaactgttgtgtaaaccttaaaaagtgtgaaataagacgccatatagtggaagcatgggggctgttcataccctccctaatgtatttatgcaattaaagcrattcttttctacagtgaaatagttttggaactttgccattcactttctttaaaagtgtaacttacaaastcttagaaccaaactctctaattttgatccagtacatatctttctggtctggcatatgccacattccatagagtcatgtcatctattttatttatgggatctgtttcaattaatttgactgcatttaaatagactgtattcaatttggtacatttatttacttccaaattctactttttaaattaaaatactttttaaataaaaaattgatactatcaataagagaagtatgactaactagaaattacatatgtaagtaaaagaagtcaagtttgtataagtatcttttgaataggagtagagttggcaaaatatttcggtcactaaatgaaaattttaccaggtttttcccaaattactttcaatatcagttgtatattccaccagcaataaatgagagtgcctcttcctaattccccacaccttaattaktacttcctgttatcagttttccaatttgttagtctgatagatttcaaattgtttctttcttttctttgagtgtatatttccatgatgactactaagctaaaatgttaacattattaaatgtaggtgatgggttagtgggtttctattacatacctttctatatttgcctacctgtttgaagtatttcacaattaaaatgaacaaatcacaaacaaaaataaaatgctttgcaaggggccagctaagaagcattggaaaaatgataaattaagaaacacattactttattcttcatttgtgattgagttgtttcccctaagaatatattatataattcagattatcctgcattgtcagaagaattataaaaattgatatccacaagaggcctaaggtggcaaaatagtttatagaaagattgtcatcaatcctaaatgctttccaaattagattgtagcacctcttttttcatatatccttttatcacaatgacactcctgaatcccttagaacaaattagtttgaggaaacccaattcaccaaatgtcattcacaactttaatcttcatttaaaagggtgaattcattttctgttcaattcagtcagtgtttattgagttcttgccatgtgcttatttctgtggattatatttgttttttctatccttgtcataaaattgttcaatttaataattaacatttctattacatgctatgctagractcaaaatagataatctagctaatatttaacatcattataggttgttttaagtttttggagatcatgctaattttcatttgtctaagtaagggcttttcaataatatccattcattcaataaatatttaatgtgtaccttctatgtgcagggcatcttgcctatttagagctgttaacaaatgtatttgctgatttttagtcctcaatgtggcatgaaacacatgataagtctgaacgcaatctacttttgaaaagcaaatacattttcaaaggcaaatacatatttgaagacaaacacatcagaacgaacaccacttgaagttctagakggatcagtacttaggagcaaagaattactttgcctagtgggtagtcaatttccgaaatggtaaaattatgaaattccttgcccacaagtgcctggtataagctaaaatagaaaccaattcaaaaggaggtttagataaattggtgaactgttaaacacatattgaggcactgaaaagtattatagaatttgcaattgtgttttaatctttgaagttgacatcaaaagggacttcattctatatgtccttcctcctcctccagaggtcatatatgggccataaggtgtgacccaaaacaatcatattatattcctttgtggaagtgttatgccatagtagacatgattaccggtacttttaaagtataaatattctaattatattatgagaggcttttttttttctgtttcccattttcagaaagatatattgcctctcaaaaagtggcaatgtttttggcaatacatattggcctgatatgtagaaagtgtttccttactatttcaagataatgcctattaatatttgtccagctggaatggtgtatttttctgtggttacataccataggtaaaggaatactttgtagatttcaaacacatgcagtgacagaccttttctctccaagaataactcagctgtcaaaatcaatgtgagaatgaaatttgccacatggtgtagttccaatagaatattattatttaagccttatttgattttcttttttgaccatttatatggtagaatataattttaaggtctttaatcaatacttgttgtagagggagggcacagtgttattcaaagcttgtgcatattttaactgctattttcatttaattgattatgcttttcagagaaagccaaaaacaaacaaacaacaaacaatcaaaaacccaaacatttcttttataaaggaaattggctcctggctcattgataccagcccagttctctccttctgctgacacagaagagaaaactctcttttcattgcttctgtggataaattcttccatccctgtgtcagaggatgtgataaggcaagaatcaggctgaatatttagcactcacccagcttttattctttggatgctagtctcacattgaatccaactctaattttttcctgtatccacactgtgcttctttttaaacttagggccacctatcaaatctcctagtcttaaatcaaaaatatggaagattattgagctatctgtctaaccaggyatttttgtgtgcataacagcggtatagtgtcctagactctaaagtccttcaggacaacaactatattattgagagtgcctggcatataataggtgtccagtcaatattgactgaagaataaatttgtggtacatgcctacttaagtagcagtaaaacctcatgacttcagttctgaagttaaattgtaaacacaatagtccttttaacattctcgctcttcttaaatgtatcagcttaataaatgattagaatgcatgagtaatattaatattttactcatttgatttggttctggattctcgggaaagagacttaggaaattgctatatctttctctttgtaatatttcttattcaaggatatagtagtaagcatgaaaaatgggggaaattattattaaaatgtactcttttaatagtttattctgcaactattatgaaggaaggagcattttattagtattcttaaaatctacgcaaaaatgaaactcagatgaaattaaacaaagaggatttattcctatattttaacaaacttcctagatcaaacaaaaatttagcagtagtaaatttctgggtctttgtttagacactttataatgcatcttcctttgcaaatatactggctcttttggaaaagttagatgacaaactatcctaatagaggtgaaatatcatggttttgatagtctatgaaagctacagagggctaacattgttcttaaataaatcagagccttacataaatataatacaagatgaactattgtaaataytgtagagttcaaaacaagcatggaaacttataaaggtatattttaaatgctggtgattttaaatgagtttttcataaaaatcatattgaatgaatcagcagatgatccaacgatagcttaaatgtattgcatctgtttttactcatccatacaaaaggcaaatttcctgccaggttagtagatgatcctaagtggtatttggtgtgaattttcctacctgttcagatagtactatcacaacaagttaaaactcactcaaatagaattatccaggggctgaaatggagccatcagcaagttttttgaagttaatgggattatgttagtttagttttattgcaaacattgataagaaaaagaagttatttcatgtgtgatgaaatatggataaatactgttatttcattttttcttctkattatataagtcataaaatgggcttttaaattggtataatatttatgttacttcatttcacattataagctatgcattttttgatctttttcccctggtaatataggtcaatatggtcacttctaaataaaatatattctatctaaaacaagayatattataataattttattttaatatacataaagtttatgttagaacttattttatcagtattttaaatttaaaatccatgttaattgaaaatatttttaatatattatactttggattttagaaaaagttggaatatgtggagccataaacataaggaagtaataaagataacaattcacaaataaatggcaaaagtagtcatgatttagtttaaaccaacaaaattatttttacctttcaaggaaaacctaccaattaaaggctagcataggaagagttttttcctctactctctaaataacacttctgtacaacgtagttgcctcagatggaaaaaggaacttgagatagatagggtgtctgtstgtgtgtgtgtgtgtgtgtgtgtgtgtgtgtgtgtgctttttggtatttggttgtcagataaagtttctacaaacgaaagaaaatagtatcagccataataccttctttgcaattaaaaaaaggggaaatacggaattgggaggactaatgattccaactttctcagctcctcttgattttgtaggtggaagggctaagtgaaacaagcagggcatagtggctccacaaagaaatgggaagtctgatgccttaacaactagacctgccaatcccgcaccacagccctttctacaaattcgccttggcttcacccactctgtgaaaacactcccccatgttgctccttccagtcctcttaattagttgactccctctgcacccccacacccccagactccttctgtgagagggagcctgtgttgtattctgcagatgcagagagcagacattaattggtacagaaaagagaaaatgaattggtttggaccacatgtgaaaaggagtttaaagcacaagaggcctacgttcagtttcaggcttcctaagctctgttattttgttgtcccttctcttatttttcttttcaaccttcttcagatgaagagaatgtggcagcaagagcatccccggagccagaactccagctcaggccttaccaaatggaagttgcccagccagccttggaagggaagaatatcatcatctgcctccctacagggagtggaaaaaccagagtggctgtttacattgccaaggatcacttagacaagaagaaaaaagcatctgagcctggaaaagttatagttcttgtcaataaggtattcaaagaacacataacactagttgatcattttcattgtattattctgaaacttttatatgatggcatttgtgtcattgactcacacatgtttagtttaattaagagtaatgtcaaaataagctctttattttatctttaatcttttttaggtatatgtaatatctaagtgatgaacctgaaaatagaaatttttcaataaaactaggacattataccaaatagctataacttatgtagccccaacacctgggagttagttttgattcatctgcttcctttatttcccttatctggtcacaggttatatttacccagatatactttaaggttaactagctaatttatcattgcaaatgaatatgaatgaccccaaaatatcactggaatcaaggatcaaatattgttttttactttctctttagctgttgacccttagtcaaagatggcaagtcctctttctccagaatacatataatgtggtttggagataaaattaagtgaaggtttggtatctacatcaagttaaatagattttaaaatgctcaagaagtatacatatatatatataaaatatacacatattacattaaatgcaactgaagttttccttcaataatttatatcttagggtatttgaaggccatcttcataagtaaatatgtctgcttcaccgtaaaacaaaatctagtcatttgagctttattcagataaatgacagtttattaatttataaatatacaaattggggatatgaatatttactattttatggaataaaaatgagcatacttttccttgatcagaaagtcttttttctgttcttatctattcctttataaaaaaaagcagtagactgtaaaatattctattttttatttctattatgctaaaagttttagttacatcctgtttttcagtacttagaatccatgatttgaatgattcctatcatgtagttccaaatgcattttgtgtgcatctgctaagtccaaagagctctcctttatacttgtatacttactattaaaacacttttatttattttgctggtaatggtgacacattcaaatttgtttgccgatagacttgcatatgtattccctttgtacaggatattatttttttaaatgaaataggtttgaatcctatttctacctaccggtactttgaattagacaaattagtaacttctctaactttaatttcttcatctgcaaaatgaacaaaataataactaccctgctctgaaatttcaattggattatatatggcctagtaatgactcctgcttttactcttaaatactagctttctcctgctcctttctcttcaccttcataactcatgaaactaagtaacataaccagggaggcttttaagtgccaaatccaaagaaaagaaccaagttaactggattcaaagctacttaaactgataattttgaaaccatttgagcatctgccattttctcaaactcagcctcaccatctaccctcccaaaggctcctcttccccatttacctgtctctttgtgagtaataccacctcctccaaagcatgcagcccccacacctaggagttagttttaattcatctacttcctttatttcccttatctggtcacagggacataggctaatagagttgaaaaggggcttcgagattcagctttcttcctttgcagagtggttctctcacttctgcagggtaacttcctaatatcaaggaggtccccctactaacaagacactgacactcttagaaagccctatttgtattcatccaaatctgtttctctggaatcccacaatcaccggttagagttccttcctctgcaaccacacgaagtcctaattctccagcctaatgacagcccttcacatagacaaggcagcatcatgtggctcctaagttacttttttttgttgttccttggaataaatgtccacagttcctttaactgttttccatataacatggtttctaaacctgtcatcattcctagtgctcatactccttcagacatttttctgggacactcttaaatgcggtgtccagagttgggcaaaatactacagataagatcataccagtgcagagcgtaggagacatgagatatgacacccagcttatgaccgcatttgcctctggcatccacagacttatctggaccttgtcatagaatcaaaatcctcagttcctttttatttgaaaatctcttaaactagaacattcttaatttatttttgtgcagtcagtttctgagcctaaattcaaatacttaggtttatttctttaactattgatcttttcaagtctcatatttttgtatgtgtctgatgcatcttcctttctataatattcccttctcttctcaatgctatattctagccaggaatctttcattgcattggatctacatgattcttcggaatgcacatttatggctatgtttaaatattaatttatcctcattaattattcacattcactgcattgttgtgtggacacctggggacttgactctaattccttattgcttttctattgtttttctccttagaattactagaaatccctccactaattcttccatctatgtcataattgtttactataccatctttttgaattttaaattaatttcagttttaattctttttgattgagtcagaacacctctggcccagtaagtctaagtaacctgaatcttgtgtttggcccaacaacaaggtattgttacccttgatctagaaaaaagaaatcctgttctctaacaccatttactttcatctcccttcctccgtcctttccaaagttatagccttcgaatgcagagagaaatgaaaacaccacctgtgttcccagactttccatttcctatctagggcttcaacatcatgagagataaatcccaggttccttcagatgctgcaatgcagccccatatgattcagcagaagtgggtagcagttgggtttgattagtcttggcaggcactctgtcacatctcaagaaaaggctccaagaggaccacacacctcccaattagccatgtcagacttgcatctggctttctctgtgtccttcagtaggaagtcaacaccacccagagcgagtatcaggatttccagcrtctgctatctcctgtgacaacttctttttgttctgtacatcagaaggtgcggcttcttttgaagatttttgactcaccttttatgggcagaattttgtggtgcaatgtcactccataatacagagattcttaattaaatcattcagcatgagtgtatttaaagacaaatcaaatgtagatcttgtcctcamgaaatatacagtctagaagaaagatgagagatatatgttgataatatgataattaatattttattgcactttataaagcactctcagatatattatctcattaaatctacacagcaaccccataaggtagtctttattattctcattttttcccatcagaaaactgaagtttcaagactttaattggcaattcagggatcatccagccaagaaacagcagaaatgagacacgaacttttatcttctgagtccactggtcttcctttgccactgcaccctccttctagaataaaaggattggtgaaatatcgtggaagttttagtactgacaatacrgcatcctctatttcatttaattttcacaaccctataataggttaacattatcctcattttattaatctggaaattgagagcattaagatgattgagaccttgtccaaggtacaaagaagtaagtggctggagtagctgttttcagggctttcttccctctgcatcatgctgtctctttccactaaacttaatttccattcttttcctcagaagccttctgtcttgcataaatgaaatggaaagaatacttctagaaaatgattcaagaacrgctttgtggaagagagagagaagagcagagctgtgactctcaaattttaaaggcttaaatgtcattaaagtgaaggtttcaagcctctgccccccagagattgtccctagattcagtaattcttgagtgggacttaggagtctgcattttctaaacttctcaagcgtgtttgtaacaggtagattagagagactttactttgaaaaaaaaaaagaactaaatgaaagtttctcttcttactctttctaccctttccaccttgtggtaaggtaatgttctttcactcaccaacttgattactgattttaagtccactttgcttccttagaatttatggatttcattttaactcttccccaccccttcttccagccccccagacacctacttttggaagcctccatcatttccactaaataataaagtaaaccagtgttcttcataaggtagctgttccctttagccagggggatcagccattccttatttaacacctaagtgggacttacctcaagtaaaaagatgaataacacaaaccctrcagactaggagaaaggtaaccactgattgcatttctggtagaattatggagagtgaataatataatgggcattctttgaagcttgcccttgaaactcttcctgccaactctctgtttcccatattgtacactgctgggcttccattgcataaatcttcctaggatatgaccttcaagatggccttatattttttctcctaatccagaaggtattttgagtgactagtaatgtgtagcattgaggtgtcaacccagctaccttcagcagatgttataacatacagaatcagctgagaaggacccgaagtttccacttcttttgccaggtctactttcgggtttgttctttctcagccaccacagctattccagcagctcatttcttcacttcacatctgttctcctagtcaatgccctaactcctcacttgtggttccctgattcttccggtcctgtgggcctgttgcttctggtctaatccaaaacaaacaacaggaataaatcacttcaacagtacaacttgtagggatcctgtaaactgttatactacatgtaaaatactctgcttgatgtttgcagccctttataacctggcactkctctacaaatttaaaaatgtatttcttattcaaccttagcttcagtttatcttttcactgactcatggcttactagattcaaattccttcaaattccccttttttgagtcrtcagttgcttcttctcttaactgtcactttgtgtgtgtttctaggtgagcattattacattgtgttgtaataatttgtcttgctttgtttagtcttggtctgtatgatcagctagacagagttcctcagagttgtcaaccatatgttaaatatctttgtgtcccagacataaatgcccacacctaacaagggtataatcagtgcttattgacagatgaatgaaaggagtgatgggaacgttgttatgcctgattcactgataatgtaaacacctcttttcatgctggatgccaaacaggcctttgatcaacactcttttggcttcgactaactttctctcttttaaaaaatcttcacatttttttaaggtactgctagttgaacagctcttccgcaaggagttccaaccatttttgaagaaatggtatcgtgttattggattaagtggtgatacccaactgaaaatatcatttccagaagttgtcaagtcctgtgatattattatcagtacagctcaaatccttgaaaactccctcttaaacttggaaaatggagaagatgctggtgttcaattgtcaggtcagtttaagtgtttatttttttaaaaaaattaatagtaatattgatgataacaaaggctgtatttgttaattttttaaatgttcgtggcttaaattgtcttttattgcttatggttttattaaaatccttctacttcctggaggaaacaaaaaaagtaagtttttaattagaccactttattctgcataagaataccattattaaggcaagcactcgctggactttccatttattctgacaagttcctttatttgctattgaatgttgttagatctgcttccctttcccatagaataaaaatacaaatcttgtcttttatggggtataggatgagaaggtaggagaaagaatggaaaaaaataaaaataatttataataactaaatgcaatgttaaaacaaggcaaaattttccctctttaaatagtgtgtttttcacttgatgtaataaaaataaaattcaccaacctaaaattaaatattttattaaagaacaaaagtaaaatcctgagatttgttttgtaataagccagggtgtgaattccacatctaacgctttttagctctgtaaactttctgaatcttatctattaaagaaggagaatgtctaacagggagtttcatgattagtatatacgaacgtctgtgtgtacaggtgctagtatagttagatttccctcctaaaaactgaaagtggactgctcttgtgtcgtgcccaagagaaggcatccccaaggcagctcaattactggtctaaagctattttctcactgtagtgtgctgatatggagaaatgaactctttgaattttcttttaagacttttccctcattatcattgatgaatgtcatcacaccaacaaagaagcagtgtataataacatcatgaggcrttatttgatgcagaagttgaaaaacaatagactcaagaaagaaaacaaaccagtgattccccttcctcagatactgggactaacagcttcacctggtgttggaggggccacsaagcaagccaaagctgaagaacacattttaaaagtaagtcataattttatgtataaccaatgaaagcaaagctaaaacaaatgccaggacttcttggtcttattaaataagattgagttcaagtgctgtgatcatcagttaagtgaaatctgtttgctttagtacaataaatatactcagtcttctacagaatactaatatgccttaataaatatcaataacacaaaatcatatcataaaaatgatggagagtgatataattaatgggaagttgagataaatagaatgccttcttttgaacatctactcttatggttaaatttaatgatctacctgatatagaaatatgcataaactatgaaagtttctagttgtcacacataataaagtcttactccatgagtttcaaaactgcgtattttctgtccttcatatgttattctaggaatctaggtaattcaaattaaagggaaatagggatatgaagatctttaaagatgagcttgtcagctgccccctaatggtaacaccacatacagtgctactgttaatcttgagtgttaagtaaatcagagtagcccaagaagtattttggtaccaaggcaattgcatttgaattttaagtcccttactttaagttgaattcaatacaaattatgtagagtagacacaacattcagagatgcaattataggctccaaaatataatttattactgggattaaggactaattccaatctaataatcaaggaacatgactaaggatgctcccagctttatgtgtagatgcctgctttatgtgtagaagaaggtggtagtatgatccacggatgtcaagttgacctttgatatgcctcatgtaacatggttatctcaaaatcattctctgtcaatgatggtaaattgttatactctttccatgtcagttttccacttggaaaatggaatttaaggaatgaatatcaatacacctttttctctgttattacaccaacttgatttagaagctcctttttcctatattaggacaaatgttgctgattgtgggttaatgagatccataataaaacaatgttaaaatgctatatttagcaagcartgctacatattactttcatgaaattttataccacatatttatgstacaatttaatgctacatattttttacatgaaaaagagttctacgttgaataaagtgaaagggaaaaataattgcataaatattgaaaaatgtctcttttccagctatgtgccaatcttgatgcatttactattaaaactgttaaagaaaaccttgatcaactgaaaaaccaaatacaggagccatgcaagaagtttgccattgcagatgcaaccagagaastatgggcttaatgttttatatctattgattgacaatactacattcagtagaaagatggcaaaggctattttatactgaccatctgaaaaatattatttaaaaattttagcaaacaagtttcaggtttttttttaattgatgytaggcagtaaagcactacagtgaattctcgcctctagacctcttttagttttctaatttacatgaggaatagcttattcattgtttgtacatatgagttamaagggacagtgaggggccatgggcagagggatgtgtaactaagctggaggggttatgacagttcgttttagcctttttaattttcttcgtgaattccaggattgattttctgacattccacagagccattttgttgctatcaaattacatttggcaatgataatgggaatcctatctaatttgcatacttgcatatttactttcttaggaaaacagtgcaatggtaaagaagtgaaatatttactttaatgatgcttttctgatgaatttttcaggaattataagaataaactgagagtcaatttrgacattatggccagtaaattatgtcaatactttattttgtaaaatttagaaagcattacaaattctggccatatgtacttgataataccattgaaaataagaatgttgggatcaaatgatatgaaatatgcatagtagataaaacaatgcttgaaatatagtaggcactaaaccaatgttagtaactagcctccgtatatctctttttttaaattctgaaaaagactgctatctactccagctgcactagcacagttgaatatattttattcactttcctttttttgttacttatttggttttacttgataattttaaatgcatgtttctactcataaagatttttaaaactaaatttctcaggtacattttttaaaagaatttgccattttttaaacttactttaatttttttatataccttgaagcataacatacatacagaaaagtacaaattcatatgtgtactgattgctgaattttcctaaactgaatacacatatgtaaacaaaatccaaatcaagagacagcacactgccagtatcctaaaagctcctggctcccccttccagtcaccatgccccaggaatcactactatcttgacttctaaaacaaaaaatgagttttcactgattctgaactttatataaatggaatcatatagcatgcactcctttatttctggctttattcagactctacttcaactttttattttggtcgaaataatactgaaaccagttttacaaaggaggaatgtttcttaaattacactgtaagctttctaaataattgtggcattaatgcaatatgtgttttctaagttacctttaacatacaaggtttatataattcattaactttacttttgttaaccttttaagttggagattccagcagaggtaacagggtgttggtgtgggtgtggcttgatggcaggcttaaaagagaagctgacaaaaataaatgtacagacaagtgatgggacactaacctgttactttgtctaaacaaagatgaatcagatttattataacctagaaattattctaacaaagataatgttattcctttaacaataagaatacataagaataagtgtgtactttatttttaggatccatttaaagagaaacttctagaaataatgacaaggattcaaacttattgtcaaatgagtccaatgtcagattttggaactcaaccctatgaacaatgggccattcaaatggaaaaaaaaggtaatttaggtttggacctaacacttagtttawcccatgtttataccaagattttagatgactatatcacagattccccaaaaaatggaaagcaaaagtagttccaaatagaatttctgtgttctctgtaggacaagcataataaacatgttctaattccttttctaaggagagagattccaatgctatccaattttctctttgtctccagagtcttgagataaacwttaatagctctgtctccaaaggcaaactcaactaatatattttcatgccatttctctgtgcatcagctacatgtttttgctgaggcagaactcaagcagcaagtctaggagttggaaaacttgccctgtttcagagctcaggacacattttgagccttaacttgcccattttaaaaccaaggtgaagccagttttgcagttagtaacatatattcaagtccatggcacaattttagggggtttatatgcttattatttcacttacataatatattttttcacagctgcaaaagaaggaaatcgcaaagaacgtgtttgtgcagaacatttgaggaagtacaatgaggccctacaaattaatgacacaattcgaatgatagatgcgtatactcatcttkaaactttctataatgaagagaaagataagaagtttgcagtcatagaagatgatagtgatgagggtggtgatgatgagtattgtgatggtgatgaagatgaggatgatttaaagaaacctttgaaactggatgaaacagatagatttctcatgactttattttttggtaagattcaaagtaacatatactggtgtcattcatttaccttttcaacatgaacttactgcttctcataagctctccaaaaagagaaatatcttttgaaagaagaaatcccactcagattggaactatttctaatgatatgaccagattagctaccagttgtatgatcacagtcagtcatttggtcattcagttttattgtcaagacaattgtaatgaatttatttattaaaccatcctaattattagatatagcgcaagattgtagatgagccacaattcatgaaaccttctagtgtaattcgttgtatgttttactaatttatacttccaaatagtttttaaattaattaatttttaatcaataaaactgtatatttttggtgtacaaaatgtttgatatatctgtacattgtggagtggctaaatcaagcttgttaacatatcaactctaattatttcttaaagaaaacaataaaatgttgaaaaggctggctgaaaacccagaatatgaaaatgaaaagctgaccaaattaagaaataccataatggagcaatatactaggactgaggaatcagcacgaggaataatctttacaaaaacacgacagagtgcatatgcgctttcccagtggattactgaaaatgaaaaatttgctgaagtaggagtcaaagcccaccatctgattggagctggacacagcagtgagttcaaacccatgacacaggtataaatatccttttggacgacttcttttcttttctttctcttttcttcttctcttctcttcttctcttcttcttttctttcagacgaggcctcgctctgtcactcaggctgaagagcagtggcatgatcaagattcactgcacccttgacctcctaggctcaagcaatcctccagccccagcctcctgagcagctgggactctaggtgtgcaccaccacacccaactaatttttttatcttttttgtagaaaaggtgtcccactatgttgtcctggcttgtcttaaactcctgggctcaagccatccttctgcctctgccttccaaagtattgagattataggcacgagccactgcgctcagcctggacttcttttcttatgctgttattactcttctcaaattgtttttagtctttttctaccaatcctctcaccacccatgaatacatttacaggataaaacacctgttcttgaaataaaatctaaggctaatagcaatcaaatctgtggtttttgagaggttaagtgttgttttaggagtcatttttcccacataataattggaagaactttctaagtttcccttgcaaaaataagtgacatgtaagcttaacaacaaagttcagaaatgattgccatgtagtatcaagtggaaaattcaaactcccacaaaaatgtgttcgttataactagaactatgcaaaatatatttacatagaatgagacctctagggaaacttgaaaaaactaaagaatttgatatattagagatttgggattctggtaagtaggttttctgttccattttaaggtgttttgttttactttgtttacatgttgcttactgtgggcatagtaaaaaaacacttgggtaagaaaaaaaggcactagtagacattacaagcatgcatgaagcaatgatgccttgttagagtaaaatattcttctgagggctaaaatcacattgaccctgagtctttctggacaaatggatacttcctttctattatagttatcactattcaagccaatggagcaaattaattctgtttcagtgtttgctggaaaaaaattcttgaaatggttcactataactctttatataccctctacatgcactcctgtgagcattgccaataaaattaatgccagagaaagtactgttttccttgggtaacaagtttgcttccttctttttgatgagatgtagtttgctttatatgtttttctttttgccttagcttccagaaagctagcaggaaaaactcaagttcagtctcacagcctctgtgttgattcttatgagttctgtttttaaatttctattatattaactttagcgttgtgacttttattgtaagagggctaagcttctctgtaaaaagaggtagagtgcaaatgaaaagcctatgttcaagctactttctgctccttattcatttcaaaccaaggggctgtgtgccaaaatacagaacatattcccttccttccccactccttgtatcctcaccttgtaaactggggtggacaaactccttagcaatggtgttaggcatctatgtgatgtgacttgaagatctgacactgtctggaatttttgttattaaagttactccttcaaattaagacacaggcatcttctgctaaaatccaagaacatgtaagtttttatcgggagatgtgagggccggagggagaaattttcagagaagactcaagagaggcctttctacagggttctccgacagttaggagtaggagtcaaataaggactcacactgcctctgagaagaaagggaaggggatggaagaacatacttttggtctggcagctttatttttgtttaatgtatgggggcaatagacagtgtggatgtgcaccaaatgccaactggaccaacagctttgatgagagtggttatgaaaataaaaccacattgtccatatcaagctaggtttgtgctcactcatttctcccatgtaaggatgagaggtcatattttaatttatttatattgactttcaaaattcagagttttttcatttgaaaatagttttatttacagttgcataacctcttctttcatttttatttatattgtccctttgaattgataatatatttacctcattcaaaattaatgaggcacaaggcataccactgacctctagtcttccagctcccctccctagatgcagctgatgttttcagtttctcttgtgtccttttgggaatattccatagcttctaactcaaatgattcttaaagtgaccaaatgcatatacagtgtgcattttctctgtgactgaaaacaatatatcaaagcatctctgcatcttatcctctaaatagcaaagattctgaagttaatgtagtgggggaaaaaagcccattttagcttctgattgtcatatcctcttctcaaccgacagctcctcctttcttcctctggagtcacccatcaatttatttccttggcataaaatgtggtcttcccacctccagactggatgatggaaatatttttgttattgtgtggtaatcccagattggaaatcaaatgttgtctcaccattatgtctttgttcaatgccaaaaacaratggcaacaaatccatgtatgatctaatcctttgatttacactgaccagttgcaatttattatttcttcctctaattagaagattttaatgtgtttagcatcacaaaatttaatttattaaaatgtttctacagaatgaacaaaaagaagtcattagtaaatttcgcactggaaaaataaatctgcttatcgctaccacagtggcagaagaaggtctggatattaaagaatgtaacattgttatccgttatggtctcgtcaccaatgaaatagccatggtccaggtacattcaaatacctctacttactatgttaatttttatttgttgtgttcctattttaattgctttcttttagttaaacagcaaaaacatctttttagtttttaaaacaaagcctttttcctgttaaaagagcatttttaaaatgctgtgcactgttgcctttcatattgctgtcaattcatataataaccagatacctgttgtatgtttaaacaacaactcctctttagctatttctgtaccctaaggctttccaggaccatgacactagccccatttgtaagagtcaaaagcagcctcctctttcctaggatgtctgtgagcccccagctggaccaggaatctaaagtacactgtcccacaaatgtctgatgaagtaacatgcccaaacctgagggagccctgctgtttctgcattttcttcccttatcctttccaattttctgtgtgtttagaagttttcatgataaaatgttggttgggggcagacttataaatgtaaaaataaataaaagagtgaaatgttctgttttcattcagatttcactttatctcttacccacctatgttaatggcattattgtaacctgttgagtaggcataggtgttatgctgattaatagatacactattcttmctataaaattaactaaagggatttttaaataacttaaattgcatccttgaataaaaggcaagtcatagaagactaagataaccagactgccatcaaattagcaaataattttatttcaggagtctatttgtaagtcagtgataagcttagtaatcaaacttagaatacatttttccttgaggatacttttatagttgataggctcctgggccaggccacagaagtttctattaatcaaaatatacctgaatatcactttcataaagaggcttgtagaaagttatcaccatgttaaatatgttcccatgggaaaatgtgctaagaatgtaatgtaggatgccagaaactgacctgccttctcaccagccctagtgtcaaggtcagagatgacccttctctccattcattcctcccagcttcctaccaagaaagacgactcctcagtccaagtcattgatcgtggttctcatagtttgagagagaagttctgagagcaaaaagcctggacaggatgatattatgtcattgaggcctaaccatcatcactctagaacactttttctgtattaaagcatattataagtttcaaagagctgacttacaagtaatggattaataactaactttactaactttacccatttgaagactggcatgctgaacaacccaatatcatttcattctgagcaagaatatcattcccagaaaaaaccaggaggatttgtatcacaacgtaccctttcatttacttgatttatttgtgttttcaggcccgtggtcgagccagagctgatgagagcacctacgtcctggttgctcacagtggttcaggagttatcgaacrtgagacagttaatgatttccgagagaagatgatgtataaagctatacattgtgttcaaaatatgaaaccagaggagtatgctcataaggtattgttggycacctctgaatttgattttcatttaaaaatggcggcatgtggttgccattgatatctctgtgactcattctccagacaaaaattgtgctgaattataagtttctgtttagtgaactgtgcttaatccagattcacatgcagagaatcaagatccatggtgggcaggaaattatcagggagccattcctcattccagtaaaaccaaccataaatttggataatataaatttagcctgccttgttccagaaagactgctgcaactcactgattcaatccaacatggtaattttggtttgatccaatttgtttgtaaaggcacagttttttaatttcagaaatgtagatgaaacgcctactgtgtgccaggtaaccttataggaacagccaacagaggaaacaaaacacataagactcctgctgcacgaagtttatatttctagtgtgtgcctggtgaagtttggaggacagaaacagtaaacaaacattaaaagacaagaaatataatatatcaagataagtgaagagaattagaataggatgatatgaaacaactgactagatggatactttcttgtttttagtagtttttgaaattcttttttttcttattatactttaagttctagcgtacatgtgcacaacgtgcaggtctgttacatatgtatacatgtgccatgttggtgtgctgtacccatttacttgtcatttacattaggtatttctcttaatgctatccctctcccctccccccaccccacgacaggccctggtgtgtaatgttcccagccctgtgtccaagtgttctcattgttcaatttccacctatgagtgagaacatgcggggtttggttttctgtccttgtgatagtttgctcagaatgatggttttcagtttcatccatgtccctacaaaggacatgaactcatccttttttatggctgcatagactagatggatactttyaactgggtggttgaggaaggtctcttagaaggagtgacagggaagctgcatctgaatgataagaaaatacagaatatgtcatctagctacatctcaatttactaacacacagttatttgagttgtgcaaaggaatgcagtgaagaaagaatgtatttctatagtatttcaggaaatcccccataccactgaattaaaaactgtaactactataatagcaaacaatccatttagaagaaaattcacacccttgcatatgggtgtgaatgttagtttcttaacattggaattggctctaccttaaatagagtttcactaaagggatgctttcaaattggtgtgcattgctattaccaactccaaggtttcctgaccaggtttctgcacaaaactttattttaaaacccctttaaatacaaggcaaagcaaatattttagagtatcaaatcaaacttttgtcaccaaattatgccactggaaagttactgcctcccagttaatgtcctaagagaattaatcaagtagatgtttacaaagactgatgttttaagagtagttttttgggggtcaacactaggacaatctctggagtttaagggtcaaattcttccagacattctttagaataagactctgtccctttgggtgccccagaatggactatatttttaggtctcctttggccaagaaacctgccctcctaaaactacttcaggtagatgaacttagagtaggagtggcaatggggaaggagggctacatgccaccagtaatctgttcaaagcctgtagaaaacattgctactgggaagatgtttactttcttctaatttgagcatctttctcaacacaatcttcagacaaccactaatgaatgatgagaattgacagataagatgaaatctttcttccatgtcataaacacagtttaaacataacagagcttcttaaaattaaatcagasttctaggagcaagttgatcatcataaatgtttttctctagcattgattcaatttttttgctacattattacactttatttggacttaggctgattgtagctgtgcctcctgtatatttattatgagttcttttttttgtttgtttacccctctagttacttcaaattcctttactattttagagttagtcttttagcttctgatgtcctgattacaaatccatacacttaccttggctttattttttttctgactcattcatacacatttcttaattcccacatgtatgtgatcctataattaccttatcagctcattgaactgtaaatgtcttataaaagtaacctattaaaacttttagggaaaaatatttcagtgtattattttgctataatttacataggaaattaatcttggtacttgtctgattaatctattatatagcctccaggcttgcttgcaaggttttattctcttttcyatgctatatatggctgccttgaagggagatctaaaatgtagagttagaagccaaagagatgggctttgttcaactgcactgatgacttacttttactgaaaatttctccctcggtcttaaagaaaacaattaattcttccataatttaatataaatatgtcatctatgagaggtcagtttggcggtaaattattcaagaaccagatttttctaccgtgaagttgtgttggtataaacactgttcagtccctatgtcaactttcatatgttacataaactagattatttccattataaaataagtgctgctgctagtcacagagcatagaataaagaggttgatgggcatattctctcacagaaggaatctaggcagtattggctccatgaagttatgaggaatccaggccttttctctcctttttatgctgttatagcattgggctttcattctcatggtcgaagatggcttttagaatttcagctgccacatcctcattctaggcaggaagtaagaggagaatggaaagggygaaaggtacacatgccagctatctaatttttaagaagattttctgaaaattccactcaacagctttttacatgtcattgactgctggtttggaaatgtagtcatttagctagcatatttccacccagaataaaattatggttctgttaggaaaaatggacactgaatgaaaaactagyggtttctgctacaaatgtgtaaagagtagactgattaagatggtgaagggtctgaaaattataaagcatgaaaaaagattaaaggcatttgggtgcttagcatagattagagaagacttggtaatgtaataacagtgtttagtaaagagattccatgtggaaggaagtttagacctattttatggaacagaattaaaacaaatgggtaggctggcgcagtggctcacacctgcaatcccagcactttgagaggctgaggcaggtggatcactgagatcaagaatttgagatcagcctgggcaacatggcaaaactccatctctactaaaaatatgaaaattagctgagcatggtggcaggtgcctggaatcccagctacttgggagtctaaggcagaagaatcccttgaacccaggagatggaggttgcagtgacccgagatagtaccaacacactccagcctgggcagcagagcaagactccatctcaataaataaataaataaataaataacaaatgggtaggctagacagagaatttttgttgaatattgctaaggactttctcacaatagaacttttctgaaatggaatgggctactttttgaatacctgaagactgcacattttcatggttacaggagatgattatataccaaattctttggggggtcattacctcattatttttatttcctagaccataagctaagggtatattttcacaactaagacctccaaatttcaggagacttacttctatgaaactgaaaaaagaaaacaaacctgaaaccactaactattcctttctctgtccagattttggaattacagatgcaaagtataatggaaaagaaaatgaaaaccaagagaaatattgccaagcattacaagaataacccatcactaataactttcctttgcaaaaactgcagtgtgctagcctgttctggggaagatatccatgtarttgagaaaatgcatcacgtcaatatgaccccagaattcaagtgagtccagaaagacccatttttacatttttccacaaggggtgaagcaggttgcattgtaaatgttctttcaaaatagtgcaaatgagattcatttattttacaacttcctctcctttagcctctcaattatattcctattttaaatgtctatgttttaaataaactgcactggggcaggaaaagagaagtgtaagaaccaaagccattttgatccaaggcacgtatttttgtatgctcatcatttgttctcaaatttttgaacaactaaagtcaagttaatataaccaacagacttgaaagaagttatgaaaggcaacatgccccttgagaggtatgtgtagaagagaagcattgccttakttgcaataacaagcctgggaagcaggagggaaggaaggaatgccgtgtagaataccgcaggcatgcggatgagctccagntccaataacccatgaactacacactggtattttgtcagttctccatgatrattctttccctttgatacttatagggaactttacattgtaagagaaaacaaarcactgcaaaagaagtgtgccgactatcaaataaatggtgaaatcatctgcaaatgtggccaggtgagtaaattgctgtgggccagattttactttagccaacaggaatgtttaattgcatgtacatttaattttcctcttgctctctcttttgttttccaggcttggggaacaatgatggtgcacaaaggcttagatttgccttgtctcaaaataaggaattttgtagtggttttcaaaaataattcaacaaagaaacaatacaaaaagtgggtagaattacctatcacatttcccaatcttgactattcagaatgctgtttatttagtgatgaggattagcacttrattgaagattcttttaaaatactatcagttaaacatttaatatgattatgattaatgtattcattatgctacagaactgacataagaatcaataaaatgattgttttactctgcattgaactctttttaagaacacaatatattatgcattatccatcttattgttgggcagaggtaaggaaaatctaccaataattctcattagtgtggagcattatagtcctgtggaaagaatgctgaagtacaaatgagaatccaaagtaccagtctcagttctgtcactaattttcagaataaaattaggcaaatcagttcatctttctgaaccagtctccttatcgatgaaatggtcataacattctctagttttactttttattaattttctattgctctataacagattgccacaaaggtagtggcttaaatcaacaatcattaattataacacatgtcctgttggtcagaaaggcagggttctttgctcagggtctcacaaaattgaaattgaggtgtcagccagactgtgttctcatctggaggcactggggaaagaatccacttccaagttcattcagagttttggcagagtttgtttccttgcagctgtctgactaagatggctgttttgctgtctgtccactggggatcgctcccagctccagcaatgcccctaccacacagcatgctcaagcctctttcccagcacagatatttgcttcttcatggtcagaagaagaatctctctctcaagtctgctcagatggagtcttagataggttaactgtaaccatagaagtgactgtctcatcatatccgtaggtcctgcccacactcaccgcaaagggattattcagggaatcaccccagccagtgggaatcgtggggaccatcttagagctttgcctcctacatcacttgcccagtctttgcaactaaatgatatcataggaaagtactttaaaaactgtgaagtaccattaaagaccagttaagaagcagcatcaagtagcttaaggcttccttcctaggccttcccttccacaaacataacactatgttgcagaactacctaatgacagagtagtggctaaatccaggctgaccattaatgccaacaagattacacgtgtccctggacagccgttcacctcccactctaggattcacactggagttagcagggagcagatgctgagtgttattagagaataaagagaaaaatgtctgcctctgcccccaacagaacactacggacaattctcccagtagaaaagcagcctcttttgacaaggaagagccgcatgattcagacagaagccacaattgaccattttaaccaaaacttagcaagtctcacagatggcttgctccaagggaacatttacctcctgtgactaagaagaaacaaaatgttggagggtgtgaaaagaacattcttctgaagctttgatggattagttgagttgatattacagtagttttgaatctttccttgataatgcctaatcagagatgaatattaaccaatgagatctcttgggtatacaggaggacaaaagaagacacacataattgatggttttcttaaaatacttttttaaactccagctgactccatttaaagtattgctgtcttctagaatgttttggaaactatgcaagaaaccaaatgcataaaatagctaaatgtactactgtaacatatgtagactgtttttgaggtgtcaacaaatatcaggttttttcatctatgtttttcagtaacttttttcaattaaaaaagtgttatttctactttaaagttttaaaatacatgtttaaaatagtgtgaaacttaatatgtgatggtacctgaaaacttgaactatggtgcatatgtttcattcaaaaaatagcgatgattattgtagcgtttcagctgattgttactgaacagttcaatacccatattttagggtcacttacagaatatgttagacatcagcctgtgagttagaatgcctgagttttagtctccataagaccttcggccagacccagtggcttacgcctgtaatcccaacactttgggaggccgagacggatggatcacttgaggtcgggagttcaacaccagctggccaacatggtgaaaagccatctctactaaaatacaaaaattagtggtagcaggcacctgtaaacccagctaatcaggaggctgaggcagaagaattgcttgaacccaggaggcagaggtggtggtgagccgaaatcgtgccactgcattccagcctgggtgaaagaaggagactccgcctcaaaaaaaaaaaaaaagaaagaccttcaaccagtgggtgactttgagcaaccttagttcacagtgttccctctcctggaaaatgagagattggattagataatatcaaaggtccattacaactatagcatcctcatagttccatgcttcctgctttcattttaagaccttgcccaatgacttgtaatatcaaccgtgggctaaatacctgctcagtgcaatacatattgaaatgtagctcacgtatgttaaaaggcattgtaaggatctcacagaacaggtaccccgtctggagtcatgtgtcttaaggcagtttcaaaaggcccaaaagtgtcaggaaattatacaacaagtattttcaaaccaacagattattggcagacctggtggataagaaatataaagcataatcctaaaagtttgatatcatttcagaccatatgaaattaaaatacagcaacttagagtttatgtaagtatcttgaatgtaaggcattgattatggcaacacaaacataaataagaaatgattttccaaaggatgattaattagtacagttcacaagtaattgttgaaagtgagtaatgctatagattcctctctgcagtctaatagtccctacagcagagtgttatgccttagagaaaagaattctggggtttttaattcagttgaccataaagccaaagaggattggagtttctcttaacattgttgcttttaagatttaagagactcaaacacacatatgtgccaatggggaagaatactagagagtgataaaatattagcattgtccaactccaaaataaattgcttattgggtattactgatacattctaccaaatgttcttgctatagtcttttctggtctcccttatcctttctcaaatgagtgcctctgcacatggttagaagttgttctttgccaactcttcagcagacaccctttatggtcttcaaacacaaaacccaaatgtcacttcccagaatctagcacattcacattttctaaactggaatggagagaaatgtatgtaaggtatctctcactcctcctgagcatgataaaatgctcactcccaaaatctggctaacaattatgtgactcataacaataaagaaacaagaaaattagtttatttccttctaagacttatgaagttaatttgaaatttctgcattcttcagtttgtgcatttctctttagtcttactagatacacggttttatatattttatagggacagcctttttatggggacagcagagagtgagacaaacttgggtttggatcctcactggatttgtgacttcggcaagccacttaatctctctgagaccatagggaactataataatatcaaccttgagggactataatgaaaatttggatatttcatggaacatgtttagctgttgtcacctcataggaattaatgtacagaatacaggagcaggagttgccagaagagtaccagcagctgtagtagcctgagctactactatgagaaacatagatgaaaaaacgtgatatttgttgacacctcaaaaacagtctacataagttacagtagtacaaaatagaagcaaagagagcagttagatgacactaggcaagtctgttgtgtggaatagggtaatggtatggcatactattagtgaattttagatctatgtttaacgtttaagtaggatataaacaagattggggccctctccacttcatcaatggttagctcaaaagactcatcccaaaaaagtaaatagtatctgtaatgaaacatggttgctatgaatatgctattcagtgtagatggggggcaatttaacgtccagatcttctatggacataacaaaaagatacatatcataaatatatacgtataagtattacattactttttttttttttttgaaatggagtctcgctctgtcgccgaggctggagtgcagtggtgcaatctcggcggctcaccgcaagctccgcctcccgggttcacgccattctcctgcctcagcctccccagcatctggaactacaggcgcccgccgccacgcccggctaattttttgtatttttagtacagacggggtttcactgtgttagccaggatggtctcgatctcctgacctcgtgatcctcccgccttggcctcccaaagtgctgggattacaggcgtgagccaccgcgcccggcccataagtattactttctaaaaatagtcttcttcccatagccccatctagcatgtgggctttaacttggatttaaaagttattaattaaataaatagggctcagcactttccacatctcaccttcaagtatatctgcaaagctttaaaatgttgtgatcagtgtaacccaattgaagctgggcctctttgtggtttctctcagcatggagttgtatttagaagaaactcaacatcagcgtctaaattaatataaaaccaacttaaaggtttattcctgacatgcaaatgaaaaagttccaaagagaaattatatattatacaatattttaaataaattattttaactctgtatttcccaaagaaccatttagtatagcatgaacgctacttattactgtacttcttaaaattatgttcctaaaatcatcatgtgtagctctttatctccctggccccttttcccaaggtctccctgatgacttcctttataatgtaaatcaatatggttttactatgtttatttctttgcgtcgctctgttcattatcccagacttgatggatgcctgaaccacaaatggtttttataccttagaaatgggaatagagggagggggagtttctgtgaatattcatattaatatttttagtccctacaatatcagaaaacaacagtgccaattatcaatttgttgactcttatctccaaattcaacttttttgttagctctctgaaaatgtatctggaccctttaaatattttttctttgcctcctggcatgatattaagctttgcaagtgggagggactggagagacattgcaggaaaaaagggttaggttttgcttcctgcttcttgtgtgcttgcttagccagttcctgcagtgtgggtggcttctccagcgtccagttcctgtagtctatgtggctttctccagcagcaagctattacagtgcactgcagccagcagtgttcagtggccagcaactctgctggcacctcctcaggcagttttgtgtagagtgcctcaagtgacacctcttatgaacagctttccctggcaccctagggggaacatttccagcaagttccattggcgccacagcaacttctccaccattgagtgacccacacccatgattgccttctccagtaacgccttgatctcagccttgcatgctctctgtcaggtctaacagtggtggctccttcatatatctgctatttctatgttctttagaattatttttacttcttattaggtaatcctctgttacttcaatactgatacagttcataattatttatatcaaactttacctgtccatattactatgtggtttctcccttcagactggactcagactgattcaatcataactaatgaaatatgagaattacttcataagaagttataatttccaaagagccaattgctcttatgtatgagcattcagtttcacacaggaaatgactcaaacacatctgaccaattctctaaccaaataatttagaaacagcacagaatggattttataactagatagtttaattttctgaatccaaacaacccttttgcaatactagtaacggaaacaaaaatttctatc

SEQ ID NO: 95967 - DNA, 102803 bp, Homo sapiens
  misc_feature (1)...(102803): n = A,T,C or G
ttaaagaaaaagtctgggttgagcccagtggtgcacacctgtaatcccagcactttgagaagccaaggtgggaggattgcttgaggccaggaattcaagaccaccctgggcaacatagtgagacccccatctcttaaaaataaattagctaggcatggtggtgcatgcctgtagtcccaattacttgggaggctgaggtgggaagattgcttgagtctaggaggttgagattgcagtgagctatgaatacaccactgcactctaggctgggtgacacagaaagaccctgtctcaaaaaagaaaagagaaggtctcggaaaatgaggttaaaaattacagtcttgtactctttaactttattggggatatcaagttccttttaacttcctgatgcctcagtttccttttttttggagacagagtctcactctgttgcccaggctggagtgaagtagcacagtctcagttcattgcaacctcggccctcagtttcctatataatagttatactttcgctgggcacagtggctcatgcctgtaatcccaggattttgggaggccgaggcgggcaaatcacttgagccctggagttgaagaccagcccgcacaacatggagaaaccctgcctctacaaaaagtacaaaaaattagctgggcatggtggtgcatgcctgtgattgtggttccagctactcgggaggctgaggcaggagaatcacttgagcctgggaggcagagattgcagtcagccgagatcatgccactgaattccagcttgggtgagagagctagaccctgtttccaaaaaggaaaacaacaacaccaacaacaacaacaaagtaatagcttaatttacctgtttcctctgaggaatactctttataatacaaatgagagatggtaactttccaaattattttaaataggaaaacaatacttctggtttggaagtcctggctatgcctattggtcatttttgagtttcacctgaataggtatttatctttatatctgaagacaccagactaaaataattcagagatcccttgccaattcttatattttatatatctaatctgacacttctttttctttgagacagagttcaattctcctgcctcagcctcctaagtagctgggattacaggggtgtaccaccacagctggctaatttttgtatttttagtagagacagggtttcgccctgttgaccaggctggtcttgaactcctggcctcaactgatcctcctgccttggcctcccaaagtgctgggattacaggcataagccgctgcaccgggcctctgatctgacacttctaacatgtgctgtgggtcagaattgtattgggctcagcatcagaggtatttttcctgtgatcacacaggttttcttcttaacaccctggtagttccttctcagtctcttttgtgagttcttcctcttctgtaagttcctcaaagctttctccttgggcccttttttcacttcacaatctcagtgtaggtgatctcattcaataagctttggttaccacctagaaaccaataaacctcaaatttttatctccaatttaggtctctttcctgagcttcagacctgatcttcatctgtgtctctcacaaataactcaaacttaacatgtccaaaactgagctagtatactcttctcctaccaaaactcctttttcagaatttcctgtttactgagttactggcaccatcatcgatccatccagaaaaccagacagcagggagttatacctaacacttctctctttattctcccacatcaaatcaatcactacctaatactgggcaattctacttcctgaatacatattatttatctacatctttccatcgccactatcactcctcaaatccaaggtatcatcttctattgcctatatgacttcagcagccttctaactgctctcttttcttccagtcttgcctttgcccccaccatccaatgtttttcatacatgagccagagygrtctacttggaaaacacttgtgatcatactctctcttttcttttgttcaaccattatttactgagtaccacagtgtgccagaaactattctagaagctggggatccaatgatatataaaatagataaggcaatgacctcttactcataggaaggttctttatgatctcgaccacggactgctttcccctttgcttccagattagtacactacaatttagccatactgacttgctttctcagggtttttgaacaagtatgtatattcctacacccaattcctatacatttttcaaatgttaatttacatttcccttatttaccttttttttttttttgagttggagtctcgctgttacccaggctggagtgcagtggcacgatcttggctcactacaacctccaccacccaggtttaagtgattctcctgcctcagtctcccgagtagctgggattacagatgcatgccaccatgctcagctaatttttttttttttttttttgtatttttagcagagacgggtttttgacatgttggccaggctggtctcgaactcctgacctcatgatctgcccgcctctgcctccccaagtgctgggattacaggggttagccaccattcctggcccatttcccttctttagagaaactctctgaccagtctaggtccctttgtttatatctttccagaactactcacaattataaatttaaaatttgtgtgtttgtttaatgtttgtctctcccactagttctcttttatgttccaagagaacaggaaaatttcttgttcatcactgtattcccagtttctggcacataccacgagctcaatttgttggttgaatgaagaatggactgcctcacatgtgctatggagttagaactgtattgggctcagcatcagaggtatttttcctgtgcatgttaccatatttctacagtctggtaacctgtaagattcagagacttttatttttatttattttgtggggacagagtcttactctgtcgcccagcctggagtgcagtggcacaattttggctcactgcaacctccacctcctgggttcaagcaattctctggctcagcctcctgagtagctgggattacaggtgtctgccaccacacagagacttttttttttgagacagagtctcgctctgtcgcccaggctggagtgccgtggtgcaatcttggctcactgcaacctccgccagagacctctttttaaagcagctcacacttcaggatgcaatctttgtctctttttttttttttttttggagacagggtctcactctatcacctaggctggagtgcagtggcatgatcatggcttgctgcagccttgacctcctgggctcaggtgatcctcccacctcagcctttcaagtagctgggactacaagcatgcaccactatacccagctaattctttgtattttttgtggagacaggttttctctatattcagtttggtctcaaactcctgggttcaagtgatccaccttcctcagtctcccaaagtgctgggactacagacacatgccattagatccagcccacctttgtatctagttagaaaaatttaattaaaaaccactgctgtgagctaggtgcagtagttatgcctatagtaatcccagtgatttgggaggctgaggtgggaggatggcttaaggccaggagtttgagaccagcctggatagacatagtgagaactcatctctaaacaaacaaacaaataaaaccaacaacaacccactgctctgaagaagagaagtctagtggagttgcttaaagtggtaagttcttgaaaagatgtatggaaacaaactgggatatttaaacagtatttttcaatttacctcatctactgctccagttcaggttccatcattttctacctgaatcattgtacccttcctccctaactccttatcttcctatcctatacaatttgtcttcattgcatttattgttttttgtatatgtgagacaaagtagcaaacataagaagccatgtctgctcattctgtttaccagcagaatttcacaaactctcttgccagcagaatttcacagcctcagtgactgcgcacagccctccagaataccctgaaaatatgcaggatagagcacaagttcccatgtctcttgcctgaatcactgcatttttagaaaagataaatccaatgatgctcgaccttgcctcttcctgcacatttctgacaggattagtgactatgcctccataatctataaacatgtgtactcttccacctaaaccttcatgagattttgctctagtgtaactcctgagtacattttttcttttttattagagacaaggtcttgctctgtcaccaggctagagtgcagaggcacaatcatagttcactgtaacctcaaactcaggagtcccagcaatccttttaactctgcctctcctgtagctaggactacagggatgttctaccacgccttgcttttttatgtgtgtgtggagacagagtcttgatatgttacacaggctggttgtaaatgcctggcctcaagcaatccttctgcctcagcctccttaatcactgggattacaggcccagcctttctgagcacatttgatttaacttccaagcacatgcagagcggccaccacctgtatagaagctgcgggctgaaacactgctttggagcagtctaaaaaaaaaactctctgactctcccaggtggcagtcctcaataagacttctgaagaaagctaacttgaattatttaaaagcctgatttactttagtttacatattttacagttccttcccattagaatgcaagctcccccaaggcaaggctttaaatttttgttgtcgttgtttagacagggtctcactgtgtcaaccaggctggagtgcagtgttgcaatcacggctcactgcagcctcgacctcctggactcaagcgttcctcctgcctcagcctcctgagtagctgggaccacatgcacgcatcaccaagcctggctaattttaaaaaagaattttgtacagacgggggtctcaccatgttgtccaggctggtaccaaattcccaggctcaagcaatcctcccgcttcggcctcccaaagtactaggattataggtgtgagctatcactatcacgcccagcctaaggcaagttttgttttgttcatggttgtattccttgcatttggaactcagaagaggcctcgaaaaccttgaagatacagtaactatcaacacatctccctgcttcacgtctttccccgctcattcgtatgtatgagctatgatctcttaccccatggtgtcagtatagtgcatcttactaatttcagctgctttttagctttcatttatgtttgtatttccgtcacattttacattgctaaccaaagaccactgctagcgggaaaaactgggaaaggagacttgaaggcagcagacgctgcagctgctcgataaaaattggccgaatttaacaggaggctggaggagctaaaaaacgttttcacacagaagagttagcacatccagactggtctttttagcactttcttagggcttgaggatgaaaccccaccactgtcgggccgactgtagggtagagaagagccaattagtatttgcggcgctcgggagcagcgtycatccggcgggtgtaggaaaatacttccggcgttctggttttttatgtgctgagtcacagccgaaggctcgccccgggtctgaggagtagggtacccaaactatgacacgaatgggaaaatttaaaactttggaattaattctctgcactcgtttctcagttttctcattaggggaatatttttctttgacacgcggagcactactcagtggtttccacaaaacacactcgtacgtcataaacgcgccgggggcccttctcccgtcgtcctccgcgccactctctccgcttcttctccctcgccccgcccactttgggtttcgaaatgttcgctggctgttccgagaatcagtccgsgtcacgttggtgcctctcctttcctgttctgattggttgcttacgtgagcgtgactactttcttgcctcatgattggctgaaatcagtagcgtcatcggcggccgggagggcggagggacgagggaagtcggcgagagggagactgggktgggggaggggttcaggcctgttccccgcggctgcggcagcaccagggccggccgccaccgcctctagaacgcggaggaggtgggtcctgggaagcgggatgtccatcgctccagcttggtggtgaatgctgaggagagtcactgttgctgcagtctgtgccacccggaggaagttgtgtgaggccgggcgggagctcgcggcgctctggggaatcgaaacgcggggtcggtgcgaagactctgctgctgccagaccctttcctattctggccatgcctggaaggaacaaggcgaagtctacctgcagctgccctgacctgcagcccaatggacaggatctgggcgagaacagccgggttgcccgtctaggagcggatgaatctgaggaagagggacggagggggtctctcagtaatgctggggaccctgagatcgtcaagtctcccagcgaccccaagcaataccggtgagggaggagrcttgcaatggggaggcgaacagtgtgccggcttctctgtcggtgccgccgtcacttcttgtctccatgtctcccaatggagcaacagggcacactttccaccccaaatgcttccttgggtggaggtggcaagcgtgattagaggcttccctgtggtgtcagctgggcaagtgggagatcttgggttgtaagacgtcagaatgggagaagcttttcgagtcatttgaatacagtcgctaaagcaagaatgaaggtttctttgaggaacgcagcctgaatggtgagggagtcttggtattatgttaccaggaaaggttgacggagttggatactttaatttggaggacaggatatttaaggggcatattatcactatccaaaatatttgagggacacttaagtgataggtgaaactagtggacgaaagttaccagaggatggtgtggcttcagtaaagtaactttgcatcatatttggcctaagttgaagtgacttgtttccatgggtagttctccattaccaaaacggttgggcgacctcgtccaggaatatattagagagggcttaggtctcagttgggtgagttgtaaggtttcttctaaccttgaaattctctacttttggtttgtacaggagtyctctaaacatttctaataattggtgattcagtccccacctgagtattttccttcagaggtagcttatttcatggagtatcatgactatgatgtatcttgcgtgtgtgtgtgtgcgtgtgtgttttaataagagtctgggtcttgcgatgttgcccaggctaatttcaaactcctgggcttagggaatcctcctgtcttggcctcccaaagtactgggattacaggcgtgagccactgtgccaggcctggactttgatgtattttaaatagagttcatattgtccaataacttcgttgaacaggttgaggaaattgagacccaaagagtttgcttcttgctctgaatcacacagctaaataataacagagctggtatgatgacccctactatctgacaccaaattcagtgtatcatttgctgatttcctttttttttttgaaacggagtcttgctgtgtcaccaggctggagtgcagtggcgcgatcttggctcactgcaacctccgcctcccgggttcaagcgattctcctgcctcagcctccccagtagctgggactacaggtgctcgccaccacgcccggctaattttttgtatttttagtggagacggggtttcaccatattggccaggatggtttcgatctcttgaccttgtgatccgcccgcctcttctcccaaagtgctggggttacaggcgtgagccaccccgcccagcccgtttgccgattttttacaaatttcttgcttatgtgaattgaaagctgaaggattctagttctaaakttgttataagcccctacagcgttagcgcaagaaacaaccttatagataatcttttccacttcccaccacacctctttgacagatgrcacttagctccaagttcaggaccaacctaatttctcctttcacttcaagtctagatatattttctccaggctgccagagtcaagagatctttataaatgagctaaattttctttctcatcaaagatgtgattgtacaggttgagtatccctaatccaaaaatccagaatgctcggaaatccaaaactttatgagcgccaacatgacaccacaagtgaaaaattccacacttggcacctttgctttttgatggttggttcatgtacacaaactttgtttcatgcacaaaattattaaaaatattgtataaaattatcttcaggttatgtgtataaggtatatatgaaccataaatgaattttgtatttatactgcatcccatccccaagatacctcattacgtatacgcaaatattccaaaatccaaaaaaatccaaaatttgaaatacttttggtcccgagtgtttcggataaaggatactcaacctgtattggcaatgtataaatgagcaagttgaaaacttgataaaaggtgcttagtttttgccttccagatcaaatgttcaataatggtttcagggttttttccagcctatataaagttatataataactaatatttatggaatctacactgtgtttcagctactgttgtaactgttttagatgtgttatttcatttactgacctcatttttggtaaatttgtttgataaatacctgttaagtcctactgtgtgctaggcaccaagctagattaaatattttctgaaacttggtcaaatataatgtaataaataacatgttagtctgggtgaatatacaaaaatgattgagccagtacctgcctttagggagcttacaatagtagagagggacacagacacataaaaaaaaaaattagagactgttgtggtggctyatgcctgtaatcccagcacttggggggccgtgttgggaggatcacttgagcgcaggatttcgagaccagcctgggcaacatagtgagcccctgtctctacacacaaaaaattagccgggtgtggtggtgtgtgcctgtagtcccagctacttgggaagctgaggtaggaagattccttagcctgagaggttgaggctgcagtgagccatgatcgtgccactgcactccagcctgggtggcagtgagacactgtctcaaaaaacaaataaataaaactagggcactaaagttttatagaagccataacggaggtatgtcctagatatattgaggaatgaaatacattgataaattccaccgggggagaaaggaaagacttcaaagagtagataatgcttaagagttgttctttgaaaattgttgcgtttttgtctttatatggcttttgccaagtcattgtccttcttagtgtctcagcttattttaaaaacgaagggggttggttagaacagcagtgtttttcaataaccctcccctttcagaagagcagttcttccatattacctgttttatatactggagtttcaattagacttttgaagaaaagatgttattagtttaaaataaaggtggaaagcctcaggactaggtgatctttaaagacttatccaaattcaattctatgaatttttgtaaccagaaacacacttagacgcatctgcagcccacagagctgaattatccttccagattctgctgagatattccctctgtgaagtctttctaggcagaactaattcctccttccattgtatttcagtaggattttgtgcacgatccattacagtacatagcatcatattatatatcttttgaataagtaccagaggaggacccatttagaggaatattgtggtgaaataataccttgaaagatttaccagtctgcatttattaatagcctgcggaattttacttcagcatatgtgtaatttgtattccgcttttttgaaatgttgggcatatttccaggacacctattatgcttttttagggatctgtattaaatgcttaccaagtattgattcccttcccttctggaagggttaagggacttcaggttgggaattgatattcaaatttttattggtgttgagtggaaattctggttgrgcaggattagtagtggtgtattctatttattttttatttttatttttatttttgagrcagggtctcactttgtaacccaggctggagtgcagtggcgccatcacggctcactgcagcctcgacctcccaggcttaggtgatccttccacctcaggctctccagtagctgggactacaggcacgtgccatcatgcccagctaagcttttgtagagatgagatttcgccattttgcctaggctggtctcaaactcctgacctcagatgatctgccctccttggcctcccatagtgctgggattacaggcacaggtgagccactgcacctggcctggctgtggtgcattctgaatagtaaattttaacaatgaagaacacttaacgttaggtattttggattgactaaaacaagtacagagcactttccatgtttaacctgctcgtaaaaagacctgtatttctatggagaaggaaagaacaaatgaaaaggtatgtaaacttctttttttttttttttaatgattaaaaaaaattttgagacaggatttcaattcatcgcccaggctggagtacagaggcaccatcacaacctgccccaccatgtccggctaattttttgtaraaatggaggtggtggtgggggcaggtgtctcaccaagttgcccaggctggtctcgaactcctgacctcaagagatctgcctgcctctgcctctcaaagtgctgggattacaggtgtgagctaccacgccctgtcgaaaaggcatataaacttctgaagggcaagtccttctaatttaaattttggtcagactgttacaagtgaggagatggttatcttaataaattttcaggctgggcgtgggggctcacgcctgtaatcccagcactttgggaggcggaggtgggtggatcatctgaggtcaggagttcaagaccagcctggccaacatggtgaaaccctgtcgctactaaaaataaaaaaattagccagttgtagtggcaggtgcttgtaatcccaactacttgggaggcagaggcaggggaatcgcttgaacttgggaggcagaggttgcagtgagctgaaattgtgctactgcattccagcctgggcaacagagcaagactctgtctcaaacataaataaataaataaataaataaataaataawtaaataaaaattccatatattatagaaaataatgggtgggtgtgtgctgaataaggtacaggctatttctgaatattatgttgtttactattatatgctgtggaacaggaggaggatcacaattccagtgagtggaacagttgcattgagaacactaacatttgttggcttcctgaatagtttgctagtgaagtggctcacttctgagcagaagccttttgctcactttggcagcacgtatactgagcagaagccttatacaaatctgaggtatcagaagaaaactatacaccagaaaacaagagaacttttttttttgtattggatgggaagaacataggtttatttgttgatatttacaatgaaaactcctggaaccgtaatgcttcattcaatacatgagccagtaatttcatttgtgtgtgtttcatttcacacacacacagacacacaaatattgctaaaatgatcacaaaatctcacagctacaaaagaaatcattatgacttccatgtgtgtaaattccatgagattgacaattccttagtctgataacaaatgaacaagtgaatccaaatttctttttgttttgcactctcacttgtcttgtaaagtaaaggtaacctaggtattacttcacgagattcaaactcatttaacaaagtaagtgcttttaagattgaaatatgttaaatcttatgaatactagtataactttaataaacatatcttttgtctcttactattccttagactgatttccttattttgttttgttttgtgtttgagacagtctgggtctgtcacccaggctggagtgcagtggtgtgatctcaactcactgcagcctccacctcccaggttcaagccatcctccccaccttggcctcctaagtagctgggactacatgtgcacaccatcatgcccagctaatttttgtccttttttgtagagttgggtttcgctctgttgcccaggctagtctcaaactcctgagctcaatcagcccaccttggcctcccaaagtgctgggagtactggcatgagccactgcaccgggcctgactgatttctttaaagtgggctgatgggctagtaagaatagaaagagtgtatattgtttctaactgaagttgtgtgtgtgtgtgtatgtctgtgtgttttaggaaaataagatttagcattaaaaagctctctgttggccaggtgcagtagctcacacctgtaatcctagcactttgggcggccaaggcaggaagatcacctgcctctgtctcaaaaaaacaaaaccagaacaaaaaactctctgtttttctgactgggcgccgtggctcacgcctgtaatcccagcactttgggaggctgaggctggtggatcacgtgaggtcaggagttggagacctacctggccaacatggtgaaaccctgtctctactaaaatacaaaaattagctgggtgtggtggcggatgcctgtaatcccagatactggggaggctgaggcaggagaatcgcttgaacccgggaggcagaggttgcagtgagtcaagatcgcgcccactgcactctaggctgggcaacagaaccagactgtctcaaaaagaaaaccaaaaaacaaacaaaaacgccctgtttttaaagaactgaatgatggtaaaagctcttttgcttttaagaagcttatgatctgctgtaggagagtcagggagcagatactgaaactgaaatgcattaaatataataggtgctagaatagggatatgtaaagtatgactttttgttttgtcatttgtgtttctagcttgctgtctactggttatgtgacctttagcaagttaactaatgtctctraggctaaggatcttcataaggacacagaagaagagcaacctataaacaattgaaattgaaaaggagcagttgggaagcaggtgatagtggcttttttttttttttttttttttttttttaatgaaccagtggaggagaattcttgaagcaaggagtgatgatagataaaactgagaggtcaagcagtactaggactgaatcccttttggagactcgagaaattattactggtgaaagcagtttcaaaggaatggtatggaggcagaarccaggttgtagtgagttaaggatgaatggagagtgagaaattgattgactgagatggagtcttgctctgtcacccaggctggagtgcagtggtgtgatcttggctcactgcaacttccacttcccgagttcaagcaattctcgtgcctcagcctccaaagcagctggggttacaggcatgtgccgccatgcccagcttatttttgtatttttagtagagaggggatttcatcatcttggccaggctggttttgaactcctgacctcaggtgatccacctgtctcagcctcccaaagtgctgggattgcaggcctgaggcaccacgcccggccaagagtgagaaattttgaatgatgaggtacacattgtttggttttaaaggggaagggatgagaggagattttaggataaaaacagtgcattgtagcaagagagagtttttttcaagatgaataagaggtgagcatgtcttgcttgagaaaaaaagaatcagtagagaagttgaagatacagacagtaatagattactgtctgtattagtaataatactgtcagtattagtaattattaattactaattattaatactgtctgtattcataataataatagattcttagatagttgtgaggtgacaggattaatcttaagaacakacccagagaggctcattttagagagacgagaaaatatcttcacttaaagtgaaggaagtaacgagtatggatgcaggcagtgaaaacttgaaagggtgactttcccctcttatttgtaaagtagtcattgaaatgtacttaggtggtcctctggggaactctaagggaaatagtgggatgcataggggaagccttgagtgtgaaggtttgaaatagctaatgtagaaaatgggtgaagtgtatacrtggtaaatactaagaaaatttgtgggttcttgagcatgaaaatgataaaagtaaagcagtattttaagaataaagcagtagtttaaatctataggatgtggaagactggcttaagagtcagttataattgtgtcagttgtgttgacacaaatggtactagtctttctgtagctgatgtgttcccctcttcacttttctttttgctttccacttaattcactttaaatgtttgctaggctaaatgcccgtgagtacggagatcatgtctgttttattcactcaaggtccagtacattttaggttctcaaataatatttgtagaatgtatgaatgtatgagtgcttacatgccaggcattttcacagaactcatggggatattttgccagaaatttcttagattaaaattgtattctgaagctgggcacagtggcacatacttgtaatcccagctacttgggaggctgagatgggaggatggcttgagcccagtagttcaagaccagcctgggcaacaaaatgagatccctccatctcttaaaaaaatttttttaagtgtattttggccagttttaaagcaattgattttcagagaaaatgaatatggacaggttacagaagtgcaaatgatacaaatactacaaatgcgtatgctgatattgtatattttgtgtggaagcttgtgcttggcatagtaagcactcaaatgttagctattactgtttatatattggataaggccatgaataaagctggctttgtagcattttttgtagtagtaaaaagttggtacaactttattttccattggttgaataaagattaaattatgttacagttttacaatgaaaataatacatagctataaaaaaggataggtgattttatatgttgaaatagagagatcttctctgatttattgttgaatgaaaactagtggcaaaacaaaatgtataattccatttttaaaaggaaaaaacattactgttatatgtttacttaaattatagtttttcacgtattcatatatatgtacagaaaygattagggatggtattcagcaagctcatttctctggggaaaggaaggagagatttgacttttgttttatttattttttagtaattacaagaagataagtgttaaataacaataaagaagtattatgtggtcatcayagggaaggaactttagataaaaagaaaatttaagaattcctggctgggcgcgctggttcatgcctgtaatcccagcatcttaagtcaaggcaggaggatcgttggagatcatgagtttgaggccagcctgggtaacaaaacaagaccctacctctacaaaaaattaaaaaattagctgggcttggtggtgtgcaccaccaagctggtgtggtcccagctacttggaaggctgaggtaggaggatggcttgagcacaagagtttgaggttgtagtgagccatgatcacaccggtacactccagtgtgggcaacagagtgagaccctatctcaaaaagagagaattctccataattattctaccctgcattaaccactggtaacattttaaataatttcaatgccttattttattttttgaggtggtggctcactccctctcaggatgcagtgcagtggtgtgatctcaggtcactgcaacctccacctcccaggctcaagtgatcctcccacttcagcctccttgagtagctgggacgacaggcacgcaccaccacacctggctaatttttgtagagatggggtttcctcatgctacccagcctggtctcgaattcctggatcctagagtcaagtgatcctcctgccttcatctcccaaagtgctggaattacgggyatgaaccactgtgcccagccagacagtactgttactacatgatagatttaagtgctattctatgaaaatacattactgaggaggtactaagcagtaattagagtataaatggattgtattctctcattttattccttctaacaaacttctcataatggcaggtaatgtccaaggccttctattttgttcttaacgttctatcttcatcttcatcttctgttgtgctattttgtgctycttttcttggcacatgttttctttggtcatatttgccttttgaattcatgcatgagtatctcctctcttttctgttttctttcaatcgtcccttcccacatgtagttagtgactcttgtgtggccctctagcaatgttttttttccaagcgatttcatatttttgtagttattacttgtctttccacgctattatgttgaattttttgaagggagagaatttgtttctttgagtctttgcataccttctcttctgttagtaataaatgaatagtctgtactcctaagaccttatctctactctccagttgtgtactggatcccatctccttacaccttttatgttccactaattattccagcaattgttctccttccatcctgcatcatcagtttgtcttttactggatcatccccgggagcatacaaatatgctgtaattgtttccatcttcaggagagaaaatttctttattctttatccccttggagctatgtccttctagctattcagtttctctggtaactgtagcaaaacttgttgagttatctgtacttgcagtttgtaattcatctgtttccattattctgtaagctcactcagagtagacttctgccactattgttacactgaaatagctagttcaaggtcaccaatatctttacattagtcaattctcaagttatcttactcaacctatcagcatcatactgcatagttcaccattcttcttgaaatgctttgatcagttgactttcaggtcaccactgttcatagttctcttcctgcttattcacagatctcttcttatttccctgacttctaaattttggattatctagggctcaattttcagacttctcatctacccttactctgtatgttgtccggtctcatgactttaaatatcagcctgtataaaataaattttgttttcctacctccatgttttttcttactctttttttttatagcacttattgtcatttgacataaatttacttgtgcattgtctttctcttgcastggaatgtttcatcacaagggcaaggaattagttttgtttactgcttatatcgccagtgcctagaatagtgcctgttttaaagtcttgcttccatttctgtcttcttccttttctcctttggcttgttacataaggatatacttttcagtctttttttttggttactttatttcttgctttttgtctggatcaaaacataatgtttaggctgggcacagtggctcatgatgcctgtaatcccagtgctttggtaggctgaggcaggagtattgcaggagcccaggagtttgaggttacagtaagctatgatcgcatcattgtgctgcagcctgagcgacagactgagactctgtctttgaatatatatggcatatatgtatatataaaacatacatatatatagaaacaaaaccttacagataacagctgaagccctctttatattgcctcttcccattaccttctctgccttcttttttcagtgttaaccactatctaaatttcatgtatataccgtactagttctatctatagttgtatactttttattaaacatactttttaaacagtatatatcattgtttttgcatgttttaaagcattatagaaatagaaaggtatcacattagatgtctcataatctttttttttttttggtttaacattgcttttgagatttatccatgtcaataagtgtarttctagttatttgtgttaaccaatgtttaatattttgttgatgaatacatcgttattatctattttcctattgtcatttggttacagttttctgttatattttgttttatgactatgccacaatttagcttttttctttttgtttttcatttaagttgtttctagcatttcagaggactgtatatggttccttgtgcacacgtttgagaatttatctagggcacatacctatgagtgaaatgatacctataagtgaaatgactgggcatactcatttttaacctcactagatattgccrttagtactcttctaatgggttgtgcttttttacattgacaccaatagaacatgagagttcctgcttctttacgttcttacatttttagcagttattgatactgttagtttttttcttttcttttttttaaagataaggtctcactctgttatccaggctggagtgcagtggtgaaatcatagcttactgtaacctagaagtcctgggctcaaggggccctcctgcctcagcctctggagtggctgggactgccaccacgcccagctaattttaagaaatttttctttttttttttgagatggagtcttgctctgtcgcccaggctgtkcagtggcaaaatcttggctcactgcaacctctgcctcctgggttctagtaattcttctgcctcagcctcctgagtagctgaaactacaggtgcctgccaccatgcccagctaattttttttttttttgtatatttagtagagatggggtctcaccatgttggccaggatggtctcgttctcctgacctcctgatccgccctcttggcctcccaaagtgctgggaatacaggcgtgagctatcatgcttggtcgatattgttaggttttaaaaaaaattactatctgtggaaaattgtatttctcacttttttttaaaggttagtcaagtgaagcagtgggagtggagaaggcatcatttagttgtgaataccactgaattcagatcagcctatatttttctttcttaaaaaatctttttaggctgggcgcagtggcacatgcctgtaattccagcactttgggaagccaaggtgggcgaatcacctgaggtcaggagtgcaagaccagcctggccaacatggtgaaaccccatctctacaaaaatagtaaattagccaggcatgatcatgggtgcctgtaatcctggctactcgggaggctgaggtgggagtatcgcttgaacccggggaggcggaggttgcatgagccatgatcacgccattgcactctaacctgggtgacagagcgagactccgtctcaaaaaaaaaaaacaaaacgaaaaacttaaaaaatttgtatttccccttattactaataagatcagacattatttcatagtttgtagacatcaggatttctccttttataaattgcctgcttttctattgggttgttttttctttttataaatttgacttgtaaaaattcattttattttgaatgctaattttttgtcgattatatgagttgcaaatgtattctctaagtccatagcttatgtttgctccttgtttataaagtcaaacattgaatcagttattgatcttttatggtttgcactttttgtatcttattctaaaaattttattatagttttttacattaagaaatctaatttttttttttttttttaagaccaggtctcactccatcacccagggtggggtgcagtggcatgatctcagctcactgcaacctctgcctcccgggttcaagcgactcccacctcagcctcctgagtagctggaactacaggcatgcaccaccacgcctggctaatttttgtatttttagcagagacagggttttaccatgttggccaggctggtctcgaagtcctggcctcaagtgatctgccctccttgtcctcccaaagttctgggattataggtgtgagccaccatgcctggcaaaaatctaattttattactatttaaaaaaaaatatggataaccagttgtccagtcatacttttaaaaaagtataaatcccagagatcaccaaatattttctgtaaaagttctagctaataaatactttgggctttgtcagtcaggaggtgaaattgaggatattaagtaagtacttgtatatcaaaaaagaaaacaaatttctgcaaatttttggtgaaaatttttatgaagttcaaaatatagtatgttttttggtaatacagttctactagtaagaatgatggaattgtttttattgggataacattttgctttattgggatcaaaattaagtgttcatcagtcagttcatctgttaaatctgatttgtaatgagattttacataccttatctttgaaaatgtctttccacatagctaggtaccrccaatatattaatattgaaatactaatagcagtctatgagtacagatggtccctaatttatgttggttcaacttagggtttttccactttccatggtgcaaaaaagtgatatgcattcagtagaaaccgatctttgagtacccatatgatctttctgtttttcacttcagtgttgtatcagtaaattacatgagatattcaacacttcattataaaatagactttgtgttggatgattttccccaactgtaggctatgtaagcattctgagcatgtttgaggtaggctaggttaagctattgatgttcagtaggttaggttaaatgcattttcaatttacaatattttcaacttaagatgggtttttcaggacctaaccctgttgtaagtcgaggagcatctgtatatgactttaattgagcatattctttgcttggaaaacatttatataattatattagattcttctcatattttttccttttaacattattatagattaaatagatcaaacactatagatcagtcacttccaattaaattaggtgggatctcctcaattgcacagttaatggactttgaaatatggaagtttctttgtggttgcaacaaggtctggaaggcacttctgaaactatagtttgtgggggaatggaggtattacttcttgttttaactttttatagcacaggaagtatatgacgtagcttgccattacttgtgattcaaacatcattcttgattgaaatgacttaaatgctgttttgtcttgtaattttaggttgagttcattaaagaaacattattaaatctgcaccaaaagctaatttttttttttcttgagacagagtcgtgctctgtcacccaggctggagtacagcagtgcaatcttggcccactgcagcctctgcctccygggttcaagtgatccttctgcttcagtctcccaagtagttgggactacagacgtacgccaccatgcccagctaatttttgtatttttagcagagacaaggttttgctgtgttgtctaggctggtcttgaacacctgatctcaagtgatccgcctgccttggcctcccaaagtgctgggattacaggtgtgagccaccatgcctggcctcattttgaacttctctgaagaaattctacagtgatgtgatactttgttttaaattttctactttttctggttattgcttgtttttttttttttttttttttttttycctccacacagagtctcactctgtcatccaggctagtgtgcagtggcctgatttcagctcgctgcaaactctgcctcccaggttcaagcgattctcctgcctcagcctcccgagtagctgggattataggcacgtgccaccacacctggctaatttttgtatatttagtagagacagggttttgttgtccagctggtctcaaactcctggcctcatgtgatctgcttgccttggcctcccgaagtgctgggattacaggcatgagccactgctcctggccttttttttaagacagggcctcctcagtctgttccctaggctggagtgcagtgtcatgatcatggctcactgcagccttaacctcctggctcaggtgatcctcccacctcagcctcctgagtagctggcaccacaagtgtgtgttaccacctcgggctaattttaaaaattatttgcagagatgaggtctccttttgttgcccaagctgatcttgaactcctgggctcaagcaatcctcccacctcagcctcccaaaattctgggattacaagcatgagccaccacactcagcctctttttttttttcttttttagagagatgatctcactgtgtcacccaggctgtactgcagtggtgccatcatagctcactgcagcatcgaacttctaggctcaagtgatcctcctgcctgtgccgcccaaagtgttggaattacaggcatgagccactgcttctagatggatgtcttttattggcgggggggaaagccctatatacgtatatatgtattttttactaattctaaaactgctaacccaagcaggacaaaatttaattgaataccaagaaaataaccatgccagattttcatgctaaatcagctaatactaacattgtttagatacgcaatttgaatgaactccatggtccaaagtcaaattacctatgataactcattctaataaacagttctatgcatctaaattggagagacaaaattggcatttaggaggatattaagtccaatgttatccatggactcatggagagctttgacccacctggcccttcctgagtcgtcgaagtttccattactaaaagctctgcagtcagtgactcatcatagatgagactaagtaatcccaattgcatataaatgtgtgcgtgtgtgtggcgaatgttctaaatgcgaaaatggtttatgaccaatgtttggtttgtcaaacccataatcaatcctgagaagataataaaaacttcaggtatatttctgccctggtgggccatttaaacatttatagaggtattttcttcacttgtcattttcagtgtatgttttctggtggtacagaatctttctcatgtagccaggcacagtggctcaccacttgtaatcctagcactttgggaagccaaggggggcggattgcctgggctcaggagttcaggaccagcctgggcaacatggtgaaaccacgtctctactaaaataaaaaataataataataataataaaaagccaggcctcatggcatgcacctgtagtcccagctacttgggaagctgaggcacaagaattgcttgaacctgggaggcagaggttgcagtgagccaagattgtgccactgcactccagcctgggcaacagagcaagactttgtctcaaaaaaaaaaaaaaaaagaagaagagatttgattatctctgtggcagagtgagaccctgtctcaaaaaaaaaaaaaaaaaaagtaataccacttgggcagccgggtgcastggctcacgcctgtaatcctcatactttggaaggccaaggtgggtggatcacctgaggtcaggagtttgagaccagcctggccaacgtggtgaaaccccatctctgctaaaaatacaaaaattaactgggcatggtgatgcccgcctataatcccagctactcgggaggctgaggcaggagaatcacttcaccatgggaggcggaggttgcagtgagccaagctcgtgccactgtattccagcttgggtgacagatcgagactctgtctcaaaaaaaaaaaaaaaagaagtaataccacttggaacatctttgtgcatataatttttcatactctggacaacttaattgggaaatattaacaaaagtaaaataggtctaattaataaagatgtttttaaggctgatagtgtcccacacyatctctcttgtaatattctagctactatattataaaggtggtggtaagaagagaaaggaaggttcttgtaggtagcacttctctgttccttattattctagacacgtaagtttatactgtgaataaacatattttcggttttgatttaaagtcacccccagaaaagtaatagtaattgcaacaggaagaccaattggaagaaagcttttactttctactggggatgaaaaagtagatagaagtaaactctcccggtgaccaaggtgtatgaaatgccattttaagctagctgtagtggccagaaggcactgggagagtcgagtaagagaaagaggtggcagtctctataatgagctagctgcagcagcaatgaacacagaggcagctatgagtgtgaatgatagacataagtctgtatacaactgtagttaaactgtctccagataagaaagttctagagcaactrtcctatatttttgaagaaaaaacaattctatctggggaagttttattcttcagaaagaaaaacttacggaatgggaaaatcaaccctatctaaatcaaccctgactagtcaacccaagtcaactctgagtatctctgaggtgaaagatgaagcatgctgatgggtgtcaaatccaatcttgtatgaataaaataagcatcggggaagcatagatgtcatcttctaaggcaaacattctgaggatctggcagcataaatccatcagttaatttataatataattggacaccactatggccaaagtaaaagacacggccaaatctggatcaccttacaattttcaagatgctttcaagatcccccttgycctgttatggctgagggaagcagtgatgggagtaggcaccatagtctgtaacccctccccttctgtctcggtacagacaaagcagataagctggggctctggtaatcttacacagtttacttcatgccaatttttatgctccatgagatccaggtaaactgagaatgctgtgcatctcctacatctaactacatcatttctaaatacttagaaatattttaagttttaatacttagaagtattttaagttaccgtaaagactttgaaactgtgacacaggtaccctcccctctgatgtttttcctagtcatcctgggtctcaggtagccacatggcacccaagatgggtatgaagggcaggtcctgtctgagtcctgaatttacgcacagctgtagacctcatgacagaagacagaaatgggaagacattgcctggaggacggaaccctcccaaaatagccaggaggcaaagctagggcaggggaaaaggggatatattgggcttgattctgccttgcagctggtggcctaggcattgagaatgtgtcctcatgcctcactgtgggcatacatccagacctctgactccagaggctcaaaaccaaaaacaagcaagcaagtatcaaattatatttaactgataattttgaagccatttctattttagtaacaatttacaactacctttatttactaaatattacatacaagtaacacatatagacacagacacaaagacagaagcagatattatagcttacataaaggattgtcatttgctggcttttgaatagtttttcttttccccattcagactatcattcttccattacctgtttcattgccctaaggagttgttagctaggcaaccttaaatttgcatttctaatgggacaactcttaggtgaaataaggtagaaaatttatatctcaaaagcacaacctaagactttaggcgtacatattgtaccctcatttgctcaaaccaaggaaaaaatgatgtgagtaaaaaatttcagttaagatgtccagaaaagcaccttaaacaaaggtttgacttgttacataaatttaaaactatggtaaaagtttctaatatacacaggcagacacccttacaaatggagatttcctttatagatgtaaatttcttttacagaagagtttcaggatagccagttaaatgccaggaaggtatattttagttgggtaggtggtttatttgacttagctactgtttcttggctaaaattactgagttcagggtagatggagcccattgaggaatagggcaaagaaaacagtactctgtgcttggactcagactggatagatctaaaaaagaagcaagtctgctttacccactggtttacattttatcaacattttatccaggatatcgttattttcactcttgaggcaggatagtrtttatgccaaaagtttagcagatttaattattcttgtgaattattcacctgagctttttatttgccttttttttttttttttttaaagacagggtttccctctgtgtaatcacaaaggcacagtcacagctgatttgcagcctttacctcctgggctcaagtgaatttcccacctcagcctcctgagtagctggaactacaggtgtacaccaccacatccagctgatttttaattttttgtagagaggagatctcactatgttgcataggcttgtcttgaactgctgtgctcaagcgatcttcctgctttgatctcccaacgtgttgggattacaggcatgagccaccacacctggccctatttgccttttatgaagtcttttaataaagcaataaaaatattgaaatgtttttagaagcttctgcacatcaataggcatccttgaagactaattsaggacccctcatttttaagtgctgtgttgttcattaggaacggtccattgtaattttaagttacaaagattttgccatttctgtaagtagttatttcttctgaggcctaatatttatacattctaccttatagctagaaggtagaatacggtgttcttcagatactaaggatccaatatttccctagaatcctggatttggtcctcagatccccttcatcaatttagttaatgatttttccctacctaagggtacaagaaaaagaatgtagaacacaaaaatctctgcaaatttctgaagtctgcacccactgtaatattaccatttctgctagtttctgcctgatcctggacatctgcagcctcttaactgaatccaagtcagttaattatcagatccaatccaatcatggatccagtccagtttctgttgtgacttccaaacccagttcggatcagaagtttgctcaaactcggttccaaacagaaatctgtcgagcttcagaatctcagcgagaacttaccacgatatcagttgcttccagaaagcaatggacatcgtgagtctgaggggtaccttgcttggtcactccatgctcctgggcatgacatctgttgaaaaccttagacatattaaatttaacagagtttaactgagcaaagaatgattcacaaattgggtagcccaggaaccagaataggttcagagaggctctggtgcagtcccatgattgaagatttatggacacaaaaaggaaagtgatgtacagaaaacagagatgaggtacagaaacagccagatttgttacagttcgggcatttggagtatttgaacatagtttgaacagttggctgcctttgattgactgaaactcggtaattagcacaaaagtaggttacgatctgtttatacatctagttaagtttcagttcactgtgtacagagaaacctttaggccaaacttaaaatatgtaaggaggtggctttaggttagacttaatttaacagatgttatatatattggttttcatccactgttcctgtcttgtaactcccatagcccttgttaaagtctttttgttacaatgttgggtgtgtcaggtctcatgtrtctagacttaatttaacaaatgttacatatattggttttcatccattgttcctggcttgtaactcccatagcccttgttaaagtctttttgttacaatgttgggtgtgtcaggtctcatgggcaggcctcaggaaacagaatttctcagacyttctcctatccatctctcatctgccccaagacaagaccctataatcttccctgcctttctgattgggagttataagaccctcctcagagggcgtcccaccctatccttggaggaaggaatgctgatattttgaaatttccataaaaacccaggaggactaggttccagaagcttcaggatggctcaacacgtggaggttcttggagggtggcctgcacaggaagggcatagaagccctgtgccccttcccccatacctcactctgtgcatctctttatctgtaatatcctttacaataaaccagtaaatgtaagtgtttcccaaagttctgtgagccctccagcaaattaatcaaacccaaagaggaggtcgtgggaacyccaacttgaaagccggtaagtcagaagttccagaggtctggacttgaaactggtatgtttgtttgttggcagggcagtcttggggactgagccctcatcctgggggatctgatgctatttccaggtagtgttggagctgatttggaggacacccagttggtgtccactgaagaattaattgcacggatttggtcacagaagactttggttgctgaccattgtagtagtatgagagaaaaagaaaaaccgtttgagagtttttcctagaaatgaaatacctagaaatgaaattactgaatgaaaagtattcagagtttmcattaaaaataaaaatggctgtatttccctacaagaatgtgataccatttgagattcatcagaaatgtgtgagaataatctgtccacttatcagcactggatagcaattgtttttattttttgtttagttaatttgttggatgaaaaatatttcattaagttgattgtcttttatttctagtgagattgcgcatcattttatttgacatcttgtgttcttgtaatgtgtgtagtatatattattattatcattattatttttttttgacacagagtctccatctgtcacccatgctggagtgccatggcgcaatcttggctcactgcaacctcttcctccctggctcaagtgatcctccagcctcagacacctgagtagctgggattacaggggtgcgtcaccatacctagctacttttttttgtattttttgtagagacagggttttgccatgttggccaggctgtatagcacatatttttaagcttattttttaatagggtttttttctcttaatgatttgaaggaactcttacatgttgttagtttttcctcccagtatgcaatttgctgtttgattttgtttatgatattgttttataaaaacttaaaattagtatacagtgaactcttttcattttttttttctttataagggcttggattttttatcttgtttggtacaaattttcttcacccaaatattataccaatttttttttcttaaataaaaacattctttccttttagctctgttatagaactgaacttgggtctgctcgcctggcacaataaggacataaccacactgaggttttgcagcagtagaaaggaaggcatttattttcaggatgctacgcaaagaggaccaggtagctaatgcttaaatcctgacctccccgatgatttgcaggtaagggtttttaaaggcagtggtaaatttctggatagcagaagttacagacaaaatcataaaccatacatggagggttacacactgattttggcctaaaaggttgggatatcttgaagcagtggtgtataggtcataggtacagtagaagattttctgatttgcagttggttaaggaggcaaagctttttctaaaaatttgagatcagcagaaaagaatgttagcactggctcatgggtataaycttctccaggcccctcagaaagaaatttagaacaaagaaggggagtcagagttcagtccccagttcctctctatatgaggttgctgtgctggcagatccttttggtgtgggcacaggtttctgaaaaacaactggagacatgttaaggtattatctttagtttttatagggaagcaaacattcttgtgactcttaacttccttggctatttttgttgttgttagagatggggtctcgctatgttgcccagactggtcttgaactcctggcctcaagtgatcctcccaccttggcctcccaaagagttgggattacaggtgtcagccaccatgctgggccagcttggctgttgttactgttacctgcttgtttatcaagttgcacatttatttttcagggctagctaggtgcctgaagtttcctttgaaataactgaagattttccttttttctatgcttggggtccctgcgtcatctcaattccccatcttttgtcacccatcaatcttgtggggtactggggtgcagactgctctgcctacttcctgttgaattggggcaaagattgaggactaggatatgaggatattaagtttcttttctttatttttttgagatggcatcttgctctgtcgcccaggctggagtgcagtggcatgatctcggctcactgtaacctctgcctcctgggttcaagcgattcttctgcctcagcctcctgagtagctgggactacaggtgtgcacctctacgcctggctattttttgtatttttagtagagacagagtttcctcatattagccaggctggtctcaaactcctgacctcgtgatccacccgcctcggcctcccaaagtgctgggattacaggtgtgagccaccgcccctggctgaggatagtaagttcctagcacggaattcaaggtatccatgagtcccaggcatggcaccatggtgctgaactgtcattatttgtattagtcactgctttattacattttaacacacatttggttatgatataaagcacaagaaaaattagcaagattgatatgcataactttagcaatccagaaaacatggattttattccatgaggaatccaagaaaagaaagaagaaaaccagtccttagggacagtcagggagatctgttgtaaccaagtgacttgttctctaatttattttagatgagtttctacctcagcagattcatttatataagtattgcatgtgggatttgcaaccatacacactcctccctgcttggctaagatgtaatctaaggctatcctattatctaagacacctgagccaatgaattaattcttttctgctagacagctattgctgctgaagtttccttagcaagaattcstaaagagagagatttctaatcatgtgctcataggatgccactccccaccaaggtaacaaagtccatccaaagaaataacccgcatccatctttttagtacctgggcaagaatagatttgtggatcccaaagtgagtatgtggacttgtttacttttaatgagttaatttacttgcagctaagatacgggatttctgacatgtttagagagcagacttctaaggagggagcagggctcttgctcctctcaagaggcaaaatcaagtaagccttttatatagaggcagagtctcattatttctggcaaatttgtttgaagcttcaagtgaagggacttccaaaataaaggaattcttttatataatatatatatatatatwtttttttggagacagtctccctctgtcacccaggctggagtgccatgtcttggctcactgcaacctccgcctcccaggttcaagcgattctcctgcctcagccttccgagtagctgagattacaggcacacgccaccacatctggctaatttttttgtatttttagtagagacagggtttcaccatgttggtcaggctggtctcgaactcctgacaccatgatctacccgcctcggcctcccaaagtgctgggattataggcatgagccaccgtgcctggccaggaattcttttatgtaatattctgaaaggggccctcagattatgatgattgaaggaacttgagtatcattgttctattagctgggtcagatgatatatctataggttacctgtctttgtcaacgtctcagaaattctaattataaaattgcccttttaatttgggaggatgaaagtccacaaggaagcataacaaaaaggcaattatatttatagttcagtgtgatcacctgaagtaattaagactccagggcagcacacagaatttgctaagccagtagtagacagagaaaataagaaaagtggccgggcatggaggctcacataaaaaactataaaaaactatatataaaactattaaaaaaactataaatatataaaactattaaaaactatatagtttaaactatataaaaaaatataaactagtttaaaactacataaactatatagttttaaactatatagtttaaaactacatgaactatatagtttaaaactacatagtttaaaactatatagtttaaaactacatagtttaaaactatatagtttaaaactacataaactatatagtttaaaactacataaactatatagtttaaaactacataaactatatagtttaaactagtttaaaactatatataaactagtttaaaactatatagtttatatagtttaaaactatataaactatatagtttaaaactatataaactatatagttttaaactatataaactatatagttttaaactatataaactatatagttttaaactatataaactatatagtttaaaactatatataaactatatagtttaaaactatatataaactatatagtttaaaactataaactatatagtttaaaactatatatataaactatagtttaaaactatataaatatagttttaaggcctcatatacatgttatatataatgtatatatagttatagttatataattttatatatatagttatatatacatacacaaatatggcctaaatattagttttaattagacttttgagtatagagttcttaaaaaaatatcctttcaaatctcttactatcagatttttagctgggacaaacagttgatatttctggcttttgaactcttttcaccccaaagatattctcccccatgaaactaagaagcgttagccagggttatgacttcaacaaggacacatgaggtctcgaaagaggtggaaagcagttttcacaagattcagagctgccccaaagacagcttaaagagaggaaaatttcgtcagccataaatggagtacagaccacatttctgtttggccatattctctagagcctcagtttctcagctgaccattcacacacacaacgtgtaccaaaaagcataccaaaaaacctgtaggctgcccccctcacagatggaggacaggaaatcaaaagctgcccatagaaggaaaaaggaacgataaatggcaaaagtcacacaaatattaaaccaaaaaatgatgtgttccttggctgggaattcaacccaggcagcctcagtgctttaccactgctgttcctggaggggatctaaagcaggcagttttgagcttgcaaaggattttaaccttgttttaggtgagatatttgttctttaatttagtcaagtgaattctcaaggctagtcatgacactattaagtgtcctttgtaaaatttgtttagaaaataacttttttttgtaaaagcaattgtttagagagatgcctgagattattttaaaatttaggggtccagtttaaaggttccccttttcaggcttttttctggagtcttaaaaaatactgtggccaagcactactgcaattaaaaaaaaatcwttttttttttttccttgggcccaaatctaaaaatggcccaattctgcagaatacaccctaatgggctacaaaggaaatagaacttgtgtttctcaaatgaaacaaaaccctggacaaggcattaaaggtttgtcgcaaaacctaggtgacaaacctttaatgccttggccaggtgttaagtattaaatagattttcaagcaagtaaatcacaatcaaattgtgatttttcaaggtttcagtcttcagctctgggatatctcccaccaagtgcattctgatgaagtagagcccaataccttgctgaagcaaggctggatttcctgctgaaaggaaaaatactatggggctatcacacatcaaccccccacttaccaaaagacatcttctcaggtgatttatttctaatgctgtgaaagtagaagcaccacaggccaacggtgtctgrttgcctgccaaatacacggatctgtccctgaataaaataattcaggcagctgctggattgggcccaagggtggctgcggccagggacttatgtggtacagatgaggcacccactccagacttttgtcccattttggttgccggtgtttagagaaccaaaccggagttggctcacccagtccaataaggccagatatccacaccaagattttgcagtggtagaaaggaaggcatggtgtttatttacagggtgtcaagcaaggaggaccaggtgactaacccttaaattctgacctcccctatgatttgcaggtaacagtttttaaaggcaggggtaaatttcaggatagcagacgagttcagtacccagttcctccttatctgaggtctgtgtgcccgcagatccttttgctgggagttcaggtttctgaaaaacaactgaagtgacagatgttgagatgttatctttagtttctgtagggaagcaaacgttctcatgactctgacttccttggctattttaaagttactattacttgcttattaagttgcatgtttactttccaaggctagctaggtgccagaaatttcccttgaaagaacttaatattttcttgtatttctatgcttaggggcccacaggcccttaaaaggtgtccctgttctgtttcagctctaagtaatctggaatttatatatgttgaaggtaaggtagacatggctattttttcctcactaaatgagtagcctattgtttgagcatcatttgttgagttgtggtagtaaatggcattgtaacagtattatatacactgctctgtttttagaaactcttggctttcattgatctgttggtgttcctgttagtacttcagcttcatttcagtcaccttaaaagtctgtatttttatttatttatttattattatttttttttgagatagagtctcgctctgttgcccgggctggagtgcagtggtgtaatcttggctcactgcaacctccgcctcctgggttcaagtgattcttgtgcctcagcctccagagtagctgggattacaggcacgcaccaccaacctggctaatttttgtatttttagtagcgaagggtttcgccatgttgggcaggctgatcatgaactcctgggctcaagtgatctgcctgccttagcctcccaaagtgctgggattagaggcgtgggccactacacccagcctaaagtctgtatttttatacctggtaaggcagttccttccccttgttcttcctttccttttctttctttttttttgtttttgagacagagtctcgctctgtcgccccggctggagtgcaatggcgcgatctcggctcactgcaagctccgcctccctggttcacaccattctcctgcctcagcctcccgggtagctgggactacaggtgccagccaccatgcccggctaattttttgtatttttagtagagacggggtttcaccgtgttagccaggatggtcttgatttcctgacctcgtgatccatccacctccaccttccaaagtgccgggattacaggcgtgagccaccgtgcccggccatctttttcaaaatgttcttggcatttttgtgtgttttggtccacatgaattttagaatcagtatgtcaagttccacaaaaaaatcttgttgggttttttttgttttgttttgtttttttgagaaggagtcttgccctgtcgcccaagttgtagtgcagtggcgggatctcggctcactgcaagctccgcctcccgagttcacgccattctcctgtctcagtcattctcctgcctcagcctcccgtatagctgggactacaggcgctcaccaccatgcctggctatttttatttttatttttttgtatttttagtagagacggggtttcactgtgttagccaggatggtctggatctccagaccttgtgatccgcccgtctcggcctcccaaagtgctaggattacaggcgtgagccaccgcatccggcccttgttggggttttttatgggaattgccttgaatttatagattaatttgggggaagaattggtatctttataatattggatgttcccacccagtaatatagtatgactgtttagtgaggtctttcatttcacctgtaaagttttcctaatgttggctgtttagtagtattgaaaagaatgtgttctagtgtcatgctacttagagtcggtctttgctaagccacaataaggttgggcaaataacagaccttttttgtgcttcagtttcctcatccataaaatgggaataactcatcaggattattgtgaagattaactgggttaagacatgtaagttaatacattaaaaatgtgagctattgttattaggtatatttatgcattttatagtttatattgctttggccaaagggattttaaaaaaatcttactttgatgtataggaaagctactgatttttgtttatagttctttgattttggctactttgctgaattctatttattaataatagtttttgggttttgtttttggtaattctcttgtyctaggtaataatatgttttgcagtgatttgttttagctttcgatatttgtaccttattattattattattattttttgagacggagtctcgctctgtcattcaggctagagtgccgtggcgctatctcggctcactgcaagctccgcctcccgggttcacgccattctcctgccccagcctcctgagtagctgggactacaggcgcctgccaccacgcctgtctaattttctttttttgtatttttagtagagacggggtttcactgtgttagccaggatggtcttgatattctgaccttgtgatccgcccgccttggcctctcaaagtgctgggattacaggcgtgggccaccgcgccccaccgtaattattttttatttatatacattttgcatcttttttcatttattaggacctccaatataatattgaatagtagtgacgataaaggacattttgttcatgactgtctttaaaatggatttgatgttgatttatagacgtgatcctccataaagctaagggctttatgtgtaggttcttaatttgctaaggagtgagttgtgtatttttacaaaatcatttttattgtacaaatcataaatgaatattttttattacaaaatgagaggtgacagcgtgctggcagccctcacagccctcgcttgctcttggcgcctcctcggcctcggtgcccactctggctgtgcttgaggggctcttcaggccgccgctgcactgtgggagcccgttcctgggatggcggaggctggagccggctccctcagcctgcggggaggtgtggagggagaggcacgggcgggaaccggggttgcacgaggggcttgtgagccagctagagttccaggtgggcgtgggcttggcgggcccgcactcagagtggccgctggcccctggcagtgaggggcttagcacccaggccagcagctgcggagggtgcgtcaggtcacccagcagtgccagcccactggcgctgcgctcgatttctcgccgggccttagctgactccccgcagggcagggctcgggacctgcagcccgccgtgcctgagcctcccaccccgccgtggtctcctgcactccccgagcctccccaacgagcgccgccccctgctccacggcgcccagtcccatccatcgcccaagggctgaggagygcgggcgcaaggcaggggattggcaggcagttccacctgctggcccggtgctggatccactgggtgaagccagctgggatcctgagtctagtggggactcggagaacctttatgtctagctggggggattgtggatacaccagtcagcactctgtgcctagctcgaggttaatgaacacaccaatcagcaccctgtgtctagctcagggtttgtgaattcaccaatcagcactctgtgtctagctcaaggtttgtaaatgcaccaatctgcactctgtgtctagctgatctggtggggacttggagaacctttatgtctagctaaaggattgtgaatgcaccaatcggcactctgtgtctatctcaaggtttgtgaatgcaccaatcagcactctgtgtctagctcagggtttgtaaatgcaccaatcagcactctgtatctagctaatctagtggggaggtggagaacttttgtgtctagctcaggaattgtaaacacaccaatcagcatcctgtcaaaatggaccaatcagctctctgtagaacagaccaatcggctctctgtaaaatggaccaatcagcaggatgtgggtggggccagataagaataaaagcaggctgcaggctcctggggtgataacccacttgggtcgagttccatcgctgttggcgataaatcttgttggtgttcactttttgggttctcactacctttatgagytataacactcaccctgaaggtctgcagcttcactcctgaagccagcgagagtacgaacccacaggcaggaagaaactctgaacacatccgaacattggaaagaacaaactccaaacaagccgcttttaagaactgtaacactcaccgcggggctccgcggcttcattcytgaagtcagtgagaccaagaacccaacaattccagacacaaaaagagtgaaaatgttttaagaattataaagtgtcggctgtgcacggtggctcatgtctgtaattcctgcackttgggagaccgaggcgggtggatcacttgaggtcaggaatttgagaccagcctggccaacatggtgaaaaccccgtctctattaaaaataaaaaaattaaccaggtgcggtggtgcacgcctgtggtcccagctacccgggagcttaaggcaggagaatcactttgaacctgggaagtggaggttgcagtgagccgagacggcaccactgcactccaacctgggcgtcagagtgaggcttggtctcaaaaaaaaaaaaattataaagtgtaaaatatctttgtatctctagtttttctcctttccccagatatatacattaccattccatttgatttgtgtacttttagttctgttgttgtaactttatatgcatttaatggatacatgttgtacacatagctttcttttttttttaaattaggtgttagattttgtctcattttgtttcattaagtagatattaagtacctactatgtatcaggtyccctccaggcgttaacattcttttgtttattcaatatctgtttattaaatgtttggtatatatatgcctggtgttgtcccaggatatagctgtgaaggaaagaaaagctctgtcctcagagataacattctaatggtgcaggcagaaaataaaatcaagtaatgataaatggtgcgaagaaggttaaagtaggataaaagagaatagaaatgggcgaaagagctattttaggtagtgtggtcagagaaggcatttctgaaaacgggacatttcttttcttttcttttcttttttttgtgacggagtctcgctctgtcgcccaggctggagtgctgtggtgcaatcctggctcactgcaacctccgcctcccgggttcgagtgattctcctgcttcagcttcctgagtagctgggactacaggcgtatgccaccacacaagctaatrtttgtattcttaatagagtcgggttttcgccattgttggccaggctggtctttaactcccgacctcaagtgatctgcccgccttggccttccgaagtgctgggattacgggtgtgagccactgcggccgggccaaaaggagacatttcatgaaagacttgaaagaggtagagcagtcgggcacatactttatctgggtcaagggcccctaaggccaacagaacagcaagcacraaggccctggactgagagtctgttggcagtgtttaggaaacaacaataaagtcatttgtttagagcaaacagaatgaaggaagagtagtgggaaagaaggttggagaggtaaatgagaacgagatyatgttgagcattgtataggccatggtaaggattttggattttaagtatgatgggaagccaatkatgaattttgaaaagggaaatggccttgtattaatttgctaaggctgccataacaaaatatcaaagacagagtagcttaaataacagctctggggtctagaagttcaagatcaagctgtcagcctatttggtttccttccttccttccttccttccttccttccttccttccttccttccttccttccttccttccttccttctttcctccctccctcccccctcctccccttcccccctcccccctccctccgtccctcccttccggaattcctttcttcctgagtcttgctctgtcgcccaggctggagtgcagtggcgccatctcggctcactgcagccttcgcctcccgggttcaagcaattctgcctcagcctcccgagtagctgagacagactacaggcacgcgccgccatgcctggctaatttttttgtatttttagtagagacggggtttcaccatgttggccaggatggtcttgatatcctgacctcatgatccgtcctcttcggccctattcggtttcttctgaggcctttctggcttgcggttggccttctccttggtatctcctcacatggtcttttctctgtgtgcacacatatctggtgtaccatcgtgtttccaaatttcttcattttataaggataccattcagattggattcagacctactttagaggcctgatgtttagcttaattacctctttaaaggccctgtctctaaatacaatcacatcctgaggtagtagggtttaaggattcaacataggattttggggggaacacatttcagcccatagcagggctcatttgctttacttagcctgctgakaattgacttgaggtgtgttggggcgtcgggggatggtggtggtggaggcgagtatagccagggtattgagrttagaatggaaacagagagttaggaggagattagacacgatgacaacatgctctaaggaaatagctgtagagttgatgagaagttatcagaattgtgatttattttgaaagtagaatgcataggattattttgatagtagatttttagattttttctgttctgtttatgaaaaatttaagctggaaaaaaaatgcaccttacaaagaccaagtaaagttccccttccctggctttttttttttttcccccaacctgagytgrtatctgatacagatattgggactacctcaaactgcttctctatgattctgcatctctgagattcatcttagaatttatttctggacagattgttcatattcttggaaaatagctcttggattttaacttgtcctgctgttgggttgtgtaagggaggaaaataatttttttcaaccctcataagttattatttggaatggtcccctgtaacaaaagaaaaacaaatataagtttgttaacatgtataattcataaatacatgggagatactcagaatgagttggcttttaattcctgcttatatagtatcttcaacaaatgtttagcaaagtgtcaagacaaagaaaaaggactttgagtctgtaggggcagcaacttgtagaaaggcaaataatggcaggcaaagcataattagtaaacttgttaatgtggattcctttggtgtcgtatccagaccaatacaggtgtaaagttgtatttggtggttaacttgtgttcttccacggtaaacaggggttgggtttttttttttttttttaaccttttttgtctttggagtaaatttatgtcttgcttttaggcaagtggatagcagagagctttcctgcatctgctttttaattgccttcagttcaacaatccttatgccaaggaggcatatttagaggtggcatattgctgtctacttctggtggtcttgaacattttaatccctctgtatccttacatgttgccctgccctcccaccccaacaagtagttagcttttttttttttttttttttttgagacaggtttttgctctgttgcccaggctggagtgcagtggcatgaacgtggctcacggcaacttccatgtcccgggcttaagccatcctcccacctcagcctctggagtagctgggaccatagatacaccatgcctagctaatttttgtatttttttttgtagagatggggttttgccatgttacccaggctgatcttgaactcctggactccagcaatctacctgcctcggcttcccaaagtgcggggattataggcgcaagccactgtgccctgccctgttttgcattttgtgtttatcattcttttgcttaaaaaaagttggatatatatgtatacctaaataatatactgtttacttttgcttgttttttggcattatgtgaatggtactcatatagtatttttttgtgatttgcttttttcactcatgtttttaagattaaccactgtcgtagtttgttgctgaattctgtatttccctgtgttacaatattccactgtgaagaaaattttcattatatgaatataccacagtttttttattctgctgtcagtagacttggattgcttccagtttacataattgagcttattgccctgaggctctctttgctcttatttattgatctgaagcttagactttttctagggtttcctgggaagaaccaatatcttactacatgtttataggtctgtggttttctccattaatctgatcaaatttgcatgtcttctaatgatttctaaaaatttgtaatctgctaacagtgtcctttcctgttttctgtctgtcatgattttattttcaaaaaccaaaaaaaaaaaaaccaaacattttttctatcacttaaatgtgattattttttattatttatttattaatttttgggacagggtctcatttttcacccagactggagtaaagtggcccgatctgggctcgctgcagcctggacctcctgggctcaaatcatcctcccaacctcagcctcctaagtagatgggactacaggcgcatgccaccatgccaggctaattttttgtattttttgtagaaatgaggtttcgctacgttgcctgctggtcttgaactcctgagctccaaatgtgattattttatatggaaagtagataaatcccagtgttcagtcttccatcttaggccaaaggttctcttccttgtctttctttgcatgttattcttagtttttgcttgactttttaagtgtaccttgtcttagacgccttccctgactgcttgtttcttacattctgtatttatctctgtcattctgtattatactggctcatctcattattagacagtgaatgcctgatgrtgaggaattttgttttatcctttttatccttaatgcagcatgatatctgatatgtaaagggtgctaaataaatgtttattgaataaatacatgaaaaaattagtataaatggggctgaatgcgatggcttatgcctgtagtcccagcactttgtggggccaagatgggtggattgcttgagcccaggagttcaagaccagcttgggtaacatggcaaaaccctgtctctaaaaaaatacaaaaattagccaggtatggtggcctgtgcctgtgatcccagctactctggagactgaggtgggaggattgcctgagcccaggtggtcgaggctgcagtgagctgagatcgtgccactgcactctagcctacacaacagagtgagaccttgtctcaaagaaaaaggaaaaaaaaaattagtgtaaatgggagtggtctgtaatagatacctagtcatcaaactggcacagtagttttgcagataagaatcaggagcttgagatggtggcacatgcctgtaatcccagccactcaggaggctgaggtgagctgcttgagcccaagagtttaaaatcagcctgggcagtaaagcaaactctgtctcaaaaaaagcagaataatcttcctgcggggctaccagtctgtgggggatttcattttcatagagatataaccactttttagttcataaaggcagctttggagactgatatgtcaaacattttatagaaaagaaaatcagcagtttaattttgtgtgattttgctttaatattaagctgacatgactgttctgtatattgagggatacaatttatcttagcctaagtcttctggtatgatagaatgtttaaatacttacaaactgagaaataggggaggctgagtggtgagttgcatatctttagctactaaaatgtgttttttgaataggtaaatatatttatgtagttcaaaatttaaaaatacaaacagcgtatattatgaagtgttcttaccttcatttccctccagctgttcaaaaactgattagcttttggggttccctctccagagcaaccaattttattagtttacaaatagttgtgtgtgtgtgtgtttgtacttttacttggattctttttttaaaattctgctaagctgattacttgtattggtgtaaagaacagctgaatcaaaatgtgtgattttttttttctccccccagatacatcaaattacagaatggcttgcaggcacttctgatttcagacctaagtaatatggaaggtaaaacaggaaatacaacagatgatgaagaagaagargaggwggwggaagaagaagaagatgatgatgaagattctggagctgaaatagaagatgaygatgaagagggttttgatgatgaagatgagtttgatgatgaacatgatgatgatcttgatactgaggataatgaattggaagaattagaagagagagcagaagctagaaaaaaaactactgaaaaacaggtgcgagtcatgtctgttttcttctaatttgggaattctttgggtaacttctaaactcaagctttattttttaatggcaaaaaggaagtatatagttatcttttggtcttcagtaaaggtctattctgtatcaggattacattttgaaaacattttcctccaattataaaagtagtaaatgctcattatataaactaatggaatataaagaaaacaaaaatataaaaatcaccyatagctatatctctcagaggtaatcaacactcagaggtatttgaatttatgtgtatttgtatacattatatgttttaaaaacaaatactggtagatgaggagctgcagaattcttagcctggattagagaaataagagtatgttatccttggtgagactggaaaaagaagaagaaaagaatggggctagtgtgaaatctttacatgggcctagggctctaagagttattgtatgggtggcttctatatagataattagataattgagtttgatttagcactttatatgggaacgcaaaggtctggacaaataagtactttggaagagttgaaatagaaactgggcagttaagcttatttaatatgtaacaaccatcagtggatagataaataagtcttgatagggagaatttcttaatatcttttgaagaatacctccattttcatagtagggagtacccagaggataattttcggagccagtacagtggaattgaccagcaaaagttagttaaagctagtttcttgaatattgataatatattcaacatggtacagtctacatacaaagaggccgagatgggcagatcacttgagtccaggagttctgagactagcctaggtaatgtggtgaaaccctgtctctctaaaacattaaaaaaaattagctgggtgtggtggcacatgcctgtggttccagctacttgacaggctgaagatgggaggatcacctgagcccagggaggttaaggttgcagtgagctttgattacaccactgcactccaccctggccaacagagtgagactttgtctcaaaaaaaaaaaaaaaaaagaaaaagaaaaaaagtggtcacccttaaaggtgggaagagttgaggtataagtagtagatatgatttaatagttattcttcttggaaaaaattattttttaaaaagaaagattgtaccagttttttactaagttgttggattgagtaatatttttaagaagctttttcctgtttactactcagattattagtgatcctgtttttgggtagcatgatagaccaagtattaaatagttttaacttggaaggctgtagagatgaacatcaaaacactgggggaaaaaaaggtatatatatgtcacttgatagtctgtatgctaaggtctctatgaacagattggaaattaatagattcacttttaacttaaaatagatctcataattccaaatagagcattaataggaagaaattataaaagtcacaaaaaaaaagaacactgacagtcaggaaacctgggttctacttctggctctgttcctttctttctgcgtgattttaggtgttttcattttctttcttttttttctcagttttaaaacaagaatataaaattctgaggcctattttagctctaagccagaccatgttataacttcttaactgaatacttcttatctatactttttttctatatctttccatctatctgtaagtagcttttcccatgatctgacttgtttatatttcctattaactgacaaagcatttaaaaacagttaaaaattgtctcgacaggcattttaaatgtcaagacattataaaatactttagatttatacagcaattgtgaacacctttgacaaatgaacatgtctgttcagcctttttggtacccctttttattttgcttaggtagatcaaattctaagttgatcttttctagcagcagggtcagagtctagtgatcgtttttaaaatggcttagatgctacctttcttttctgagaactcagtgtgatataatccttataagatattgacagctaattttatggattatcctaccgggacagtggaacctaagtagtttgaagacgagaaattgttttgattcagaagcaatgggttcactagtgaaaggaaagatcccacgatcgtaagtggtaaatgtttatatttgttgaataactctctgaaaaaaggaaataaagtagattagccttggtaagaggtggcttaagagtggttttatgatctaagttttatttgaaaaatgtgtgaaacttgtttaaggtaaatgtgagaattaataaaggaattgagaagaaagatatttgatcgttttttgaataacatttacctaattaagaagttaactacttttctgaggcatcttttttatccctctccgttttcctcctcccaaaagaagttgttcttgattttaaaagtttgataaattaacaaggttgaaatttgaatatgatatacattgaattaagatttgttcagggctttcttaattcagttctcaagtatgaatttctcaggtctgaattttttaggtagaaaattctcaagtatgaatttcttttctagcaattgcagagcctgtttttgctgtggtcaaagctgactgatagactgtggtttaagtcaacttattcaaaaatgtcttcaaccctgctggtcgagacaagaaatctttatggggtagttggagctgaaagcaggttaggcacctattaaaacatcacagaacaggttakattgtggtttgaagaactggatattccccaatgttttaactgagtttatgtgcctaagtcttcaaaatggggtttatagtatcaagtgaggctgtttggttcttctgaaaacacactyattttctgacacatggctagactttatgccaggtacatgctatttttgaaaagctcttttttaagaggtaactgtttattaaaacaatctgtttcaccaaatatgttagccctgtaaaattgacatttacaaaagtttgaagaaaacaaatttgggaaagttaataattcgcctttctatcttcaaggattcaaattgaccgttttttctcctttttttgtcttttaacttactgtaattatgccccaatagttcgggtgcagtggctcacgcctataatcccagcactttgagaggctgaggtgggaggattgtttgagtccaggagtttgagaccagcctgggcctcatagcaagacccctgtcttaaaaaaaaaaaaaaaaaaaagtcccaatcattttaagtgcagtttggtgtacctcttggccatcaattttgttaaaaactctgattttcccaaagtattgggagaatatatactgataagtaatatatgctgtatatcttcaattagaagtgaagaactaaaaagcctctttaaaatttagttatactttttaatagctaccgattttatctttttttatcacttactatttttgttagatgttttcctaaaatgttatcttattctatcttaacaaaattttctaagttacatgttgacaggtttcacatctagtaactgagtcactcaacacaaagcttttaattgcttagagatcttcagagatatctatctagatatgttacttccgcagatttccaaaatctagtaattcagggaaaaaacttggttcagaattatgaaatgctgacatgaaatgatatttgggtgggctgtccagtccctcttccctttttttctgtctgtttctgctttttttccttaggtctgcacctgttcagcatttggcaggatggcaagcggaggagcagcagggtgaaactgacacagttctggtgagtttcactttgctgctcctcctgattctcagggaaagaattttgttactcctattggaaaacatccatctccaaatgaatccttaagataagatgcgaatattattcctttngggttgactcaactatttgtatgtgttctaattactccagtctgcagcggctctttgtgttggagttgggagtttcgctgatccagatgacctgccggggctggcacactttttggagcacagtaagaatttgtaaaatatcattcctggtgtgtttttttcccccctccaaacttatatgaattgatatcaaagattagcaagtgatttgacagaagtatgatatatttagcaagagaaaaggctaagaaaaaatccttgatttatgaatatcgtgggggaaacaatctgagtgtacttatattgagagttagaatgaaaccacacagaaaacttttaaactgtagatgtcactattgttgagctatgttawggccaacggatcaggagatgattgccattttctaggaaatgaccagtcctggggagggcagtcccttccagggttagcaaggcccccagccaaacatcagaaatacaggaattccctgggtgaggtggctcacgcctgtaatcccagcactctgggaggctgaggtgggtggatcacttgaagtcaggagttcgagaccagcctggccaacatggtgaaaccccatctctactaaaaatacaaaaattagttgggcrtggtggcatacacctgtagtcccagctacttgggaatctgaggcaagagaatcatttgaacctgggaggtagaggttgcagtgagctgaggctgtgccactgtactccagcttgggtgatagagcaagactgtctcaaaaaaaaaaaaaaaaaaacaagaaacaaaaaaaacctagaaattcaaaaggcatgattaatataaaaacaaaacaatagaagcttttcatttaatttggaatgtacctaaataaaacttacacggggccgggcgcggtggctcactcctgtaatcccagcactttgggaagccaaggcaggtggatcacctgaggtcaggagttcgagaccagcctggccaacatggtgaaactccatctctacaaaaacacaaaaattagccgggcatggtggcgcacacctagagttccagctgctctggaggctgaggcaggagaatcacttgaatccaagaggcggaggttgyagtgagccgagatcacgccattgcactccaacctgggtgacggagcgagactccagctcaaaaacaaacaaacaaacaaaaaaactctatgtggatgttatatagttacaaatatttatttttattttacaaatatttattttaaattactctttttttaatggtctggttttctaaagtatttgagggtatacttcttactttgtgaatttttatagtagccattaatctgcatatgtttgtgcttaaattttaatctccttaaatttaattgaagagattaagttgtaacagcagtagcagttaatctgcatatatgtttgtgaatttgtttgaattttaatctaattaataaaaggtgaattttaatctatttagacttaaatatatttgtgatctctttataagttatatgttcgtcttatctttctttaaagatgaaattttttttttttagtataaaagtaacatgagcataatagaaagttacaaaatcaaatgtaatgaagaaagtattatttagggtcaggtgtggtggctcacgcctgtaatcccagcactttgggaggccgaggtgggcagatcacttgaggtcaggagttggagaccagcctgggcaacctggtgaaaccccatctctactaaaaatacaaaaaattagccaggcatggtggcaagtgcctgtaatccagctacttgggaggctgagacacttgaacccaggaggttcaagaatcacttgaacccaggaggcagagtttgcagtgagccaagattgcaccactgtgctccatcctgggcaacagagtgagactctgtctcaaagaaaaaaaaaagaattcagacataaccatttgatgtgttggtctattttctttcagtttttctatgcatataagaaagttcatgtgtgataaaaatattttctatatctttgtgttgtgtgactttgtgttctttccatttagtggtattcatgggtagtttgaaatatccagatgagaatggatttgatgccttcctgaagaagcatgggggtagtgataatgcctcaactgattgtgaacgcactgtctttcagtttgatgtccagaggaagtacttcaaggaagctcttgataggtaactaactctaaatatactttaattttaatgatctaatggcactttgcaaatgtaaatagagtgttcttgtacagtagaattgtcacaatactttacttggaccagtcatggtgactcatgcctgtaactcaagtactttgggaggctgaggtagaaggctcgcttaaagccaggagtttgagaccagcttgggcaaaatagtaagaacctgtctctacaaaaataagtaaataaaaaattagccaagcatgwtggtgagtgcctgtagtccttggyactcaggaggctgaggtggaaggattgcttgggtccaggaattcgaggctgtagtgagctacagtcacaccactgcactccagcctgggtgacagagtttgtttgagaccctgtctcaaacaaaactttatttggagaaaaaagctgttaaactgttaaatacactttgactcttgttctattatatatagtctttgtattaaagattaaaataaaagtcaacaccttttgggttttattaattttattaattatgtattctctgttgactcattatgactttttttttttttttttaagagatatggtcttgccatggtgcctaggctggagtgctgtggtgcaattggccatcaattgcatgaatgcatggctcagtgcaacctcagcctcccaggctgaatgtgccaccgctcccagctaatttttaaatttttttgtagaattgggagtctctctgtattgcccaggctggtttcaaactcctggcctcaagtgatcctcctgcctcagcctctcaaagtgctgggattataggtgtgagccactttgcccagccacttaaaaaacagaatttagtagaaaatatggagaaacagagaagcaaaaaagggataagattgcctccaactttataatctagagataaccaccattaatgttttggtatagacccatctatattttttaaagtataccgatcatattgttcatacccttttataattgttaattttaagcaagatawatcattttaacttacmtaatttataaaacatgatttttagtgattgtatgttatttacattgtatagaagtaccataaggtgtttaatcagttacatatgattggacagttgagttgtttccagttttctaatactgtgatgattatcctgatctctgtgaatatccttaattatttctattaagttctaagmagtgaaattgctgagtatatttgcaaatatatttttaagactttttttttctttaagcttttgaaattcattgcaaaattgttttccagaaagtttgtcagtacaatagtagaagtttgagattacagggttgcagaccaaagtctaccccrgaaaaaagtagaaaagtagaaaaaagttatacctaattctagatatatgcaagattgaaatgtaaaagaaaaaagaaacctcacgtttgtctagtataatgtaagctccttcagagcaggaatttttatctattttttgttgatacatctgcaaatcaataatttggtagatactcagatttgttaaatgaattaatgcagttcctttatagcaaaaattaccataaaatcaaaagataaatgaccaaaaaaaattttttttaaacatgatagagatctaatattttttttaaaaattggcctggtgtggtggctcacacctgtaatcccaacactttggggggccgaggtgggcggataacttgaggccaggagttcgagaccagcctggccaacacggtgaaaccctgtctctactaaaaacacaaaaattagctgggcttggtagcatgtgcgtgtaatttcagctacttgggaggctgagacaggagaattgcttgaacctaggaggcggaggttgcagtgagctgagatcatgccatagcactccagcctgagtgacagagtgggactctgtctcaaaaacaaaataaaataaaaaagataaaataaaaagaaattatctcttttcttaagagattaatttgatctggaaaaatcctttggacatattcctataaattggaagcatatgccactatttatttattttttttttggagacagtctcactctgttgcccaggctggagtgcagtgrtgtgatctcggctgactgcagcctcatgcctataattccagcactttgggaggccaaggtgtgtggatcacttgagcccagraattcgagaccagcctggccaacatggtgaaaccccatctctactaaaaatacaaaaattagctgggtgtggtggcgcaggcctgtaatcccagctgcttgggaggctgaggcacgagaattgcttgaacctgggagacggaggttgcagtgagctgagatcgcaccactgtactccagcctgggtgatggaccgagaccctgtctcaaaaaaaaaaaaaagaaagataaatcaatgaaggcaatgcaaatgatgcctgagatgatctttcctataaatttagacaggatcagcaataccttcagaggagactttaaccatacaactttgaagaaaactgcatctttactcttgttacagagttctcagctcttaagttttacagaatccaaacaggtctttgtatgtgtgaagaawtcttaagcagaagacaagttgaatttttacaactttatatttagctttgtccatatacaaagaaggaaaaataactgattttattgggaaaaaggataggcaaatggtatgtatgatatgaatacattctggccatctcagagatgatgaaatttggtataaaatgtagttaagaaatttgttttgtttccttttaaagagttgttctaaatatgttttgtacaaggactgcttcagcatctaagaatatcaccttacacatttatttttatttaaaaagaaagccacccaataagaaagccactgcattaataggataaattaatgagaatatcaaatcataaatttatgccataagtagagcattatagggtgcaaatactataataaatgctataatattatacttctacaatgtataaggaaaagcctttatacgtgtgtaatatgctcttatataacatggattaagtacctgtttttaataggttagcaaaatctgattccctcacacaggccacattgtttataagtatcttttaaataaacagctgaggaaatgactaaatttttactccagttaagtaagtgagcatggaagcygtctttaccatggtggcgtcttctattttcagtaaatttgaactttattttatcagtatttcatggtaagagtgacaaatatcaaagcttaggatgtccacttctaacaggagaccctccccattataagcgggaatacaaaatcttcactttcaggttgtgaaaaaggatgaggcgtcctgagtagttatagcctagattccaagtgcctgagtattctggggaaccccaagtcttgattgtagcttcatgggcagaactggtagtgttcccaggagcctgggagaagcaaacataaggcatctcaaaaggaagatgccttccttctaggccctaaattgttacaaatattttttcaagtaaaataaccaacattcagtcaaaaataagcaggtactcaggaaaataatacaacatgattgagaacagataacacaaacagattctgagacatctcaagtactggcatagttacacacaatttctaaaataattatactttctattttttaagaaataaaggccagacgcagtggctcatgcctgtaatctcagcactttgggaggccgaggcgggtggatcacgaggtcaggagtttgaaaccagcctggctaatatggtgaaaccccatatctactaaaaatacaaaaattagccgggtccggtggcgggtgcctgtagccccagctacttgggaggctgaggcaggagaatcgcttgaacgtgggaggcagagcttgcagtgagccgaratagtgccactgcactctagcctgggtgacagagcgagactctgtcacaaaaaaaaaaaaaaaaagaaataaaagacaaatttgaatatacttgcaaggaataagaaactgtcaaatatgacctaggaaatttgtaaaatgaaaagatacatcttgaactgaactatgataaaaaaaattgaaaatgtcatggacaagtttaagagtaaatagagttgaagatagaattagtaagccagaagataagacagaaggaattaacccaagtatagcataaagaacatatataacccaaatatagcatatagcacaaaattaaaaatacaaagaatatgaagcatagaggatagaatgaaaacatcccatgtattttacttgtagttgtagaaggaggagagagaaaattgaagtagagacaacagttgaagggttgatcactggaaaattttcagaacctgttgtaagacatcaaatcagaggttaaagtctaataacttccaaaaggatacattagaagaaatatggaaaatttttgccagataaagagaaaattttcttcaaaggaagatgagttacacttacagatgactactcaacttcgtgctctgaaggaaaataactaccaactaataactagaatcataaattgtacactaaataaaaatatcttttaagaatgttagtaggctgggcatggtgactcatgcctataatcccagcactttggaaggccaaggcaggtggatcacttgagcccagcagctggagaccagtctgggtaacatggtgagggaaaaaaattagcagggcatgatggtacatgcctgtagcctcagctacttgggatgctgaggtgggaggatcacctgagcctggggagttcaaggctccagtgagccgtgatgtgccactacacactccagtctgggtgacagaattaaataaaattagtttcattatttaagtcaacagaaattatccaacccatcattaatcataccaagtactgaaaagaaaaaaaatgccccaatatatctagcaggtagttaagttaaaagttaccttattgcaagcaaaagttaaaagttttttaaagaagcctgagcaatatagggagaccctgtctctataaaaaatttaaagatttwaaaaaaaatggtagtgcacayctctagtctcagctacttyggaggttgaggcaggaggattgcttgaacccggcagtttgaggccgcagtgagcagtgattgtgccactgcattctagcctgagtgatagagtgagacactatatccaaaaaaaaaaaaaaaaaagtttactaaacattttaggaaattaattttttaaatcattctattttgctggaaaaacaccaatacaccaatctttgaataatttttaacaatttaattgcattgctattatgtatttatataagtggtaatttgtatatgtaatttgatacatcacagtttatataattaaaaattaatttaaaaagcagatgaaattataagattaacttaaataccaagtctttaaaattctaatttaacttttaactgaaacgtttttagtcatctgtaaacttgcattgaactaaaaaagtaagctttatatactctataaaaacatggatatacataacattacataaatagactatctgtgatattacaattttacaaaggaatgaataggagaacatttccgaaaaggctcctaagggttgaaaatggaaataaaaagggttgataaacattgggttagaaataggtatataggtaataaaactataaagaaaaggagagaaattactgctatacattcaggatatttcttgaggtargggtaggagctgggtgcttctagagtgttgactatggtctgtttcttcacctgggtgggccactcaggtgtagtttatatgttcatgttttgttaacttttctgtatgattgttattaaatatatttcacaatgaaaaagttaaagtaacatgtagatattagtttaaaatatagaaatgcagattatttagattttatatacttaggattgtgaaytaaatctccaacttagtaagtttcttaattaaaataatagatgttgattgatgaaagtgaacaaaaayggaaatgccagttttgttttttgttcagatgggcgcagttcttcatccacccactaatgatcagagatgcaattgaccgtgaagttgaagctgttgatagtggtaagaggagtactttatgtgtaactacagttttttccttcatgaaaccagttacttattacatttatccttctttatctctagaccattttatctttatattttaaaggactaaattgaaatatgtgttatgtttgttcctgaagtcattaaacatctaattcagtgtagatttgaagtaaatgaaaaggatggtggattttagttttttcatcctttgtttttcgaaggttttaccataggggctaatcttttgagattcaaagattgaagactataaaggaaaagaatgtgcttatatagggtgaggcttcattatagatctgtgctataaatattccttaattacatagtaccaataaatatcaccattgtatattatccctgcttgatttatttaagtattagaagcatttaatactagacttgaggggacttccagttcatataggttaggcttggcttatagccactgcaagtctctgtatttgttccactttttgtagtatttccctccttggtttgatgcagtgtctagttctaataatgatgtaaagcatttactaggctgagtaaactacagatggctagagtgatctatctggaagtcaacagacccctgtttaacttacagaagtgtctagctgtggcattcagtttatttgtaaaaaaggatggaatggttaagctcctcctagctgtagtagctccttggaaatcaaggatttattttctttatttttttacttgcctaccacagtgtctgttttaccttaaacccagttaaatacctgttgaatggatgaaaaaacaaaacaactaaggataactaaaagcacttttcatattttgagactcaagaactgttatctgtgtcttaaatgctttctagtatgtttttctttatacagtttctagagtgggttgacaccagtgtttaaacaagcagacctttaattagattttacaattttaagccagaatatattttattatgctttgaaaaattatgctgaaagaaatatatatgtatatacacacacagtatggagttttggtttatgctgaactaaagtaaaaattctgttgtgcttttgttcatgatctgcctgcttcggcctcccagagtgctgggattacaggtgtgagccactgcgcccggctgakaaattatttttaataattgactttttattttaatgatggtttatactcacataaacatatataattgcctgcatagtatgtcttagtgattgagatgaaaggcatgtccaatgcctttttaaatcttaattatgtgtcaaagtgcagtctctatttttatttacttacttcttcatttttaatgtttgtttcctttccaaatatggtctctaagtgttcagatatttatactctatttttatcagttgcaaggggtcttaaatcacttttcgtagatatgtttacatgtctgctatattacctgttattgcagaaacatggtggcttaaaataaaacatttattttcttacagttttggaggaatggaatcaggtacgttagataacttcctcaaggttgttgagcttagtgtcagaactgcagttctagcggtttttagtccatttgggctgccataatggaatcccacagaccgggtggcttataaaccacagaattgtttcttacagttttggaggctgagaagtccaagatcaaagaactggcagatttggtgtctggtgacagcctgctctctggttcatagaaaactgccttcactctttgtcctcatacagcagaaggggcaagggagcactctgaggtctcttttacaagggactaatccattcatgagggctctgccctcattacctaatcatttctcattggcccctacctccaaataccatcacattggggattaagtttcaacatagaaattttgggtggggggacacaaacattcagtctttagcggtagctaaaggtatttctgacttcaaagtggattgttcttagccatcatactttattaccaacatagttggttttggaagaaatttaaacaatatatatgaccaaattcccagataaaaggattaatattttattagcattttcatcagtaaaatcttgtacatagcatcctagagctgaaactttcagattattaactaccttgtgtttcatttgaaaaataagagtaagactctggtaagctgaattgatttacccaaaattacaggtcatattaagtcatagagccaggcctggatcattgagtttcccacttcagtcttataacacgtgattcatgaagttaattttgttaattccttgctttctgttctgtaagtttgaatttccatataataaaggagatactgaattttgttttattatgtgtttatttaaaattgacagaatatcaacttgcaaggccttctgatgcaaacagaaaggaaatgttgtttggaagccttgctagacctggmcatcctatgggaaaatttttttggggtaagatactaaatacatcatcttatttcatattttctagttaagatttagaataagaaaagttgataaagaattgaaaattataaagctagagtccctaggtaccttttaccttttaggatagctagttagcctttcaaacgcgaagttgttaaatatgcctctatttggttctctaacagtgaatatagcaagagtaacacctaacattttgtgaatgctttttaagtgccagatactgtgctaacactacatgaattatttcatttgatcattatcacaatgttcagagataggtaccattatcatctccatttaaagataaacaggtttaggccaggcgtggtggttcacacctgtaatcccaatgctttgggaggctgaggtgggagaatcacttgagaccagttcaaaaccagccttggcaacatagtgagaccccatctctattttaaatttcagtcaagttatctcatttgtttaaatcacacagatagtaagtggtggatgtgagatttgaacatctgtttatctgattataaagtctgtgctctacctcagcctgacatttccatttgtcaacagagttagcaatagtttctgtaagagtttttgaactgcgacttaattttgttcatctagtaaactgtttaactggtgtctgtttttcataatggcattttcttagtgggaggatttagttacagcctcatattaatcctgttgactatagagtaaaatttaggatgagatgatctgaattattctttaaagggtgttttgtttccctgtatatttctgtacagttatatacattttatagggcattcttgcttcatgtgttttatttttaagaattagatagccgggcgcggtggctcacgcctgtaatcccagcactttgggaggccgaggcgggtggatcatgaggtcaggagtttgagaccagcctggccaagatggtgaaaccccgtctctactgaaaatacaaaaattagctgggtgtggtggctcatgcctgtagtcccagctacttgggatgctgaggcaggagaatcgcttgaacccaggaggtggaggttgccatgagctaagatcgtgctattgcactccagcctgggcgacaagagcgaaactccgtctttaaaaaaaaaaaaaaaaaaagaattaggcaaaaatattattaaaataattagaaagaacctggattgaatactgctagactaattattaagcaaggaagcttagggagttattgtctgtttttttaaggttttcccagagattaattccttggatattaaaatatacttcagaattgtttcttatgcatttttgtcttattaatattaatacattattgcacactggttcaatattcttgagtcccttgggttatttcattaatcatgtatggtagcaaaatatgcattgatgatgtagaagacttttaacaaagttaacttagttatatctataatttttttcattcttttataggaaatgctgagacgctcaagcatgagccaagaaagaataatattgatacacatgctagattgagagaattctggatgcgttactactcttctcattacatgactttagtggttcaatccaaaggtaactattaattatggctcttagagttaccttgaagtagcgctttcttaggatttgtttgcctgtatcagtgttgtagtgtactattaattactttagtgcttgaccttaatacaaagtaaaggaaatcagaacttggagatgtcacgtagctagtggcaaagctcagggaaacacaagatgatgagattctcaggcaaatttttttctcttacagaaataggtcttatctgtaagataagatatgtaggctggtctgtgaatgtactaatattctaataggtcatgaattgatcttttaagccaccttcagctgcaattgtatctgtggttttacatttactctatatcgattacaaactcttacagggcaaagtgttggtttgttcattcttacataaggtcctgtaaaaatggcatgattaattgagattgacatggtgacaatttaagaattatcttaaatataaaatactgatgaatacctctatggcagaactatcttaaatgtaaagactgatgaatatctctattttccttcttttatcattgtcttcagtaactcacattcactttttctcattaaggaaatcatggaagctttcttttgttttctttacatttcaacctacttgtttttcaaagttagtaaattgctaaattattccttttaacataccttatagtttgcacatttctatttgaaatgctaatcctctcaccctaatgtgattcccctttttataaagttttgctttttacattgtcaaaattaagatcaaatctgacttggctcttagatgtaaaacattttcgcatttatgatcaaaatgagttcactaaagttgacttgaaggtaaagtttcgtggtatggtagattcttctgttcaaattgcttttaggttccttttacatttgctaaattaggcaattccatatttggtattccccaagttaattcacaatttytgattattgtgtttgcaaataattccatgtgtttttcttgaactagttattctgtttcttttgtattctcttcctctatgatggcagatataagagcttattaatgcttatttcaaaattttaaaacaagtcctagagtttttgttttttagcaagacagggttttgctctgtcattcaggctacagtgcagtggcacaatcatagctcattgtaacctcaaatgcctgggctcaggtgatcctcctgcctctgcctctgagatagctgggattacaggccccagccactgtgcctaggctagagttttgatgaaaactatgtacaatgtagatttcataggatttagatttttagcattaattataccatttaagagtcaaacatctatataaataatataaattcagaaatgattagtctgaatcccaggttttatataatggggttctctattgagaattagtgaaattcatgtgcctggtagaactaacaaatactcttcaatgatggtcactcagataaagcaaaaagtttcctttttcrtttagatctgttttttactataaatttccaaagaatttcttactaaatataagaagtgaatcaaaggaaaacataaatcatatatatgtatgatatatatatatataaagcctaaaaagaagacctatgagttaaaacctcagcaagtgtacattaatgtaaaacaagtggaatataaaagtactgatgagatggcaaaaaggagaggttaatgtaatatgggttagtacggaaaaaccttccaagaggatgtaagttttagaatgggygtaggatggttggcataatcttatctcttggtccttcacactagcctaatgctaaagatatatttttttgttaaacttgtgtgccttttctgactttaccagggagaaataaaggggtctcacaaaattctgtgtgtcgtaaggttttcttttctactgttatttttcctgttcatccattactggttcaggagtggcaagtaatggccaaattaaaatatccctttgttttttagctaaagatctctgagaaatctaattgcatttctaccttgaataatgtcattgcattttcctgtctcttccctgccctcccctctcaagaaacactggatactttggaaaagtgggtgactgaaatcttctctcagataccaaacaagtaagatatttattttcatacatcatacaccttcagagttaaagagaccattatcttgtatgagtcccaaaggttttttgcttttttatttttacacaggtgatagaattaagacctaaacaaacttaatgactgtcaagatcacacagcttttgagtgggtaaactaagatgacaagccaagtttccatagttcaaaatwtacaggcttgtaaatgtatatagtaagcaataattctgaaaaatttatgcctccttttacatttatttagagcttttctgtgatacgaaagaaaatactatatgagaggcagaagaatatgcacacttacatcccccgtattgggacaaattgtgttctgaaawtttgttttttttaagtcagttgtttggatattgcactggttttccccataaaagaagtaatcttttagatgatggctgactttccatactgcctgaaaaacttacttcatatagtcaaaccagatgttcttttataagaaattgtatgtcgagtttcagttcaggatgatttaaacattttttctccacctcaaattcatcaaaatagtacaaatatttaaaagatacattactgctacctttttgttacaaagtttacaaaaaatttaattctgaagcaatgaaatctttcttcctgtacttagtagtttgcattttaacaaaattaatgaaaacagatattttttcttgcatcagatgggtaacctgtggattttcccaattagtcttctaatacataattagaaaccagcataaaatgttagaataacttataatgacaactgattggttattattaatttggctttatatgaatttccattgataattagcagtgctttttggtatgtaaaggtaatcaagagcatgacaaatttgtggggctgttttttctgattagaagtcttgagtgtgaactatggaaatatcaaatgtgaaactttaataaaatcagaggtgtgtttaatagaggaattcattaggttctgtcaatccctgatgagcattaaaaaaaatctcatatattattcactaataactttggttccttaattagacaggttaaaaattctttgaggcatttaatactaatttgcatcaactgtgttttggaagaaatattaaagttacaatatcttcaaccagagtagaagcccctaggagggaccaagtcttttaaataccacagtgcctaatatagtgctttatacctaatattcacttcatgtataatcgttgattttaaaaaagtattatctctagtttgtttctttctggaatggctttgtctaggaggagaactgaaattaaatgaggctgatagagtcagtaaatattggggtgagagggggtcctttaaattcattctctatctcttgagttgtaaagacttttgagttattgggctgaggctaagaacagattgtgtaactgaagattttgtggctgtgttgccatctatttgttcatgcctggaatgctttccaagaaggagtatgtagaatagattataaatatctctcagttagatatccctaaagatattgcttataaaggcttttgccagttaaatttgtatgtatttgttttattttcagtgggttacccagaccaaactttggccatttaacggatccatttgacacaccagcatttaacaaactttatagaggtttgtgaaccaaaagtttaaaactgtttgaaataatgttagcacattctctataacctaattgaagctgccaattttcattgaaaatgagaacacaacagaaaatacagctgggttggaaaggaagtagatgggcaatggagatctaattaataatagatagcagaccactgactagctgcagatcgattgattctggtgccctgctgctacttcagtctatttcatgctttctccttgttttacctttcttcccttttgttctctgttttgttaaattttcattcatgtttcattttatttatattctgctcttttgcctttaaatgaataaaaatagatgagagggaaaacactttggcaatcgtttccttttaaattcattgtgaaagtaatatttgctaaataaaaatataaaatgtcaagaaatgggagataaatcacccttaaatcttaccatgaagagaagtcatttgtatcggatttcttttttttttttttggagacagagtctcgctctgttgcccaggctggagtacaatggcatgatctcagctcactgcttcgcctcccaggttcaagcgattctcctgcctcagcctgctgagtggcagtgattacaggcactcaccactatgcccagctgatttttgtgtttttagtagagacagggtttcaccacattggccaggctggtctcgaactcctggcctcaagtgatccgcctgccttcgcctcccacagtgttgggattacaggcatgagccaccacgcccggcctccagatttctttctgattttctaataggtatattttcttaacaaagtcgagattataaagtatatatataattctgtctcctgctttgtttcatttaatagtatacctgtaataactacataatgagttgtgtgattacattataatttacttaacaatttgcctacagtgaatattgcagaaacattcttaattcaccatctctctttattctatcacggcagatttttttttctgtttttactaattgccttaggtattccctccttcttcaccccgttaccagtctcttttgctttcccctaatcagtgactgttttgttacacgcttctgctgctggctccattctgttaatattaaactaactctttccagagacaacttactttttattgtattctttctggttttaggtttcctcttcatagaataatagcattgagaagaatcctagagatactttaacccaactmactcattttactatgagtaaacagattcaaaaagatttaaatgcaagtgattttctcaggtcatgtaagcacatatagcaagatagtggtaggactgaatttcagcyatgggtctcctgactcctagttttgtatcctttcttgcaagaagagatccatacacagcagcatttcatatcctcatagttcttttatcccngctttctctacctctgaaaccaaataaaaaagaaatttacaaaaattgcattattcgagttggaaaattggcaagttgaaacaataactgcattgtacttaacctttccttgtttattggaggataaatatattgaattttaaacattcttgtagtaaaagtcatagagaaacacttacatctgttcttctggaaaatatttttgtttagttgttccaatcagaaaaattcatgctctgaccatcacatgggcacttcctcctcaacagcaacattacaggtaagagtttaagggaaaatttacttcattagaaccaagtgagagtaatttttaaagcatgctaaatggtttaagtttgggggttctgaatttataaacatagcaatacggtaacctggaacttgattactccgggagctttcaagccttgctatgtattttactattttttggatataaaaactagagctttctcagttatagtggcctttcttaagtctttgaaattaagtgtttagtgtgaatgctaacttttgtaatttgtttcgatcttgtcaaaaataaagttaaataatttgggcctggcagactggccaacatagcgaaaccctgtctcgactaaaaatatcaaaaaactagccaaggcgtggtggcacacacctgtaatcccagctactcaggtggctgaggcacgagaattgtttgaagctgagaggtggaggttgcagtgagttgatattgcgccactgcactccagcctgggttgacaaagcaagactctgtctcaaaataataataatttggattggtaatatgactagggtacataaatcccaaggatttactcctctgaattagggcaggtttatgcagattgggaaaggagttctacttgtctgtatagttatcttatatgagcagtgtagcatgggccagagaattatttaagttaaggatcagtcaatgcctacaaatgcttttccagttagaaataaatgctaatcaactgataaaaatttaacttttttgggagggggggtggggctcaagcagtccactcaccttggcctcccaaagtgctgggattacagacatgagccactgtgcccagccaaattcatattttaaacaaggttgtatgggctttaaggattgcctaacatagttgaaaatcatatcttgacattcaagaatttactgaatttaactgtgtaacctaattaaattttctcatatatacagaaatatacagaaaactcaatttttttctgtatgtctttgtggtaggaatactttaacaaaattacagtagaggccagggggaaagacagtttgaacagcatgtgcacaattactcggactattacattattagtatgtgataaagcatttttatacttgttattgcattttcatgaaaactctgtgagtaagtagttgggcaagtgaagagaaaaagaagaatacggttaagtatcttgctcaaggtcatgatttacttaaaggaaaaactaaaactagaaccaagattttctgaccctctgaacaacacatttcattttaccacagaacccaatgtggtaccaaaagcttttacagacagtaattcatacctatattaggttctagactgataaggaatctacatttcatattgggtgaagcaaaaagatttatcatgagagcagataagtttggtgtccaagagaaaaagtagtgcccttaaattttgggatgattgtactcttcagtaatctcaaatgaaagagttaattttactatattttctgtttttatcttcctgctactaaattaattataatttcatgtttagtggacatatgtgagaataagtttgtgattatattttcaattattgtagccttagaggtaagattttctggtgtatttataccttttgtttttttcttctgaccattaaatttttttaaaagggtgaagccacttcattatatatcctggctggttggacatgaaggcaaaggcagcattctttctttccttaggaaaaagcaagtattcaattaataagtattttcagtatagcaatctctgaaaaatagtagacaataagtattatataatgcattcttttactttagctgccaggaagcctagaataaaatttaatgcttaattatagttattttaataacttacattattttaatggccatattatatttgtgtatttccttgtaagccaccttttagcccattgttggaagttatttgtacacaaaattttaaaaaatcataaatgaaattaatagattccagaattacataaaagaattagctctaatcaagaatttatatttgactgaatggtaaagaaatcaattwtttaaatgccatggatctccaggctttcctaacccccaaggctagactttaatgaaaacttcattgggtaggtaaatcatagttaataggtgggactgcaaatggtatatgcagccatgttagcagaatgtttcctaagcattaaagcacctgtttaagtcacctrtagccaaataatagaaatacaattttagaatcaagactaatatattaaagtaattccttgtttgatttttctataaatgaatagtatgagaatggaaggatagatgagacatttaaataagtatttttaagacactttcgtgtactagaacattcaaagaaaactaagaggggagagttaactataaaataataaactaatgatattgggttcatatgtaccttacacaatatatgttatatgctttgagctgtgcacaacctttctaccttactgagctttattagaatttcagactctattctggtgtcctctctttttaatttttcagaattaatctagtcagggaaaggtatagtctcattatttctttcttagacaacctatgtaggttagctgacwgcctcaaagaactcacttgacattcaatgtaagtatgttttagaagtgtcttaaggcttctcctaggagacaggttcaaaaatggtgaggccaggcgcggtggctcacgcctgtaattccagcacttgggaggccgaggtggaggattgcttgagcccaggagttcgagaccagactgggcaacattgtaagaccctgtctttattaaaaaaaaaaaaaaaaraaaagaaaggtaagcaaaatgctttccagcagccatcatttgaatattttgtgctgttctcttcaaaaggaatggttttggcttaataaaactgttaatgttttattatggtgccatatctattcgtatttgcattaaacaaagactgttatttccttctggtgattcctaaatgtaccacaattccttgggaggctttgtgcttttaaaatttgcacttttagatttactgttggaaagtatatgtttacattcaaaggctgagatttccacattttacatagaaagcctctatattttgttaatttgaatgtctgtagactgtcaatccaggaacattgatygggttaattttttccccacctgtagatgctgggctcttgcactgtttggtggaaatggtgagacaggatttgagcaaaattctacttattcagtgttcagcatttctattacattgactgatgagggttatgaacatttttatgaggtaaataattcaaattcagttgttttttccttttacgtagatatcactttatgcaaaagactaattggatgttttgttttcaggttgcttacactgtctttcagtatttaaaaatgctgcagaagctaggcccagaaaaaaggtaataaacacttcctggaatgaggccaggagccagtcctggtatatttgaggcttcaggctgccggtagacatgctttagtcttgccttgatggtttttcaggcattttctgctctatttcctttattgactccatatccttatccctctacatgtgattgtatactaaggctttacacatatgtgggcagtccctttattttcaygcttctcttttattgttratgcttctattgagaattttttaaacttttattctaggttcaggggtatatgtgcaggtttgttatgtaggtaaacttgtgtcacggtggtttgttgtacagattattttgtcacccaggtactaagcctactacccaatagttaccttttctgatcctctccctcctcccgcccttctccctcaagtaggcagaaattttaatgtatcttctaattatagttttctccttcacagaatttttgaagagattcggaaaattgaggataatgaatttcattaccaagaacaggtactggaagtcaaattctttttgcatgttatctgtgactgagttgaagctggtgtmgacattgttcctctttttgaaagtgtcggtggagttttaattctgtcattctgtgtcatgtgagtctccaggtggccttgaagctatctgaaaattaactattgggtttttgagtatttatattgagtaagataaggcagtgagaggattaagcagatgacacagatgatgttgtgtggtaatcatttatctacatagtcatccatctatcccttcaataaacattcatggagacttgttatggtatttaatattttgggaattcaaatattgtgaagacattctataaggtaatttatatttaccatgtataatgttagaaacattgtgctttggaattcaggggaaggagagcattttccttgattgaaataggctcacaggctgggcactgtggctcatgcctgtaatccaagcattttgggaggtcgagcaggcaggttgcttgagcccaggcatctagtaaaggactgggcagtgtggtgttttgggaagcgtatgggatatgttatgaggtcagagttctgatgtccgctctgcctgtcgtttactcactgtgtgaccttaggcaagccatctagccatctagtcaggaaaaatccgactatgtttcctcattgtaaaacatgggactggaaccacttggtatctgaaggacctgtcagttttaagagtctgtgtatctgggtgctcggtaaatacttgaattgactacgttcctctggaaaaatatttccatttcatgtatcagtgaacaagtggtcattctttcagttttaaattaaaataatatttttattaatataacttcttatcgcaagacttttatctgacagtcacattttaatttttttaaaattttaattagagacagggtcttgctgtgttgcccaggcttacctcaaactgggctcaagttatcctccckcattggcctcccaaagtggtaggatcacaggcatgagccaccatgcccagtcaacacattttgatttttttttttttttttttttttgagacagagtcttgctctgtcatctgggcaggagtgcggtggcatgatcttggctcactgcaacctccgcctcccaggttcaagctattctcctgcctcagcctcccaaatagctggaactacaggcatgagccactgtgcccggcccaacacattttgatttctacattgatttgattcatgcttacaaatagtgtttagacgatagtgctgtagtgataggttgcctgtctttattgctcacataatcatgtggggcacttgactggtaaacaggcattcatagtccagtgtggtaattgctctcatgaagaggctgtgatatgactagaacctaatgggttatagggctcagagtgatgcatgaagggtatgagtttaagctccctaagggagtagctatggctatattttcttagaattttttttttttggagatagggtcttgctttgttgcccatgctggagtatggtggcacgatctcagctcactgcagcttcaacctcctgggctcaagcatccctcccacctcagctccccaaggagctgacactacaggcgtgtactgccacacctggcttatttttgcattttttgtaaagacagggtttcgccatgttgcccaggctggtctcaagtaatctaaccacctctgtctcccaaatgctgggattacaggcgtgagccactatgtccagcctactgagcatcagattcttaagctgcaattatatctcgttgtatctgttcagaagcttttggttttattgttaataagaaagggagaaagtatttgtatgttgtggtaaatcaaatataataatggagaagttctggtgtgaaataatttacctctttacagacagatccagttgagtatgtggaaaacatgtgtgagaacatgcagctgtacccattgcaggacattctcactggagatcagcttctttttgaatacaagccagaagtaaggaggtttatacgtctaaaacttacttttaggggaagaggagggtgagaaagtacgaagatgtatttaagaaccatgggaacgaagaaaacttagttatatttagtcaggatttttgtttgtttaaacagaagtatcaacagttttgtgaataatttctcatggttcttttacataattaagttttaatataaggagaaaatcaaactcagtacttgttaggtcctattttaataattttcaaatgttgaaacatctactgcaatagatgaagtgattcctaagaattatgtggtttccctgtgaaaaatacgtagttgtttagcttaccttttaattcagttggagagtcaggacaattaaatttttaatcattttgaaaatatttattaaaaaaatgtaaggttcccgaattagaaacatatgacttagggataatgttacatgccaatacattgtcggtcagggtcattccttcactagtggagaataagtcattttgtttcatacaggctagcgcgcgtcaaccagaggtgacttttgccttccaggggatatttatcactgtccggagacattttggttgtcacaactcagggtggggcgtggggtgctcctgggatccagtgggtggaagccagggatgctgctcaatgtcctataatgcagaaggcaggatcctaccatagttatttgacacaagatgttcatagtgctgagattaagaaattatagggcattccttgagatattttagcatagacrttcctaaactattaattttamagaggacagggaaaggtaaaggaggaaggaacaaccacacattcttgccatgtcactaggatggttgtgcctggtagtggctggttgtgtttttttctgaaccaccatttgttgttttatacttaaataaatggtgtttaagtagtagttagggctccaaaccaagccacaaaattctgtttagtccttattgtagctggaggattactgaaggaggccctatcttggcagtgttttactgattcctggatatgaagtgatacaaaacatagctgttaggagcatagtccttggtagcatgtacaaatttagttagaactccacttttgccacttctagctgtattattctgtacaagttacataatctttaacctgagcaaattacttaaccatcacccaaagctgactgttattttgtgtaaataagtatatcttaggattgtttttaggaataaatgaaataatgtatgttaaatacttcctggctcacagtagaagcttagtagtaaaggatagctatttttactgctaatgctgttaatatgtaggatttaagataaacactgtttaaagcattatcaagaatatacttgatatttgtcaactatacctcaataaagtaggaaaaaagtttttgaaacactgttgagactttgtaaattagggtgttcatgaactgtaggtatttttatgagcatagatcttggaggtgcctaacaatgtgatttttgcctttttaacagagatgtattaggttaaaattgtgtgtatctctttcccctcttcccactttactaggtcattggtgaagccttgaatcagctagttcctcaaaaagcaaatcttgttttactgtctggtgctaatgagggaaaatgtgacctcaaggagaaatggtttggaactcaatatagtatagaaggtaaaatattttaacaattgtcttacatttaggtatatttaacttacctggaaatgtttattctttaataatttaatggttctagagggggaaaaagtataattttttaaaaagttcactttgaaatgaaaattacttatactactgcacaggaagttattttctgctatgtttatatttactaactagtgaaaaaattctgttatcttggtattttgggggcagagttttgacttagttttagaagaatgcttctcaaatgtagtgtgcatttttgtcacttggagatcttactaaaatgcagattctgagtcagagggtctgggtagggcctgagattctgcatttctcttttttcttttcttttttttttttgagacagagttttgctcttgttgctcaggctggagtgcagtggtgcgatcttggctcactgcaacttcttttgccccctgggttcaagcaattctcctgtccctgcttcccaagtagctgggattacaggcatatgccaccatgcccggctaattttgtatttttagtagaaatctgtctggggtttcaccatgttggtcagtctggtcttgaactcctgatcttaggtgatccacccacctcagcctcccaacgtgttgagcttacaggtgtgagccaccgtgcctggccagattctgcatttctgacaatctcccaggtgatgccagtgctgctaggaccacactttgagtagcacgattctagaatgcctggatatgtgtcagtcacagtattcctgagaaaggataattgatttgtaarccagttgataactagtttattattaagagaatgttgaacattgcattgtttattgggtcagtttatttttctcctttacagatattgaaaactcttgggctgaactgtggaatagtaatttcgaattaaatccagatcttcatcttccagctgaaaacaagtacataggtcagtaaaatagcaatttttatacataatccatccatgtgctaataggcacctgtatagcacattatattttacaaagtatcgtaggaatttatatttgagattcccagtaacattctgaggttggcattagtattttcttacttttccaaatgagaaaactgggggtcaaaaaagcaaagtgactggtacaagactattcagttggtgaataagaaaccaggatttaaacacagatcttgggactctgaagtttatgctttatcttgtatagagtagctgatcctttcataccaatctccttagggattgccattatcttgccagatttttctattgcttttcaaactgcaggtggcagcccattagaaggttgtgaagtcaatgtaatagattgtaaggtcagtgtaatgagccatgaaagcattaaaaaatcagttagaatagaaaatagcaaagtgtttcattgcatgtagaaataatgttattttaagaacttttgtttcagatatctgcctgtctactagcttgcagtggaaaacatatttctaagtgagttgcagaaaaaaatcattgaaagctaccaatcctaggtccaaggttttagagttgcttataactgtaatttactcagaacactgtatttccaagccattcattacatgtctaagtatatacccaaaataattgaaaacaggtactcaaacaaatacatggaccttcatgttcacagagcactgttcacaatactcaaaagatggaaacagcccaaatgtccatcagtggatgaatgtataaacaaattgtgatgtatacatactttacaatattactcataaaaagtgtagtactgatacatactataatggggaagaaccttgcaaacatcatgctaagtgaaagaagctmgacacaaaaggtcacagataagtccatgtatacgaaatattcagaatagataaatccagagacagaacatagattgatgattgctaggggctgaggtgagtgggtaatgaggagcagtctcttaaggagtagggggtttccttttggggtgatgaaaatgatttggaactagctagaagtggtagttgcacaacatcgtgaatgtattaatgcttctgaattgttcactttaaaatagctaagtttatgttatgtgaatctccctttcattagggaaaaaaagccttttaaaaaagtattggccaggtgccatggctcatacctgtaatcccagcactttgggaggccaaggcaggcacatcacctgaggtcaggagtttgagaccagcctgaggaacatggagaaaccccatctctccagaaaaatacaaaattagccaggcgtggtggcgcatgcctgtaatcccagctatttgggaggctaaggcaggagaatcacttgaacccaggaggccgaggttgcagtgagttgagatcgcaccattgcactccagcctgggcaacaagagtgaaactccatcacacacgccaaaaaaaaaaaaaaaaaaagtattaattatctatattagacacttcagtttcatatcttgaactgtaaataatctaaacaacccagttagcttattattttggttttctgagttagggttttactctgttgcccaggttggagtgcagtggcatgatcatggctcactgcagccttgacctgctgaactcaagcagtcctcctgtgtcagcctcttgagtagctgggattacaggtgcgcaccacaatgcccagctaatttttaatttgtttctagagatgtggtctctctatgttgcccaggctggtctcaaactcctggcttcaagtgatcctcctgcttcagccttctaaagtgttgggattacaggcatgagccaccatgcctaccaaatccagctcttttacctaaatatagcaagtactcaaattttaaaaattagctatttttcatctatgtgataatgaaactgttgttttaattaaccaaaaggacaagtttgactttgagcagaactattttgtaacttttcaaatgtatagcataaggttggtaaaaggcattctcatgaattaatggattgtttaataaattggtttatgaaactatcctgactaaaggctcctctctcagttaaaattgtctgtaagaaagggaatgaagcagaatgtgtagcaaccagaatcagttcttgggaaattccagatctttagaatttatttactttaagaccaacatagttttccctttggtattggtctaatttaatgtattccaacatttgaatttggcttatttttgccacagagaaaagttacttagacttctgaagccaataacagattactggggctcctgctgaaatacttgagtgaattattattatcttcttttattagccacggactttacgttgaaggctttcgattgcccggaaacagaatacccagttaaaattgtgaatactccacaaggttgcctgtggtataagaaagacaacaaattcaaaatccccaaaggtaaaatgttgccctcctgttacttccctgctgaattccagtgttctctttagatgctctgtttcacatgtgattatctacttgctattttgatcttcctttgtggaggaggctggggctgggtgcctctatcagccaccttgatgccctctcaccctccctaaaaggagtaaaataagtaaaacaaatatttctccactttgctgtaacttgcttcccctgtgtatatcacctacttctctttccttttccccttccgtttgaagactttttctaggcttatctaccagatttatactgtcctcctatgctgtcacagaaatccttatggacactccagtgtccaggaaatgaaaatttaaggctagaatgaaatcgtttttagatttttttctttcagttaaatgaaagcagagccaggtatttggccatcttaaggaactcgtgtgatttgaacattgttgtttttaaaaagagataagaatacacaaaggaattattcatagacagatagcctagtccagcattacaaatgtgaaagccccaccaactgcctccttctaccatttttttttcagcataaaggaagcatagtatagagttaagtagactctaaagtccttatctttaatgttgtggccctaagtgtgctgctttttaccgttctgttcttgaacatggcataaggaacttattgaagccacatggaatcataggctgggtgctcttgtatgtcatttaacccatatccccaacctcaaaacacaactatattgtagctctgtgggattattgagtttattgggaagttattttcataattttttttgaatagcttatgagtttctaaaaatctcctcaaattcagtttccttggaaagcctctgctgtaaatttgtgtgaatgctggagttgttctcttaatgttcttagcatctgtcctctaaaaatttttcctgactgaagctattaataagagtatttataggcctctctaagtatctgcccttatgtctggtcttcccatagattaaagagtgccttttggaactctttatttggaatggtaaatactgctttttaaagacccttaagaataaagatgtaatgaggatttaaggattagtagtttacttcagaatttaaaaaatatatatattaggggaaaataacagatgtataaaatatctgaggccsctaaccttttttatctatggtcttttttcttttagcatatatacgtttccatctaatttcaccgttgatacagaaatctgcagcaaagtaagcaattgtctttttttctggaaaatacattttttagttattgaaaaactattttgtttcattctaaatcattctgtcattttctctatccatatttgagctatgttgctgatttatgtatttttttctgtactccaaacaagttatttgtattattaccaaacattaaaatggaactgtggctgctccattaccagcacccattggtaaaacatgctgatagtgtagactagagcaattagttcccagttactggatggggaaaagtccttaaagatcagtttgggtgagtgcccagtctataatgagactgatggatctgttgattctgtatttatagactaccaaggaatgtgattgttcctgttcttagcaaatcccttatatatttatgtagatagctttcattgtgggtggtcggagaccctaaagtgtatctgaacataggagatatttgggaaatgtgtctgaatataggagatacttgggaaatgtgtctgaaygtagttgatatttcggaaatgtgtctgaayataggagatacttgggaaatgtgtctgaacgtagttgatayttcggaaatgtgtctgaacmtaggagatacttgggaaatgtgtctgaacataggagatacttgggaaatgtgtctgaacstaggagatacttgggaaatgtgtctgaacctaggagatacttgggaaatgtgtctgaatgtagcagatacttgggaaatgtatctgaacttaggagatacttgggaaatgtgtctgaacctaggagatacttgggaaatgtatctgaacataggagatatttgggaaatgtatctgaacgtaggagatacttgggaaatgtgtctgaacgtagcrgatacttgggaaatgtgtctgaacctaggagatacttgggaaatgtgtctgaacatagcagatacttgggaaatgtgtctgaacgtaggagatacttgggaaatgtatctgaacgtaggagatacttgggaaatgtgtctgaacatagcagatacttgggaaatgtgtctgaacgtaggagatacttgggaaatgtatctgaacgtaggagatacttgggaaatgtgtctgaacgtagcrgatacttgggaaatgtgtctgaacctaggagatacttgggaaatgtgtctgaacgtaggagatacttgggaaatgttggtgcatttcttctttcttttcctacgtaactgtaaaatccaaacttaaaatgacaagcagcactagaatttgttaatattcactctaaaaaatgcattcccaaactcatatttttaattagtcagaatgcctagacttggagggtagacagagccttcaggccagtgctgctgatgcctattccatttacctcattgtacaatataaatattatcattttgcatgtgtacatgacatgaaaaagattgggaaacactgctgaaggtaggaattctgtaatacacctctgaaactgaatcctgagtaagctgtattaccttttacattctggagtagagaatttatactttctaaaaatgaagctgcttaytctaaattgaagcaaatctatttcatgtgtctttcttaccaattaaagatgccatttgcattttgtacttcttagtgtggtcctctttgatatctttgtcaatatccttacgcataaccttgcggaaccagcttatgaagcagatgtggcacagctggagtataaactggtagctggagaacatggtttaattattcgagtgaaaggatttaaccacaaactacctgtaagtacaagtactctgttttccttatagagagcattaaaataccatatttatttagaggtttgtgcatgggatgctgtatagagaaataaatgtttattaatgtggattatcttgaatattcttggctgatgacagctattctaactgtgactgactatccataagaacaacatatgtttcattaattactggcagtgcatgggattatagcccatgctttaggattgatttcacttccctttgctgtcagtttctccacaaccaacactggcatttaggattggttctagctaaattttttaccatacaggaataaccttttttttttttttttgagacagatactcactccatcacccagactggaatgcagtggtgtgatcttggttcactgcaacctccgcctcccgggttcaatcagttctcatgcctcakcctgctgagtagctgggactacaggcacgcaccaccacacccagctaatttttgtatttttagtagagatggggtttctccgtgttggccaggctgatctcgaactcctgacctcaagtgatctgcctgcctcagcctctgaaagtgctgggattataggcgtgagccaccatgccggctgtggaataacaaatttgactggtgttttgcctgaaatagagtagaactcaaatgcttgtgcccttacttcctcatcttatgctcctcattgtttcaagtatgtgtgtcttgtttcccttctaagtttatgaacctttccgaagcagggtctgtatcatgtcagttattaatctcttagtgagaaatatgttccagtattgcttcatcaaaaacttcataagaggaggaaaaaataatgggttgttagctaagagagttagattactgaataccaggtaaagcaatataatatactcaataataaattttatatctaggtttcttgggtagaatatatattatattaagatttagggaaatagggttatacaagaaaaattttagaggaaaggacctgccagaaagacctgtgctaggtgttaatagccttcatctgggcaaaaacccaagagaagagtatagctctcacctttttatgccttttcccttctccatctccccatggaacaaagattggtctcagaaggagacgccatcagtaaagaactatcagcggacattacattaactgataaaatgatgatcactgacatcagcaacaagccaagaataattttactttgtcagcctctgaggcctaaatataatgtagcttaagtttcaagcagattaaagcctaattcagtggttgtcatttggaaaatatgttttagaattacctggagagcttattaaaaatacaaaccatggaaaagtatttgatattcttgaatttgtgagacttagccttaatattaaaacctaatatakaacatatatatatgtatgtatgtatgtatagaaaactagagatcaattttatctgtagaatatagatgtaaactttctaaaaattaaatccagtttagcaaaaagaataattcaagtaccaggaatgctagggttgtggaatattaggaaattgatgatcataagtcaccacaacacaagtcaaaggagagccactgtatgaatatagtgataaatgctgataaatcatttgataaatttgagttggcattcctaatacataggaatggaaggaaattaattaagtataaaaacctcagcctggcgcggtggctcacgcctgtaatcccagtgctttgagaggctgaggcgggcggatcacgaggtcaggagatcgagatcatcctggctaacacagtgaaaccccgtctctactaaagatacaaaaaatttgccaggcgtggtggcaggcgcctgtagtctcagctactckggaggctgaggcaggagaatggtgtgaccctgggaggcggagcttgaagtgagccgagatcgcgccactgcattccagcctgggcaatagagcgaagactccatctcaaaaaaaaaatcaaaaaacctcaagtaaagaactatcagyggacattacattaactgataaaatgatgaacactgacatcagcaacaagccaagaataatccacartcatctctattattctgttattgttttagaggttctggctattagagtaagatgaaaaaataaaaacttttttggaaaaaatatttttccttgcagatgatatgattgtattcttagaaaacctcatataccactaaaattaaaaaaaaaattaggtgtgatatggctggtcaaaagactagtatatcagaatcaatggctttttctcccccatagtaccagtaatcacttagaaatggaagccaggcacagtgggatgtgccggtggtcccaactcctccggagtatgaggcaggagaaatacttgagtttgaggatacttagctatgatcgtgtcactagcctgtgcgatatagcgaggctctgtctcttaaaaaaagaaagaaacaaatggatggaaacaatcttacatttatttacaatattgagaaaaaaagccaataaaatggctaagaataaacaggaaaagtataggatctatctgaagacaaactacaaatcttattgagaacacccatgaaatgataaaaaaggaagaattgttccaaatttgacaattatttagaattttggacccttaagattctttgaggctaggaggctgaggcaggaggatcacttgaggccacgagtttgagaccagcctggcaacataagaagaccttgtctgtacaaaagcaaaaaaattagccgggcatggtggcccctgtctgtagtcccagctactcaggaggctgaggtgggagtatggctagagcctaggcattcgaggttataatgaattacagtcgatagtaccactgcactccagcctgggtgaccagtgatatcctgtctccaggtaacacccaaacaaacaaacgaacaaattgagttgttagtaattttcttatgtccccccacaatgcctagttccatgctgggtacctggtaaaaaccaaagagaaacatttccctccctaatacctagtggatttccatgcttcttaaaatgcttccttctttttcttttagctactrtttcagctcattattgactacttagctgagttcaattccacaccagctgtctttacaatgataactgagcagttgaagaagacctactttaacatcctcatcaagccygagactttggccaagtgggtataaatgagatgagcttatattttgaggacctgaaagtattactctccctagtgggtgggtgtgggggttaaggctatagttgcagtgctaattttcatccntgtttgaatcgtgctctagtttaggagacccgtgcatagcgttacggtatttctaaacccagcttatgtagctagctgtgaatgggactgaaagcagcttactgtagagactaaaagtaaggaagggtgttttcaccaatcattatacctraatgttaaagaagtgctagttttaggccgggcatggtagcttatatctgtaatcccagcactttgagaagctgaggtgggaggatcacaagcctagaagttcaagactagcctgggcaatatagcaagacttcatctctacaaaaaattaaaaaattagctgggtgtggtggcacatgcctgtagtcccagctacttggcagactgaggtgggaggattgcttgagcccaggaggttgaggctgcagtgaaccatgatcatgccaccgcacaccaacctgcatgacagagatagaccctgtctcatagaaaaacaaacaaaaaacaaaccagaagaagtatttactggtgattttagtatgttggtgattagtagctgagttaaattgctaaacatgtcacttatctagcaatcttaactatccagaattcagccaagcttccagaagagagcagaaaggcagctacacagtctgtatgctaatacttaaaccctctgctcacaggcaacccccttgggccttcattcagagcctgttcttactactttagtccagggctaattgtagcctgtaggatacttttgcgtgaatcagaaaaaagtatccttctgaggtaccctctattagcaggtagagcctttgtgggagggagagaaaagtcctctgaacagacctacccctttgtgcacatgactggctagcccctacttgacagttttgccctgggcatctataaatagtgaacagcgtaaaggttctgcttttgacacagctgtaatgaacccatcagtttccagaattagaaagaaggggttaggaatcagtcatgtaataactgatattctgatcacagaaagttacaaaaactaataactagatatatgttagaaaggacatggacacagggagggaacatcacacaccagggcctgttggggggtgggggtgctgggggagggatagtgttaggagaaawacctaatgtaaatgacgaattgatgggtgcagcaaaactaacatggtacatgtatacctatgtaacaaacctgcacattgtgcacatgtaccctagaatttaaagtataataataaaaaaaggagagttatctgcaaccattgatacrgtgaatagccctgccaataactcatgaatactactttatttatttataaaaatacattattaaacacaaccttctattttattaaaattcaactcctgaaatttactttataaaagaataataataaacctgtttgttgaagatttttgtgctagatctaagaactgttatataaattcattaattcaattctatccaaaacggttacctctcacgaatacttcccctgttttacaaatgaagaaattgaatcatagatgttagtagatttgtcaaattcaaacagcttatttggggtggggttgtggaaatgggggatgaagttaatctgattctggaccagagccgttacctgtattatattgtcactgcagtaatagatatcccaaatgatggcttctagtaattaatgaaatattagtgagatttcaaaccaaaatagtaataattttaaatcagtgtacaactaagtaaacttgactcatctggcagctttacttttatgtgaaatattttaccctgcaactgagacaggtaagtgcatttttgtactgctaagtaaatttgtttaaagtttgtgtatgtggttttcagtacttttttggttaatctgatacygttttcccatcttacattgtgataaaaatggtctctctttagaaacacatcctttatagaactttgaccaaacatttctttattctgaagattcatttctaataacaaaactttgagtgttttttttctgccctctgtacagagatgtacggcttttaatcytggaatatgcccgttggtctatgattgacaagtmccaggctttgatggacggcctttcccttgagtctctgctgagcttcgtcaaagaattcaaatcccagctctttgtggagggcctggtacaagggaatgtcacaagcacagtgagtgtgagatgctctgtaggccaggtctgaatgcarttgtgaactctggaattgccatagttctttcctaaaggggaagctgtagttttggcaggccagcattatcatattctgtttagaagggaacctgacccctctgatgctgggcagctttcttcttaagatgaagactgctgggctgggaatgatggctcacgcctgtaatttcagcattttgggaggccaaggcagaagcattacttaaggtcaggatttcgagaccagtccaggcaacacagtgagaactcatccctacaaaaaataaaaaattagccaggcatggtggcacatgcctatagtctccgctacttgggaggctgaggtggaaggatcatttgagcccaggagtttggggctacagcatgctatgattgcaccacagtattccagcctgggcaacagagtaagaccctgtctcaaaagaaaagaaataaagaaagagagagagaaaaatagattgctggtaatagactaggattttgagtgaaatgggtttggcgtatctatactgtttgttacctttgttgaagattgtatgtggaaaccatgaacagtttagtatagaggctaaaatgggaggaaggaaatggtgagggatgtgtgtgcatacatacggatacatacatagatacatacatacatagccagaactagtatgtcaagcctgtttgtgaagctaaggtgctgggctttatcctgtagaaatggagaaccattaaaggatttaagaagatttgtggttaagaaatatccagagagacaagttatgaagctgttttaaagtacagatatgattycactcataggagttatctaaagtagtcaaattcatagaagcagaaaatataatggtggtttccagtagttggggagaagagggaagagacaagttattttatgggtacagaattttggttttgcaagatgaaaaagttctgaaaatctaatctactgcacaacagtgtgaatatagttaacattattgaactgtaccccttttttttctgagacagagtctcgctctgtcacccaggctggagtccagtggcgtgatcttggcccaactgcaacctccacctcttcggttcacgccattctcctgcctcagcctcccaagtagctgggactacaggcacctgccacctcacccagctaattttttgtatttttagcagagatgggatttcaccgtgttggccaggatggtctcgatctcctgacctcgtgatctgcccacctcggcctcccaaagtgctgggattacaggtgtgagccaccgtgcctggccctgaactgcacacttttaaaaatggttgagattggccaggcgcggtggctcacgcctgtaatcccagcactttgggaggccgaggkgggcggatcacaaggtcaagagatcgagaccaacctggccaacatggtgaaaccccgtctctrctaaaaatacaaaaattagccgggcttggtggcacatgcctgtagttccagctactcgggaggctgaggcaggagaattgcttgaatccgggaggcggaggttgcactaaactgagactgtgccactgcactccagcctgggcgacagagtgagactcctcgtctaaaaaaaaaaaagttgagattataaactttatattattttatcaaaataaaaagctggagtgaaggctgtgcaaggcggcccacgcctgtaatcccagcactttgggaggctgaggcaggcagattgcttgaggccagggattcaagaccagcctggccaacatggtgaaaacctgtctctattaaaaatgcaaaacttagccaggtgtggtggtgggcatcttgtaatcccagcttcttgggaggctgaggcagaagaatcacttgagcctgggaggcagaggttgcagtgagccgagatcacgccactgcactccagcctgggtgacagagtgagagtctgtctcaaaaaaaaaaaagagttgggagtgaaaaatattgaagcctgatgttaggccaaataaatgaaaaataattgcttaaggctggacatggtggcttatgcctgtcatcccagtactttgggaggctaaggtggcagaatcgcttgagctcagtagtttgagaccagcctgggcaacatagtgagacaccacttccaaaaaaattaaaaaaaattagctgggtgtagcaatgcacacctgtaatctcagctacttgggggctgaggtgggaggattgcttgagcccaggaagtggaggctgcagtgagctgaggtcatgccactgccctccagcctgggcaataaagcaagaccctggtgtttttttttgtttgtttaaagaagtgcttaagaaatagaagatgatggaaattcactcagtgggagtgagagagaaggcagtctaraatgatgcccagatttctttcttgaagcagtgggttggtggaacaggaacagtagtaagagtgggagcatatgaggagtttgttctgatacgtatttagttggaaatgtctgtggggccttgtacctgactaaggccttttcctcagtcagatgcttgttcaagattctctccctgaactgttttgttattaaccatcctcctccatgccttcccagtttctcagggctggccctttgattggaatatataaatggccactcttgaaattgtggctgctatcctcccctttctctctatcttcattctgcaaccccagaaccagccttagtttctgtcttggccaccaaaagaatyttaagtctcagtccacaaagggaagagaagaaataggctgcctgtttttccgagcaccgttgaagtaccaggcaagggcttttgatacagagtccttagtaccatgaatttcctccagtagaaatcactttagagaagagctaatccctccatttatcccttattttatagataagaaaacagaattcttaagaagggaagaggatgtattcactcagtattaaatgttattttctttgctttatccaggttctatgtcaatgggcccaggattctgaaacatagtccatgttgtcataaaggccacagcctagttgggtaaaccaacactgaacaattaagtttgatccagttgggaaactgtattatgggtaaacagattgccaagagagccagaacagttaagagctgcttagtgttccacaaacacaatcaatcttgaatcagtcaatgaataacttgccagcatttaggtcaccaactatatctgctttcctaaagctatgcagggctccccaagcaattggaacattgatattagctgattctgggtgaaatgaatgtctagagagcttaatgtagttattctcttttgcctcttaggaatctatggatttcctgaaatatgttgttgagtaagtatttgaattttctctttggggttatgtgttcttaccagcgagagggcatggagccacaattcagttaattgttactaaacacccaattgaaatactacttgtagtagatttttttgaggctggtgtacaaggcaattgaaaagttagaaggcctagcttcttatagtttttgggtgcctcagtgacccatactgattctcttgcagcaaaytaaacttcaagcctctggagcaggagatgcctgtkcagttccaggtggtagagctgcccagtggccaccatctatgcaaagtgaaagctctgaacaagggtgatgccaactctgaagtcactgtgtactaccaggtcagttgggtgtactaaagactggcggaaggcccagtgcctggggatcagggaccccgtgaccttcaaggcccttttatagttacttctgtagtttcatgcttggggccatttgtcctcttgaagcaactacatttaaaaattgctcctgttggtaaaatggatcctttttcaatcacagtgaggtattgcttcattaatcacctaagtactaatctagagggccagaaaccgaggtgtgggtggaaatccctacatgtgcccctgatagaactcccaagtagcagaaggacatttgttaaggggcagttttgaaaagaagacagaagtaaacatagccaaacaattaagacacagcaaagagaacgactactagagtcataaatgtttaaagcacctgagaggaaggatttatcacctctgttttagggtgacaactccatgatccagagccccttacttcttgaggtcgtaccagctgggtctcagattattccttttgtcttcagattctgtgttctttccacaccattctactggggtgtgtggtgcttaaaggaaggaagcacgtggcagtaatcacagttagctctagcctatagcctgctttaacctgtggttggtcccactcgcttctagaaccacggggatcttccttaaaccttgcctgtctagtctgattactgactccccaaattctggggctcctgtagccgctgctgttatcttgggttccctgcatcaggaattcacttctttgtcaggtcttgtgaagatccctgactgggctttgggtgggatggactgattatcatttctttgtcttgtatctctgcccctgggcctcagccttattctgacattatcctggtctggctgtcaggagcaaattcacttgcccgatgtcacggtcatctcttgttagtgaagttgtgtcttgtcctagtcttcttaatgagtactttgattcaggagcaacagcacttttggagctaggttgataatatttttgtccttccgtagaggccctgcttctctctggagcctctgtggctgtagcattccaacctgcagcctcttctaggttatgactaccaggtcccaaactccacaaatggtacagcctagcctttcttaacctagtctacattttcagtgcctctgactgcttacaaccccggtacaggagtactcattttcggcaggatttcacattgtaagactatgtttatagaaatgctttccatcagtcacctcttagcactagcttctaatacaaactgttcccttttggaaaccatatcctttctcagagagcattggttttgttgtggtctgtttagagggaaacagaaaatctcaatgctgactaatcaggtcttgcaagggcacataggcattagcctcttcctctggtgrgtgggaagcaaatgagtctgtgtgagaggaacctgcaagatcctgactctgggaggcactagcaacatccttgtttattggcctcctgtcctttcattctgaatgcattattttgccagtcttgggcagctagcatgtggtcccaaagcgtggcttctttctctgaagtatttttcttatcaactggttttggtccttttatgtggcactggttcttgttgtgtggcactattcattttctctcctcttgaggaatagatccagatacatttcaggatccccaaacatttcctgctgtcttccttagggctttgagttgcaagtacttaattttagaatgtgtcctctgacaggatctggcaggtcagggattattaatctcacctttgtttgcacctgcaattctatgctagtgccgggagtacaaatggtcaagcatgactcctgtcctcatagaccttcagtctggtgggaaagcagatatgtaaacaacatcaaagtatgattaactctcttgggggagagcgattggtggtgatacctaagtggttgcctagaatagctggattatttaaaagccctgtaaaccactggatattcagttggcctgacaaccttctcttttcagtcaggtaccaggagtctaagagaatatacgcttatggagctgcttgtggtaagtgcataaaggagatgctgaggttttcagcagcccctgacccactatgaggcccggccttttctgcctgggttagggacatggggtagtcagagatctgtgatttgaaggtgagatggtcatttactgttctcacccagtataagcctgggccaattaggaaaaaggcactaagggaggctggacttgggaggtatgtgaaacactctggggagagaaatkgaggtttctctgctgggaggagttgggctgatgggcagtatgttgaattacagatgcacatggaagaaccttgttttgacttccttcgaaccaagcagacccttgggtaagtcagctggcagggccactgagctcaaataagggcctagggcttactttgcaggctgttcatcagatatccctactgagcagcctgttagagcttccttccatctcatagggtgrtatttagtcatccaaacttttggaatttgtatctttgactgtaatcaggttttcagtttggtcaagtttcaagataagaraaaaggctagtttgtggtccccaattcaggagaggtatggacaccttaacatttttgggtcctgtttcaggacttccagttccaataaggatgggcagaaacttttcccactcctatctagtgcctccaaggccagggcccagatgatcacctgagctcatataacttttctctctggcttgtaggtaccatgtctaccctacctgtaggaacacatccgggattctaggattttctgtcactgtggggactcaggcaaccaaatacaagtgagtgagtgagtgaatagatgagtgtaacctattatggacatggagagtaggggctacatgtgtttccttaaaccttgggcaaccctgaccaagcaggtttgctctatttagtcagtggaagctgggaagatgggggttgttatagatggtctgttccaggactgatcaatagttccagtggccctttcagacttgattcaagtcctgtggtcattgtgtggggcttgccagtgtttcttctcttcaggcagacctgaggacaagaagggaaaggatgcctgatctgacaggcattgctgaaacctgttagttttcagctttggaatggtcatacatggttgtgactgcttcattatgaggataccaggaaactgggctggaggtggggtgagggggagggttctttctctttctgtcctcaaagtcaggtggaatactgaggcctgggaaaacactttagctttttttcctggatatatgtcttagtcttaattccttcttttgccttctgcctgagatcgggtttctgatgacttaattgaagatgttttgttttagttctgattgaagatgttttgtttcagttctgaagttgttgataagaagatagaagagtttctttctagctttgaggagaagattgagaacctcactgaagaggcattcaacacccaggtgactgtgccagcctggtcttttggcctttggcccacacaagcccccagatacaaatcttaacagggcttcgccggccagtttttgagctttgcagccccaccttcctcttacaatagtgtctccctagcttcatccgtgcctcttatactggcatgtccatcacaagccrggctggacagggcccagtgtgttctgtgggaagtggtatgytgcctcacctgagcatctttctttttggtgggaacaggtcacagctctcatcaagctgaaggagtgtgaggatacccaccttggggaggaggtggataggaactggaatgaagtggttacacagcagtacctctttgaccgccttgcccacgaggtaacatggttttcagagtaagacagctcaaactggtcaaggttcctgattctacaggcatcacaggtctgtgcacaccagcattgtgtggaagagaaactcgaaacactagtcctggcctgattactcgctcacttcctgagttttcagactggcctctctagcaccttaggtggccacgtgagctgggtgctaatccttaccacaccaccaccaatttcaatcagagcagctctatttttatgctatatattgaggtctacaagattttgtggagaaaaagagttttgccgtttaaagaaaattgaggactctttgtctttacggagttcattattccaagtgcatgtgttttgacaacttctattccaaagtagtaaaacctatgaaaaagatctggatcttgtactccagtgtgactttggttaatacatagcccctacatggtgaattaccataggacatcattgctctgtgatgtaaagaggttatttagtaagaggcttcatcttaacacattttagttttcttaatagaagcaaggtagatttcctcaagccgtggtatgcagctaccatgtaattgggaggtgacactaaggggatgtgggtgttgggctcagtgtatggtatttagctgtaattatagcatctgctaacctctcttgccattgtagatgattggtataaaatgtgaaggcatgccagagagcttcatcatcrttttggtctggaaggttaggggtaacctgagaataggaagaataaaatgaggtcttcagatgctaagcaggtccagggacatctgcctgggggttaggtttaagagctatctttcttcttgaatttctttcctatcttcccttcccttgtaagattgaagcactgaagtcattctcaaaatcagacctggtcaactggttcaaggcccatagagggccaggaagtaaaatgctcagcgttcatgtgagtatgtttaactaactccatccattctagggttgtcatttactgagtgagtttgggtggttatcatcagaactcttaaacccctaaatctggtcagcatatttttcacttttgtctttgtcctctttcaggttgttggatatgggaagtatgaactggaagaggatggtaccccttctagtgaggattcaaattcttcttgtgaagtgatgcagctgacctacctgccaacctctcctctgctggcagattgtatcatccccattactgatatcagggctttcacaacaacactcaaccttctcccctaccataaaatagtcaaataaataaactgcagtcacgttggcctgaagcaatgtgtattttaaaatgtgtktgtttgtattttatggagttagttatactactgccttagggcttccattgaagttttgcactggcatcatagcatttgatttactttttatcctttgttgagactaataaacccagggttactgtaggagctggcaaaggaaaattagcagaatgggccaagcgagaccagaaagcctgcagcagcactttgagaagccctggcctgtgtcctctcagactgagaatctacttcttgaaaggccttacgtaaccagtatattgaataactaactaaatgctaggtactaatacctgtttttttaatgtatttttaaataaaaaagatgatagatagatagatagatatagttctgtatttcccttcagaatgagccatctgctgctgtggcattcattttattctatctatctatctatttttgttcactgtggggtggggatctataaatacacactcttcccaaaccctctaaggcaataaaacatttttggataaaatgttggtaggcagccctacatgtgcaatatgagttaagtgaagattctggggaattgcctggcaggggctaaagacagaacatacaatctgacagaggaaaagaatggatcctccattatttcaagtgtctttctttgaaaagctagctcttgtattcaaggttgccaaataattggcttccaagtttaaccataaaagataataaaagatgcacatttttaaaaaaaaggttggaaaaattactttatgaagccttaagcactaagaataattaattaaactgtaatccaggattagatacaatttaataatagttcaattccaaaataaaagttattgtaggtaagaccatgaaatttcctaacacttgattttaatacattgcgctaattttctaaaacaactcagaggaacccatatttacagtaggcagaatatttatgaaaaaaatctggcatcaggtatatttatatatatgtatgtgtgtgtatacgtatgtgtgtgtatatatatgtgtgtgtgtgtgtgtatcccgagattatatgaactaagaaacaagttgtgtatcttaacagcagtactagagcgcagagtttcagacttggatttataaatgctttcaacgtgtggtgtttggaaaaggagaagacatcatctgattttcaaaacctgaagtttttctcaggactgaagtcaaaatcgtaactgccacagagggaaaagggaagcttttccccttaattgttcatctgcgtcagaaagtccagtatccctgagataggaaccactgtaattagaagattggaatgaacaggtttctcccaaaggaagattgtttgttgctgaattatgcctactgccctgatcatcaggtataaactttgcatcttccaacctaatgcttggcagcaccaagacgtttcagtaatggttcatcataaacccagcattctccatcttcatgaaataactgtaagacaaagaggaagaatttagttacatatttgctttgtacttctgtaatatacttactatttcatatctgctccccaccccgccattagactgaaatgagtttcaagtagggaccagcgatcatcttgtttataaacagtgtttggcacatcacttcttcaacattcactgaaataaattaggaggaacagcacttaggagggtggggcaggcaagcttacccttgtctcccactgaatttccttctccttcctttctcgggcttctgctctttgtctttcttcaagcctgtgctttgcttcagttgctgcatcaatgtctctgatttttaagttgaaagtgacatccttccaaaggctaaaacaaagaggtaagaggagctgccaatgttgagaatgaaagcctgcagccatcctgaatatagtataatacaagtcaaatggctttaagtgctgtaggtcacagactaaatctccttacgctggcaccagggcactggagtaaggaacagacatatgggctcagaagactccactgctagttgtcaaagaaggaaataagggctgcctgatagtatgataaggtcaacagaagaaaaagaatagtggaagctgagacctgggattctacttctggctctatgtctaacttactgtgcaactctgggtcaatcagtttacctctgtagggcttgagtgtcccttaatatatacctgtaagtgttagaggaactgagaagttccatttcagaaaaactcccttggatttaacaatatgatggagaaaatagtatgaatggagagaataagggtcaagaagtaaattacagaggctttaaagttagttaagatgtggcttcctctcaaggcctttattctcatttcaggaaagaaggtaaagagaagttagctgactgagccatccatggtcacaaaggtagtaagtggtagttctgacatacgaacccaggaattcaaacttggtctatactattatgctctgccctactgtctctcaaacccagccctgtgcctacgcctaggcaaagtttaagcactgcagcaatagttccacttaacaatgtcggcttacctgcgggattcatactcgttctgatcttccaacttcctcactttcttcttgattataggcaacttcttggtatctacaaagactgtattttcctagaaaacaatagaggtggatgggaactagacccataaacccctaacctaatgttagatgcattgtagtgcttttgacacttcaaattctctaggtccaaaatgcagttaactggctcctcctgttaatttcataacatctttcctctgtttaagaacactgagtgggcagtagtacagagtgcaagttccttgaaggaaaggtctatcttaactcattttggtatctctggtgccaggcagtcagtaaattttattatacaaaatcttcaactgtgtgtgtatggaaacacacagtttagtgcttcattttataaacatacgccacatacctaacatttactgggttcttactatgtgccaggcattgttttacatatattattctcaagtgttttgagagcagagagaaaagtaaaaatgattataattacctatactgctgggagaaggtgggggaaggaaagaaaaagcttgccctgaagagatgacatacactggagctgtcctaaagttccagctctaatatactgtagaaggaaatgcattatgaaggaagtactaatgaaggaagccagaaaaagggatagagtacaatctaatgtagcctaaaacaagtggcaaaatagaggatcttacccctgttgcatattttgcatacatcacaccattccattccccttcaattgagcaaaaagacttcttgtcatttggagaactgaacagaaaaggaaatacttgtgttagtctcaagttgaaaattctaccaaagaatctgctcagtgtggcccaactacagagtagagcacagaagagcaactgtgaagtttttgatgaaagcatcttaacagaactggactccccagggctaactataagaatgagggccttcaacaggacgcttatgaacttgagatcccaagaatggtgggtttgggcaagaacgtcctattctgggtgcaaggaccataacagagttggcaaattccctatcctcaagctgttcacagcgtagtggagagagacgtaaccaccattgaaattctaggtggtaagtgctgtggtgagcttacatgggcactgggggtcagggaaggctttgcttaagaatataatgcaggctttcatcctcaggttgaaagggacctctgtgccagatggtgtgaatactttccctgagcaaggatccattctgcaaaagccgtaacagacctctacttggacacacaactatggaatgtgagaagataagcaacacagcaaaggcctggttaggaagggcaaggcataaacaggattgaaagaggccagaaaagggagacatgaccagggcagagggaggagagctgctatcaacgcctgaaactttctttcccactgtccccttcccccccagttaagggttccagaggcagagagagtcatggtgccatcactatagactttccactgactggcacagtcatctgcacgtgacccaagagtgtcaagtggaagcaagccagatgcgtgcaaaatgtgatggttactgtttttccccagcaaaggcacagaaaaagggatagctgtgaggaccaggaggcagtgctgcaggggtcacaaagtctgctgtaaggaccagctcatcattcaatctggcaagaataaattagggatccataatctggtttagctaggcaacctaggaaggcctcttttagttcaacattgcaagtcaggtttttaggaaggaaacctatcaatgacctctgactgctctgaatatatgttttaggtcttcttctgatatgggacttcagcaaaagacatgacacataaaatgtgaaacacgcttacaaagacagaaccattctttcacactcctaatccagaagctgtagttcaagacaaaaggcagttatttcagaaaagcataagagctctaaggcagaaaaaatacctacaaaatctcggcagtaattctgtgcttcttgcccccatagaagggtttagtgtggaagatgatatttgcactatagcctgttttggaacaattaatattgcattctcctcctaattccacccagggcactgtgaggatagacctgcaaaatcaaaagtttttaggtaaggttgacagttaagaggaagagggggaaggggcatgtctcaaggaacagcagagtctactgctgatcagaggaaatggacacacttgccttccatagccattggggaatgtgagaatgtaatgttcatcatagtctagacatgagacacagcctgtggagagaagggacagaatctctgatgagtagtgccaagtggccacaaggctttcttgtcgagctgatggttactccaggatactccattcaatttagggataacctatctagttccccaccctttgctctcacccccaataccaatgcttagttgctaacaatgacatctagtctagccattttcataaaattctcctataacattgtagtccacccaatgccaacacacttaccctgccctatgttgtgcaccccaattgacatcccaaggaattttgatttggtccaratatgagcattgaattgtatcttcttgttaaaacactcagcataaaaggctgaaactgaatagaaattttcaattagtagattatatatacctacagccacctctccaaaatcacataacctggggaaataattggcttcatggggaaatcctttacccttcaaacagcctccaattacgccaggaggtacctacctgccttttatacccttttccccaatgcaagcattcattcagagccacgtgggcaggatcatccctgaaatgatgctgtggccaacccaggaagcttaaaaccaaaagggctatctgttctggtctgcaagtacacccaggctccagccccaacctaggcccagccagtgtttccagttttaatactgcactaaacaaaccagatgttgagggtatgtacagttgaccctccatatccatgggttttgtacccacagattcagccaactgtggatctaaaatatacagaggctgggctcagtggctaacgcctgcaatcccagtactttgggaggccaagacgggaggatcacttggggccaggaatttgagaccagcctgggcaacatagtgatacactgactctaaaaaaaaaaaaaaaaaaataagaaaattagttgggtgtggtggcacatgtccatagtcccagctaactgggaggctgaggtgggaggatcatgtgagcccaggaggctgcagtgagctatgattgtgccactgcattccaccctgggggacagagcaagaccctgtctcaaaagaaaaaatttaaaaatacaaaataaaaataatacaaataaatagtgaaacaactatttacatagcatttacattgtattaggtattataagtaatctagagatgactcaagtatacaggagggtgtgcataggttatatgaatataaaagacaccattttatgtaagagacttcagcatcctcggttttggtatctgcagtatgccaggaatatactgtgtagaaactacgtatcacttatataaactgtctcacagttgctgaggtctctacagcacaaattactatatataagatgactctggaagcattaaaagttggtttcctaaatcccttctttttatacgcacttaatttgtgaagctaagagtctggagcttacaaaaggaaaagatatgaggaacaaatcaacttgagtttccacttcagggaataagaaacacacagctagtcacacaactgacagtaccctcagctatggcgcttttaatgaccctctttagacagaatagt

SEQ ID NO: 95968 - DNA, 34783 bp, Homo sapiens
  misc_feature (1)...(34783): n = A,T,C or G
atgagcaagctggtcaccccatcagcacagactggaagccctcaggctgggaaaagccctgtctgtgaacctgagcttccattgatatgtgatactggcctccaaccctggctcctgctcacgcctctccattctaagaggcatccaaagatcctcatcatttgtttccaacatcaagctgcaatccttcccaacatatacctcccaaccccaaagtacttacaaactaactttctggtatgaaaaattaaagtcctggctgggtgcagtggctcacacttgtaagcccagtactttgggaggctgaggcagctggatcgactgggttcaggagtttgagaccagaatggccaacatggcgaaaccccgcctttactaaaaatacaaaaattagcaaggcgtggtggtgggcacctgtaacccagctactcaggaggctgaggtaggagaattgcttgaacctggagacagaggttgcagtgagcagagattgcaccactgcacttcagcttgggcaacagagcaagacaccatctcaaaaaaaaaaaaaaaaagaaagaaaagaaaaaaaaattccttaggaaacaaaaatgaaagataatgtgtttccttggtattcctatagccagtggctcctttgtaaactggtcaggcaagactttttcttgaaataaatgttattccttttccataaatctccactaaactttgaaatttcctgcttagatacattctgagaactaaaggtgatccctgcaagtaattttttataccgctagacagaatctttccacctgaygtgaagcacttcctctcttaggtccttacctttaaagtgtaaatacagcgtatcattcaatgctgkggtaatataaagcttgtgctgcttgcagagtttttgcagggaacttttagtcattctgttaaaatggaaaaatatgaataagcttattgcaaattgtcagctgtaaaacatattctcacagttctttaccacatccattcctgcccaaaattctataacatcctatatccctgatacctattttaagttcgtctttttctctttctcctttcctttttcttcttcttttttgtacagattttagggcctcatcgaatattattttcagcatttttttttttgagacagagtctcactctattgcccaggctggagtgcaatggcacaatctcagctcactgcaaactctgcctcccaggttcaagcgattctcctgcctcagcctcccgagtagctgggattacaggcatgcgccaccacacctggctaatttttgtatttttagtagagggggggtttcaccatgttggtcaggctggtcttgaactcctgacgtcaggtgatccacccaccttggcctcccaaagtactgggattacaggcaagggccaccacgcttggcttattttcagcattcttaaaaattgcaatgtatgttttttttttttttttttgagatggagtctcactctgccgcccgggctggagtgcagtggtatgatctcggctcactgcaaccttcgcctcccgggttcaagcgatcctcctgcctcagcctcccaagtagctgggattacaggtgcccgccactacgcccagctaattttttgtatttttagtagagatggggtttcaccatattgtgcaggctggtctcgaactcctgaccttgtgattcgcccacctcagcctcccaaagtgctgggattacaggcatgagccactgcgcccggcctaaaaattgcattgtatgttctaataaaaatactttaaatggtgtcatgaggaactactgctgttcctctctgcagtctggcattaaagtttaatagaatgtgcgctcagctgtgcggcagaggcagtgccatcctcactccattctcagacattgggcaggcaattcaatctctaccagcctctatttcattatccgtacaagggggtgattacgccatctaccttactccataaatgtgcactaattaggagtatgcccacatacctggggccccgatcttccctgtcttctcttggrtgtgcgaagtgaccacctgacccattatcaccactctgtttctgctggctgtggtaggatgtgtcagaagaacccacacatatttccttaggatcattaatttctgtaaaataaaagagatcaggtctgtagagatcaagatatatgccaaaaaatacccccaacttcagcttggttaatgaccatccacttttagtatagaacaccagtattctttagtggctgggtatggtggctcaggcctgtaatcccagctctttgggaggctgaggcaggtagattgctcgagcccaggtgtttgagaccagcctgagcaacatgacaaaaccccatctctacaaaaattagccagatgtagtggtgcgtgcctgtattcccagctacttgtggggctgaggcaggttgatcactcgagcttgggaagtcaaggctgcagtgagctgtgttcacaccactgtactccagcctggcaacaaagtgagaccccgtctcaccaaaaaaaaaaaaaaaaaaaaaaaaaaaaaaaaaaaagagagagagagagaacagtaatctttaaatgtgtaacaatttttaaagcattggcaaagactatgtaaatttcacttctaggtagatcctctataaaaactcttgtacaggtgcacaagaaaacatggacaaagagatttgtttctgcgtttttttttataaaagccaaaaactgttaacaacgtaaatgtccatccataggggctggttacataaaacaatgacttgcttttctacctttgagaagaatgcactagaactacatctatccatagggataattctcagaaacgtatatggagtgaaaaaagcaagtttcaaaataagcacaggataccatatataaattaaaaatatgcaaagcaatactatacactgtttcagggcatacatgtatagagaagtgcttgcaagaattcatataaaattctggacaagggaggaaaggaatgggattagaaacggggtggggtacaggggagaaaaggaacaccaactctatgtgaaatgttttatttctttttttttttggagaccgtcttggtctatcccccaggttggagtgcagtggcgggatctcagctcactgcaacctccgcctcccgggttcaagcgattctcatgcctcagcctcccaagtagctaggattaccagcgcctgtcaccatgcctagctaatttttttgtatttttagtagagacggggtttccccatgttggccaggctgtcctcaaactcctgacctcaggtgacccacccgccttggccttccaaagtgctgggattacaggcgtgagccaccgtgcccacccttatttatttttatttttttttttgggggggcttatttctttaattaaaaaagacttcaaataaatatgataaaatgttactcattttcaattcttgctggcaaaacacgggtatttgttttaatgttctttgttcttttgtcttttaaaaaatttctcaagccaggtgtagtggagcatgcctgtagtcccagctactcaggaggctgaggcaggaagatctagcctgggtaacatagtgagattccatctcttaaaaaaaaaatcataaaaaggaaaatcacatgaaaagaaacaaaaatagtgagaatatctatgataacaataacatgagcacattcaaataaataatttttttaaaggtcattcaaaattggccaattcaaccgcacttaactttaagagctgttgtctgctgctttctgtgtttgtgtggtctattgaacaagactaaaggctgtgcgtgtggggactggttcttaaactcatcaattttgcatagaatgcccagccacaggaagcaacagataaatgtttgtggaaaaaataaagaataagcgctcaatatataaatattaatatgtaattaataacaagagctaccatttaataatggcccactatatgctgggacatttaattataattctctccttatactcctgtataattattccagcttacagatgaggagactaaggctccgagaggttaagctctgggccaacagccataaagctggccagctgctgagcctcaacttgaacccagtgtcaatggctccaagaccagtgtctttccactgagtaatgccagttccctatggctcctcatacaaggttcatctggacagttgatgcttaagatatatttgttgcctggaacacaaatcagctggtttatttgttgcctgcgttcagaaactggaacacaaatcaagtggttttttaatgtaatcactaaaaggtttcctttagggcaccaagtctagtgggagcagaagctgaagccaggcttccttctttccttttttttttttgagacggagtcttgctccattgcccaggctggggtgcagtggtgtgatcttggctcactgcagcctcagcctcccccttggctcactgcaacctctgcctccggggttcagggaattctcctgccttagcctcccaagtaagtggaattacaggagcacgtcaccacgccctgctaatttttgtgtttttagcaaagacagggtttcaatatgttggccagactggtctcgaactcctgacttcaggtgacccacctgcctctgcctcccaaattgctgggattacaggcgtgagccaccgtgcctggccatgaaggttatctttcaagtccattctggcaaactttggtgaggggatcacacactgaccccagaaccaagtcttcattcggactctctaccctaggtcaggcactggactagactccaaattcaatcaagatgtcttgccctgacacaacatgcagtctggagggagagaaagcctttgatcttacatagtgatagcaataaagggacacatttaaagcatcaaagttgggaccagggagaatagcgtggtgggttagggctggggctctggagacccagactgtctgggcctgagtctggtgggttttgtttgcttgtttgtttgtttgtttgtttgagacggagtctcccactgtcgtccgggctggaatgcaatggcgagatcttggctcactgcaacctccgcctcccgggttcaagcgattctcctgcctcagcctcccaagtagctgagactacaggcgcccgccaccacgcccagctcattttttgtatttttagtagagacagggtttcactatgttggccaggctggtctcgaactcctgactgacctgatgatccgcccgcctcggcctcccaaagtgctggaattacaggcgttgagccaccgcacccggccaagtctcttctgtcactgactagccgagggttatctgtttggtgcaagttttgtaacctcttaagtatgtttcctcctcagtacgaaatggcgagagaagcccctactgcagagcgttgcttgctaccattattattattgttattatttggctgtgaagatcgggtatgtggtgtgggaagggggctggagcgcctagccgtgtctgcccctcgcccaccgccctccctggggggcagtcggcaccttccttgcagccccctcggcctgcgctcccgtggtcacccgcagactcctccacgccgggctcctgcgcgcaatccagctctgctgcaccacctgtcgcaggctccgagggctcagggtgcatgtttacttcggcgacaccgaacgccccgcagctttggggggcccaggttcgcggcggacgtcgctacggccccagcccagccagagagtaccctctttccttcttcgccagccgctggcgccctagtctttacagcccaacgcttccccggtcgcccaggcaaccgctgcgcacgcgcactcgggacggaccggcgcgctggggacgccggggggtgggggcgggtctgagacggctccgcccccggcgcgtacgcgggtcacgtgagggcgcggcgcggcagcagctccggcggccgagacgggggcggcggccgcgcgggtctggcgggaccggtttggaagactttgccggcctgcaggtaccgcgccccccgcgccctgggcgccctctcgcggtcctttcgccccagacccctcctcggtcccctcagcgccagccggctgcttggcgagacccctctgagctctcaccacgccccccaggccccgggccccctccgctgcatccggccccgaagccccttggcgcccctgaccccaggaaatcttcgtccctccgtcccgtgagactccttccttcagaccaaaaagccccagccccgccccttcacatctcagagccccccttcccccggctccatcctcacgccccccgccgcggcgctgcacccctgttctctctcttcccccgggccttgccccccaaaccgcgaaccccgttgtcgccggcgcatgccctgccctccctgcagcctctcacccggctcctcccccgagcggccccagcaatcgcctcctttgtcggtgcttctttattctcatttctgaacgatttggtttgagttgttgttgccgtgtttttctaaaatggaaatatgcagcggtcgtgggttcagccaggatttccgagtttgctcgtgttgactgggccttgccgggtgctggaggggaagggctgggaagaagaaccaggcaggtccccgttctgaacgtgccacccagacgcagccccagaaaccggatcgctgcagcgcccctcggcgatcccaacatgatgtgtacaggtgactgcgaggcagtcggggggtctcacagtgggctccctggacaggactctgcgccttgctatacctccatctgaattgcaggtagcccctttctgagttgtggggtcttgggtgtgcgactttacatctataagactcaatttccccatctataaacgggagagtctgactgcgctttataagattaatgagagaataaagtgagacaataggaataaagcacttagcagagtcttttgcataaagtgagctctcaattttactctgaccgccacaggagagagagagagagagagagggagggagggagagggagagggagggggagggggagggtgttgattgattgattgattcagacaatctcgctctgtcgcccgggctgtagtgcaatggtgcctgcgatctcagctcctgctacctctgcccgccatcccgcaccccgggcccaagtgattctcctgcctcagccttccgagtagctgggattacaggcacgttctaccacacccagctaatttttttttttttttttttagtagagacggggtttcgctgtgttggtcagggtagccttgaactcctggcctcaagtgatctgcccgccttggcctcccaaagttctggggttacagacatgagccactgtacccggccaagtttgtggttttaatcactgctggaatattctagggcaacagagttgaacatattggtgctacttttttttaaagtaggttttcaaaaatcgaaatgacttacgcatgacataaaatttatcattttagccattttacagtgtataactcagtagttcttgctatagtcacaatgctatgcaaccatcaccagtaactaattccagaacatttaatcacctacaaaagaaaccccaaccccattaacagtcatacctcttttctccccctgtccctcagcagccctaagttatcttctgtctctatggatttgcttatgctggacatttcatacaagtggaaacatacaacatacggccttttgtatttggtttctgtcctttagcataatgttttcaaagtttatccatgttgtagtatgtatcagtacttcatgcttttttatggctgaataatactcctttgtgtggataacaccacattttgcttattcattcatttgttgatggacattttgtttgtttctgccttctggcagttgtgagtaggccactgtgaacatgcaagcaggagtttttatgtgagcaaaagtttctaattatcttgggtatctgcctaggagtggggtactctgaatattttaattcttactgcataaatacagacatgatggtgaagagtgttggatcttggatgagaatccaggtttctaattccatgttgctgctctttaggctcagcttcattgtgcgtttagtsctataccaaaaattggcagtgaaggtaaagacatcccaaaaagtcttgatacaccaatgctaactttgtcatagtgctgacgcagagtatgaaaagcttaagtttttttctcaagagtgaaatttgagctttgaacacaaagcagtatttgattctgtttattaaataaagttgtctacagcagcatgtcaggtgctgaggaggaatattaaagatgtgtgagatccggccggtcacatcccagtgctttgggaggccaaagtgggcggatcacaaggtcaggagttcaagaccagcctggccaatatggtgaaacccccgtctctactaaaaaagaaaaaaatacaaaaattagccaggcatggtggcacacgcctgtagtcccagttacttgggaggctgaggcagaagaattgcttgaacttggaaggaggaggttgcagtgagctaagatcgcgccattgcactccagcctgggtgacagagtgagactctgtctcaaaaaaaaaaaaaaaaaaaaaaagatgtgtgagatcccagcctcacaccatcacaaaacgccaggaggattaaagacttaaactgaaaaagcaaaaatgtaaaatttctagaaaataattcgaaaaaatttcttcatgacctgaggctaaggagggatttctgaaataaaacaaaccctaaagcaraaagattgatatatttgtctctttcaaaattaagacattcagccaggtgcagtggctcccacctgtaatcccagcactttgggaggccaaggcaggtgaatggtttgagcttacgagtttgagaccagcctgggcaacatggtgaaacctcatctctacacacacaaaaaaaatttaactgggcttggtggtacatgcctgtgtcccagctacttgagatgctgaggtgggaggatggcttgagcccggaaggcggaggttgcagtgagctgtgatcatgccactgcacatcaggctgggcaatagagccagaccttgtctcaataataataacaacacatttagttcatgaaagacactataatgagacacaaaacatacagagagctagtatctagaatatttaaagaattcttacaattctgagagaaaaaaaaggaaaggacaaaagataggaacgggcatttcatagattacaaaacacagaaagcacatacatataaaaaggactgcagccttactagtaaccagggaaatgtaaattaaaaccataatgagataccatttcacagccaccctgttggcagaaggtgaagctttggacgctaccagccagtgacattgaggagtggcacgaacctgctgctggcgggagtgtgaatgggttctgccgctttgcaaaagcatttggcagtggaatgcatgtggaccagcagttaaaccatgggcaaatccctttgcgaactcttgcacaggtgtgcaggagatggggacaagcgctccctgcagcactgttcctaactgtaaatcaaaaccagcagaaacagtgcacgtgcctagcaccagcagcagggggacctgtgaatcgtggtgtatctgaaccagcagcagggggacctgtgaatcgtggtgtatctgaaccagcagcagggggacctgtgaatcgtggtgtatctgaaccagcagcagggggacctgtgaactgcagtgcatctgaaccgtgagatactgtgcagctgccgaggaggatggactatagctgcaggggcatggatgagtctcgggaatgatgttgagtgaaagaaacaagtcaccaaagggtccatgtggtgtggttcctttatgtgaggttcaaaaccaggcgaaacttagcaatactgtttttttttttgtttgagacggagtctcgttctgtcgcccaggcgggagtgctgtggcgcgatctccgctcactgcaagctccgccttccgggttcacgccattctcctgcctcagcctcccgagtagctgggactacaggcgcccaccactgcgcccggctaattttttgtatttttagtagagacggggtttcaccgtggtctcgatctcctgacctcgtgatccgcccgcctcggcctcccaaagtgctgggattacaggcgtgagccaccgcgcccggccagcaatactgttactgtttcagaatacatgcttggggtatacagctgttttgttaaaagagtcagggagtgactaccccagaatttaggagagaggctgcctccaggatagaggaggggctgtaatcagaggaacagcatacaggacttccacgacactggttttgttaagtaggctggtggctaagtggctgttttattattctttgaactgtgcataataggttttacatacttttgtatatatttaaacatttttgccaggtgcagtggctcacgcctgtaatcccagcactttgggaggccgaggtgggtggatcacttgaggtcaggagttcaagaccagcctgaccaccatgatgaaaccccatctctactaaaaatacaaaaattagctgggcatggtggagggcacctgtagtcccagctactcgggaggctgaggcaggagaawcgcttgaacccaggaggcggaggttgcagtgagcagaaattgcaccattgcactccagcctggaagacagaacaagactcggcctaaaaacaaaaatttcttttagttacagaaaaattcgttttctatacatctcctrccctccagaggcctrtgctctccttggacaaccaagaaaccaagatataagcaagttgagtgtttaaatagaatccaaagcagtgtgtgctaagtgccacatgggtaagagaggtggagaggaattcagaggtgggggcagtgccacggcctgggaagggaagggacaggaagggaagtttctccccagggctgacatgttgttggtgcttgttaggaagtgattgaacggaggagaagacatgggacttgaaacgtcaggaagaacagaggatttggagtactgagcacaagacagattcacactctgaaaaaattaagatttatttggaaaaatgttttcatcaatgaaaacagccatcgccctggagccttactgaaaagctggataatcccagctggtgaggaggaggacctcaggtctaccctggtcagtcaaagatggcaggaacctctgagactttctggctcctgaatacacatagtggttttggcttaagggaggttgcagagttttcagcttgtctcttcgctgtcctgaaagctgaactgactgttcatccatcccttcctcccactgtttatccttatcccctgtggctgatgtaacaaattgccacaaaggtagtggcttaaaatgacacagatgtctcttccttctggagatgggaatctgaagtcattgtgactgcgctaaagtcaaggtgtcagcagggctgygttcctctggaggctccaggggagaatccttttccttgcctctgccagcttctagaggccaccccccgtccttcactggtgacccacccctctctctattatcgaaaccagcagcacagagcaccctcaactcgagctctctctgacctctccctttgtagtcacatggctctctctctttgatcttcctgccccccttacaaggacacatgatgacattggacccaccctccccagctcggagtctttaactcagtcacatctacggagtccctttggccacataaggtgacgtatttacagggtctggggattaggctgtagatatccctggaggccattactgtgcccaccacactgtcgttcgctaatgctttgattgtctttttttccatcctgcttgctttgtcttctttaaaaccctggccagtctgccttgtgttctttcaccacccgccccacgtcacacgcatttggatagcttggtaatgtccatgtttcagccaagactttcctcccagaactcttggtacatgaaggtttttctatttgagttgattgccctttacactgctaggtggagtccccttcactgtggagtgggatcatgttacaggccacagcagtggtgctttgaagaggtgactttgctmcttgcagttttgaccataattgtcccgtgacgcttttgtagttgtaacgtttcctgtaggtttttgatgactcctgccctgtagaagtagaaaatgcttaaaagataatagggacttgctcttcttttcctagtttggggacagttgtggttttgttttgttcacagatgttttagttttctgcagagatgagaaaacaaagcttaaaaatttttttaaattattttatatttttccaacttcatcgaagtataattgacaaataaaattatataaatttaaggtgtacaacatgatttgatatatgtatactttgtgaaatgatcaccacaaccaaattagttaacacattcatcacctcagttacttttttatttctttatggtgagaacacttgagatctaccctctaagcagattttaagcctacaatttggtattgctcactatggtcactgtactgtacattagctctccagacgtatgcattttatatttgaaagtttatacccctttgaccaaaacttcccacccatgaccccacctctagcaaccaccattctactctctgtttaagaaaataaagctttagaataagttcttgcaggtagattgtacatgaatcagaattttactgtgttttagtattgctttccacatcatgggtttctctaggttgcaggctgccttagttggttttgagctgctataacaaaataccatgaactgggtggcttggaaacagcaaacacttacttttcgcagtttgggaggctgaatggtccaagatcaaggtggtggagccctcattatctgatcgcctcccaaaggccctcccttctaaaccatcacctggggggttaagattcaagacaagaatcagggagtggggcggaacgctcagaccgtagcacaggttaatagctttcgctaatcaagccacaaaacagtaactagtcagatacctaaagtaactttgacgaggcttgttatctacatatgcctaagtggacttctaggcttaaatgtgtgataaattcctttgaaagtttcagtgagaggctatgagcttttgaaatttggtggctctggggaaagtactgatttcttttgtcatgagaaaaatgttattttccatcatgtacagaagggtggggaagaagattgagagcagggaatgagttttaatttccagttctctaacatctttggcccatcagggtgtgagtgaatgtgtgaagtgtctggcaaggctgaggagcagcagaggccacagagccttggctctccgtgtggccctccttcatccccagctgagtaaccagggctcaggagcccccctcctcccctgctgcgttaccttcctaaacaagccccaccagctccctcccttggtgctcaaggaggaggtccatgcamtccagtctggcgtgaaggcatctccagtctgcctctcccagtctccttcacgcctgtgcgcctgcacacatggggcgtcacacaggacagcacagcctgtgctgtgcatgcgggggacttcctaatgtttcccgagtaggccagacccttgacggtgccgagcctttctccatgggcccgggccagggaggtcccttccctcctctctgcccagaaattctgctcacacttcaagacccatttcaccccagtggcgcccttgccacctcatgttgcagttgctccktttatctttctctgacttctgtgtataccgggtggcacggagtcctggtttattcatgatggtgtcctcagtctctgacactttgtatttttcattgctgttctagaagtttggttttccatgtagatctcgagagactgtaggaccagtgaccgtgtgtgtttaggcctcttcgctgtgttgttcactatccattcctaacttggcatttgaatgtatcagtcttctgtgggttttgtggatgtgagtcagatttctttgtcttgagctgcctctaaggaatgaaraacttgggtttctatccatcaaggctgaggaccagaccttgaatgccatcagcccccctgatgctctgtgatttttaaaatatacatagcaacaataatattaacacacgtttaaggtacttgcacacgatggcgctcccctgacaagaggtgaggggtgtctagtgggggcgttgagaagctgggccatgatgggcttgaagcccctcagccccaggttcctgtactcacctctgcagtgggtgcatctcctctgctggcctgagtgggaggtccctggtgggtttagcacacaagcttttctttctgtaaaggatcaaaggaatttgtgggtggtccgctcctgagctgagggctgagcgctggacaggaagactgcctgtgagctgcagccagagacttggtagtgttgagcttctttgtgccaggaattgtggaaggtgctggagaaacagagaggagtagaatctggcctctgccctggaggactatagcctgctggggtggtcagagacagaacagttgcaatgcagtgtgtgtggtggaggagagggaaaatgtggaccaggggtttcctttcatttcctccttaaagcatctgacccactcacagcctaggggggctgcccccaaacactgtaggacgccttcctccctgccaccctgccaggagattagacaggtggtgggcacctgaactaaggtgggcragccagaatccctgccaggaatttggaaagagaagccagggcagcccgtggcaatgtggatgttccagggaacgctgcaggtggagctgaagaaggggtgtgcagagtgaggcagtgggaggcccaggtgaaacccaracaggcaccaggcagaaaaaggcaccgaggacagctgtggctgctctcttccccgatgccggcctggtgcctgggcggtgtttccccaagggctcctgggattggaatgggcttttgtcccatttgatgaaatgttccctaggaaaaaaggcataggaaaagggggcaccctccagctgtgcctgaggacgcatggactgtgcccccagcagacgccaggcgcttttcttattctgagaggasggtacttggtgcctagtacatggtttgctgcctctacagagattcatggcgtaagaattgttgtgttttcttaatttttgagcacttggatgttactttaatgtaaagttttcccagctgaactatgaggaagaggaaaggcatttgtttcttgttggttttattcacagattggccttaagagaaggacggagccacatactgctgacggcccagaactggcagagagaaggtaagagaccccagggcagggaacgaccacagcagaaaaactggggccccctttgtggtcaggcgccttttgctagacatttacttcaaaaaggttcagattcttgaaaaaaatcgggcttaaggaggaagcttccatctgtgtgggttcctccatgaggcatgcctgacctcctttttgtagcgagagccttactctataggcttggagcaactcatttccccacaaatactgctttggctacaacccattgatcttgatatgtagtatctgttttttctttctttttwtttttttcttttttcttttttgagacggagtctccctctgtcgtccaggctggagtgcagtggcgcgatcttggctcactgcaagctctgcctccccggttcatgccattctcctgcctcagcctcctgagtagctgggactacaggtgcccgccaccacgccctgctaattttttgtatttttagtagagacagggtttcaccctgttggccaggatggttttgatctcctgacctcgtgatccgcccgtctcggcctcccaaagtgctgggactacaggcgcgagccaccgtggctggcctgtagtatctattttttcattgaaaacactgttttaacagcctagatgtatgcctacctgttattagaagaataagcttaatattccaagtgtctaggtttctttagtcatagcttgttattcccaattttattacattttgcttgagaggtcctggtacatacaggtaattacatacaggtaattgtttttgcatttactttcctcatggccttgtgtttgattagttatgacaaaaggcacccacactttttatgagttatttccggaactcacaatttaggatggtctaacatagaatctcggttgttttttttgtttgttttttggggtttttcttgagatggagtctaactctgtcgcccaggctggagtgcagtggtgcaatcttggctcactgttacttccgcctgcttgattcaagtgattctccttcctcagccacccaagctgggcagtcaccaccataccyggctaatttttgtgtttttagtagagatcaggtttcaccatgttggccaggctggtcttgaactcctgacctcaagtgatctgcccacctcggcctcccaaagtgctgggattacaggtgtgagccaccgtccctggctggaatgtcagtttttaatgttcttataggatattaatgttttgggcctgtctttgggagtccagtacttatgactgttcaagggctacagccagtgtgaaaactctgataccgtgcccgtcatcagcatatccagcagcaggagggttgtgggaggggtggtggcgcggcttcctctcatgcagatctggaaacaggtatgctcgttcgctacactgaagggggggccctaactttgaatatatttcaaaggattgtcaatcaaaggatttgggagcagtaaggggtattggtgactgctgtacggaagattgctcagaaaaaagaaagactttgttgaactagacagctcatattttaggtcatctcagccaatctggttcataaagaaaaattaccccaaaggagcatttattttagttgtttttagcttaagtatttggtttatgtacttagtcaaatttaaaatgtttccttttcatgatgaactttggcattctcattgtgggaggtgagtttctgtgcacagagccccagtggacagcattttacctgtagggaataaaggggcccaacttttcatttgaggaaaacttttttgtttgtttgtttcgagatggagtctcactctgtcgcccaggctggagcgcagtggcatgatctcggctcactgtaacttcctcctcccgggttcaagcagttctgtgcctcagcctcccaagtagctgggattacatgtgcccaccaccatgcccagctaatttttgtatttttaatagagacgaggtttcaccatcttggccagactggtcttgaactcctgaccacctgccttggcctcccaaagtgctgggattataggcatgagccaccgcgcccggctgaggaaaacattttttaaacttaatgccacattggcttaatttggtaacttaatatagcagcaatatcaacttaatacggtaccagtatgaaactttcttttttagagagattgtttccttatcgtagggcatttaggaatcctactgcttctccatttcttcagttttcagtcatatttcttgtgtacgttttgttgatttgtaattcacactacacatttatatatatttattcaatagttttaaaattattttatatgccttttatcacaatatggtgccattcttgtatgtgttccgtttcagtggttcatttgttttcttctgcttggttccttttttactttgcaaaactttgttgagctcagattacactgcagtggagtaggagggaattccccattctttctcaaacttaggctaatttgtgctgctattgttgggtattttcttagtrtccagacttttttttttttttctattttaaagggatttcttcaaaagttgccacccccagaagttttatatttctttttcttttggcttaaaatcatgttctttttagaatataagctgtgtccttgggtttgtgtgtatctgagttccctgtaatataagtgtagtctattgcagttgttttgatattttgtctttcgcaggatgcacacggttggtttagcctgatatgaagtccactcactcggtctgtggccagaccccccatgcctggcctttgtctacttctgcagggttatctctgattgcaggcacacacctaccacatcatgtggcattttacattattttgttaaatgtctgcgtcttcacctagggacggtcatttagttcatctgtgaatcctttgaatcacagtacatagaacatagtaggtgcttagtatatacttgctatgtggacactcaacagagttgtgttggacttttctttcctcaaatgtaagagaccaggcaacataatggttacaaattaagttagaagatggaggagtgctccctctattgtcatttgagaagccatttttccaagcttggagggtatctctttaaaaaaaattttttttttaattgatgtaaaggtttttgaaagctgagttttgtctccagtggattgtaagcttttgaggccaaggccatgtcttagtgccacctctgtttcatctcctttgtccctacacaggtagtaggtcctccattcttgctgattatgaataaagcaaagaaatacatgtacctctgctgtatgaattagaagctttgtgtttgttattattagactaggagcatgttacaggcacagagcatattgtgtttatctctgtagccacagcatgtagtgtagtacctgaattttagtgggaatttggtaacttctggtagttatgttgattagtctccttggaagaaagtaactttataagctacrgatgttaaatggtgagatcataaattggctgaatctccaggcatggtggctcacacctgtaatcccagcactttgggaggccaagggtggcggatcacctgaggtcaggagtttgagaccatcctggctaacrcggtgaaaccctgtctctactaaaaatacaaaaaattagccgggcgaggtggygggcgcctgtagtcccagctactccggaggctgaggcaggagaatggygtgaaccccagggggcggagcctgcagtgagccragattgcgccactgcactccagcctgggcgacagcgagactccgtctcaaaaaaaaaaaaaaaaattagccgggcgtggtggcatgtgcctgtagtcccagctacttgggaggctgaggcaggagaatcgcttgaacccgggargtggaggttgcagtgagccaaaatcgcaccactgcactccagcctgggcgacagggtgagactctgtctgatagatagatagatagatagatagatagatagatagatagatagdctgaaactgtgagccacgtacatttgaaaagttagtgttatttgaacgtacaattgacaagatctgatgccctcagctggatgtcttcactcagactgtgtatgttcctttaatttattaatcaaagaggctctctctctttccctctccctgcaggttgccatggctgctgttgacagtttctacctcttgtacagggaaatcgccaggtcttgcaattgctatatggaagctctagctttggttggagcctggtatacggccagaaaaagcatcactgtcatctgtgacttttacagcctgatcaggctgcattttatcccccgcctggggagcagagcagacttgatcaagcagtatggaagatgggccgttgtcagcggtaacctactttataatcaaaataatcttttctktgaagtcggatgcattattcaaggarctattgaatttaatgtggtgtttttatgggaacatgctgataaaaaaataaaacttatggctcctgccgtgattatgttcacatttcattttcttactgctctcatcttaggaagaactggcctcatgattggtatccttcctattctgctctctcctgttcccagtcctcctccagacccacttcctactatgtgcttttcctttttgttctctgttttaaaattgtcttgaaagtgttgccactttcagaaatgcttcacctattttgaatttcattttaatttatgaagatttcccagaaaagcacctcctgccactcattcaagccagatagtagtttgaaaacaaattcctactgtgtctcctaaccaatatggtgaatgtaaaataactccctgtccgtgtgtcaggatgtctgggagagtgtatagcatgcgcccttcacattcctcattcagcaacagtgtccttgacttgtagatactagaaccgacttgatttctagtgtgaatttttctstgactaaacctgacagggggtactttgggtccattttaagggtcacaccgtgaaatacacatgctcacttttcctgacttgcatcctaggtgcaacagatgggattggaaaagcctaygctgaagagttagcaagccgaggtctcaatataatcctgattagtcggaacgaggagaagttgcaggttgttgctaaagacatagccgacacgtacaaagtggaaactgatattatagttgcggacttcagcagcggtcgtgagatctaccttccaattcgagaagccctgaaggacaaagacgttggcatcttggtaaataacgtgggtgtgttttatccctacccgcagtatttcactcagctgtccgaggacaagctctgggacatcataaatgtgaacattgccgccgctagtttgatggtccatgttgtgttaccgggaatggtggagagaaagaaaggtgccatcgtcacgatctcttctggctcctgctgcaaacccactcctcagctggctgcattttctgcttctaaggtcagatgttacttactggaagatgaaatcctaatgccacagaacatttattaacagttgtttggtctgatttgttgaactctttgtcagcaactcacatatgcttatcctgtattttttcctgaattgatamtaagcaagtctttttttctcctgaattttcaagttcacccagaattaaaagtcttttcctcccctctgtctcaacaggcttatttagaccacttcagcagagccttgcaatatgaatatgcctctaaaggaatctttgtacagagtctaatccctttctatgtagccaccagcatgacagcacccagcaactttctgcacaggtgctcgtggttggtgccttcgccaaaagtctatgcacatcatgctgtttctactcttgggatttccaaaaggaccacaggatattggtcccattctattcaggtaggagtgtgcttcaggtctcataattagattaatgcatcatgaacctatctcagtgatacagagaaatctgattaaagcctaagatgagaattgtaaattctgactcttaagcctgacacttaataattttggttaagacactaaattttctttctttttttttytgagatggagtctggctctgtcacccaggctggagtgcagtggtgcgatctcagctcactgcaagctccgcctcccgggttcatgccattctcctgcctcagcttcccgagtagctgggactacaggcacctgccaccacgcctggctaatttttgtatttttagtagagacggggtttcaccgtgttagccaggatggtcttgatctccggcctcatgatctgcctgcctcagcctcccaaagtgctgagattacaggcgtgagccaccgtgcctgaccaaagacactaaattttcttttgtgaaattattaccttaagaattttcaaaagttcaatctatgtggcaccttaaagtgaaatatactactttggctggggtgtggtggctcacatctgtaatcccagcactttgggaagctgaggtgggtggatcacctaaggtcaggagttcgagaccaacctggccaatatggtgaaaccctgtctgtactaaaaatacaaaaattagctaggcttagtggtgtgtgcctgtagtcccagctacttgggaggctgaggcaggagaatcgcttgaaccctggaggcggaggttgcagtgagccaagatcacgctactgcactccagcctaggcgacagagcaaggctctgtttccaaaaaaaaaaaaagaaatatgctgctgtaagtggatgttaggactataaaaatactaagtatttacatgggaatttcaaagtaaaagattctagtactgcttgagggttacctctcagtgaaaaatataatccaaaaaaaccacaaaaccacaagatagggctatatttcatgcaaccattttatcaaataatatctctgtatagtcttagactaattttttcaagaagcatagaatttttattttaagcttattgtttaggcatgacaaaggattggtaccttttagtactgtagaaagtaactttcttagatatttgaaattgtgatcgtaagtattaatttgagaatgcataattatctattacaatatatttcagttcctttatctggtgtagtaaagagatgtgccctagtttagaatttttttttttttgagatggaattccgctcttgttgcccaggctggagtgtaatggtgcgatcttggctcactgcaacctccacctctcgggttcaagtgatgctcctgcctcagcctccggagtagctgggactaggtgcctgccaccacgcccagcaaattttgtgtttttagtagagatggagtttcaccatgttggtcaggctggtctcgaactcctgatctcaggtgatccacccgccttggcctcccaaagtgctgggatttacaagcgtgagctggcagggcgtggacnnnnnnnnnnnnnnnnnnnnnnnnnnnnnnnnnctaacaccgtgaaaccccgtctctattaaaaatacaaaaaaattagctaggcgtggtggtgggcgcctgtagtcccagctactcaggaggctgaggcaggagaatggcgtgaacccgggaggcagagcttgcagtgcagccgagatcacaccactgcactccagcctggacgacagagcaagactccgtctcacaaaaaaaaaaaaaaaaaataccagtgtgagtcactgtacctggtccgaatttttttttttttttaatattcggagttttcttaattatcaaacagatatttttgggactgtttgcatgaagagtattagatttgccactaccaaataaacatgtaagtatatcaacagttaattatgacttttatgaaaagtgagagattaataagaagcagttttggtcgggcgtggtggtggctcacatctctaatcccagcagtttgggaggctgaggctggtggatcacctgaggtcaggagttcgagaccagccttgccaacatggtgaaaccccatctctactaaaaatataaaaattaactggtcatggtggtgcacgcctgtagtcccagctacctgggagtctgaggcatgagaatcgcttgaacccaggatgcggaggtggcagtgagctgatcacgtcactgtactccagcctgggtgacagagctagactcttatctcaaaaaaaaaaaaaaaaaaaaaaaaagaagaaacagttttatttaagtagttgtttccaggtcctttaattacttgagaaaagcagagaaacctaaaaagtagtcttagaagtcactgaccataaaatttttttagaaataaagatatgaggatcaggtttaggtgcagtagatgttttgactgtgtttataaaacacgaacagtttactcaaaattaaattttgttcacattgataaactttccttgagaatgtatttttctgccaagaaattctgttaagctgatttaattcctggagtagttttctgtataaagttgttaaaactttctgttttcattttatgttactcaaattattttcaacactatcattttttatttccaattttacatcaaagatttgattcatcctttgctgttttgtccatggcatatttctctgatagcttttgctgctgtgattttgttcacaaagtgcgtgaktgtgtgtgtgtgtgggtgtgggtgtgtcctccctggagagtaacctgtgtccatttattgacaagaggattgaatgacctctattatcattcatcagttcagttcaagactagaatgtcagtacttgccaagggcctgtctctcttctctttcgtatacacggtgttagaactttcattcggttctgaacaaatctgttagaggagtgtaggctttctccacctcagcactgttggcattgagagcagrtaattccttgacatggggagcgtcctgtgtattgtaggatgttgaacaccatcctgggcctccacccactagataccagtagcatccactcccagtgtgacgaccaaatttgttttcagacattgccctatgtctgctgctagcacaaaggccctgagtgagaccctgaagcagagcagcatcagcaggactcccttccctggtcccctgagcacccccatcataggtcaagataccatcccaaggtactggtgtttctgacctgttttcttgttgaactttgttccatactacccctcaagccccagttttctcatagagtactaaccacgtatgcgtctgtctgttccaactgatttattcctataatgattttgtggtgtttttttttttttttttgagacagagttttgctctgttgcccaggctggagtgcagtgccgcgatctcggctcactgcaagctccgcctccccggttcacaccattttcctgcctctgcctcctgagtagctgggactacaggctcccgccaccacgcctggctaattttttgtatttttagtagagatggggtttcaccctgttagccaggatggtctcgatctcctgacctcatgatccacccgcctcggcctcccaaagtgttgggattacaggcatgagccagcgtgcccagccgattttgtggttcttaaccagtgaacattttgttcatatcacgttaagtaaagacagaattgtatttacatgcaggacagtccagcctcattacagaaagtcgggtaggtgggtggtggtcatgtttctgttccatgtagaatctagggtaagatcttaggcaaaagtaggtattcagtacagtagtacctggaggctttttcctttgttgtatttaatgtgattggtgggtatttgttgtgactggtgggtatttgttgtgattgattggtgggtatttgttgtgattgatcggtgggtatttattgtgattggtgggtatttgttgggatcgattggtgggtatttattgtgattgattggtgggtattgtgattggtgggtatttattgtgattgattggtgggtaatgtgattggtgggtatttgttgtgattgattggtgggtattgtgattgattggtgggtgtttgtgattggtaggtatttgttgtgattgatggtgggtatttgttgtgatatttgttctgattgctgggtattttgtctgtcactggtgggtatttgtgtgattgattggtgggtatttgttgtgattgcttggtgggtatttgttgtgattggtgggtatttgttgtgattggtgggtatttgttgtgattgatttggtgggtatttgttgtgattgcttggtgggtatttgttgtgattggtgggtatttgtttgattggtgggtattgtgattggtgggtatttgtttgattggtgtgtattgtgattggtgggtatttgttatgattgattggtgggtatttgttgtgattggtgggtatttgttgtgattggtgggtatttgttgtgattgattggtgggtatttgttgtgattggtgggtatttgttgtgattgattggtgggtatttgttgtgattggtgggtttcatgtgctggtctgtgtacttgttccttcagtgttgattttgggttctaaccttacaacctttttctctttcatttttagtttctttttgcacagtatatgcctgaatggctctgggtgtggggagcaaatattctcaaccgttcactacgtaaggaagccttatsctgcacagcctgagtctggatggccacttgagaagttttgccaactcctgggaacctcgatattctgacatttggaaaaacayatttaatttatctcctgtgtttcattgctgattattcagcatactgttgattcgtcatttgcaaaacacacataataccgtcagagtgctgtgaaaaaccttaagggtgtgtggatggcacaggatcaataatgcctgaggctgattgacgacatctacatttcagtgctttttccctaagctgtttgaaagttacgcttttctgttgttctagagccacagcagtctaatattgaaatataatatgatttgtcaggtcttataatttcagatgttgttttttaagggaaattgaccatttcactagaggagttgtgctggtttttaaatgtgcatcaagaaagactactgaaaagtattattttgtaactaagattgctggtactattaggaaaaatctgtgtgtattgtatagctctagctgtttgactatctgtaatgaaaatgctgcacttcaactggtatttcattagagaaccgtgtgtgtgcgtgtgtgtggtgcctttgagcaactttatttatggttaccatatttttaaaaagattttttgtcaggrtgacttaacatggactcttatagggtattaaaacaatctagattattccttttcatcctaaataagcctaccaaatttcatgctgttggtttgccatgaatgatattacttcctacattatatttgtgttttttcaaatctgctatggaatgaacttattcctagatttggatatgtaagagaaacctgcagtcatcttttgatttataaggcaattcttgtggataaatagtgatttctcagcctctgacccattttataactgaaatttagccctttagagcttgttatatctggttttcctacgtttttctatgtaatattattccattccagtagcattattgatagaaatagtaagtatttatggaatagtaaaatatggacaaattacgtgtgtgacatatctgtcaawataagttagaagcttattcttggtttgtgtaatgaatttatgtattgtagtgaatacctttactggtgtgaagataattatgcacaaaccctcacaatacgcgttaacattgaaacctgtgaaatgtccttagkttgggtcatataaagccaaccatttttgaggaccatgtacctagtgctttgaaaactstaagtcactatatgaatatgacaatatgtgcacatttaaaattcagagctcggcattgtgatactgatgcagaagctagtagattggttaaaagtctggacttctgtggcatttttttcgtgacgtgataatctatcataagcagacctaagcacagttttatgaacacaattttgcccatgacattgcctacaggatttccagatgtgacttgcactcagaagatcagtggtcaacttcagaagytcttccacgcttagatcatgtcttcagaacttagatgtgaaaatctacacactgggagatgctgtgagccccaaggttttgatggagtttgcttggaatcctcttgacktcatgccacattgacgtgaactttgatgtataataagcagcagcaacttcatgtgaaaatatggtcaggtagttatatgtaaggttacgtggtccagtaatgtcttagattgataaattaggtatggaatccatcagtgttacgtgatgagaataggtgaacacaccttgtcagtgatgatgtaaacttctctccttggcaggacatgggcaaacatgctgattggtgcaaatgtggtgccgagctgtccatagctgcagtgaaagatgaagagcaagaccttctctaggttttctagctttcattaaatgtatttttttccccagagctaatttgaaagttgattggaccactgtggatggggtstcattaagaatgtgggaaataggggccgagtgcggtggctcacacctgtaatcccagcagtttggaaggccagggcaggtggatcgcttgatcccaggaggtcgagaccagcctggggaacacatcctgtctctacaaaaaatacaaaaattagccaggcagggtggtgcatgcctgtagtcccagctacttgggaggctgaggcaggagaattttttgagcccaggatgcagaggttgaagtgagccaagatcgtgccactgcactccagccttgagacagagcgagaccctgtctcaaaaaaaaaaaaagaacgtgggaaatatgaacctttgaaagttaatctgtgaattgaaagtttaacaataaaagtagttgtttgtttcctttggaagagttttgttccagatgtttgtaatttggttgtttgtaatttggaatgagagaatttttttttcttaggagtgattgcaagaaattaacatgaacaacagtggtcataactgattaaaagctgacacgtcagtaacaaaattgtttataactatgtgcctagtctttggaagctactgggttgacttctggatctctttctcttggtaggttgagtaaggtgaggattgatttgagcatggaatttggctgtgtggatggagatcattggtgatttttttccatgagccatttcagtcttcaggctagaattgtaatggattcaagaaagagtgggaagaagaaaaaaagggaagagagcagatagagacagctcctaggagactttcctgtgttttcctatcctcaattacttaaaatctaatcacatttgggaaccagagggttagatggttatgtcctcaaaacctattccagtcaatttatgtctcagtctcagtattggcttatgtgttatttatctttttaaaaattcatatatgtttaatgagtataaagccaagcacaggacagtcgtgaattcagtagaaatattctctgttattcctggccgcgtgcagtggctcacgcctgtaataccagcactttgtgaagccgaggcgggcggatcatgaggtcaggagtttgagaccagcctgaccaacgtggtgaaaccccgtctctactaaaaatactaaaattagccgggcgtggtggcgcgcccctgtaatgcccgttgctcaggaggctgaggcaggaaaatcacttgaacccgggaggcggaagttgcagtgagctgagatcgcaccacgacactccagcctgggagacagagcaaaactttgtcacaaaagaaaaaaaaaaaatattctgtgtaattcctatggtgagactgaaagggaagggaggcagctctagaacccactctggaacgtgcacaaatagaacttccacttccacagcaagccccctgcgagggcgatgtgctctggccagccccgcacagcgccactgttgagggcgggatgatggtgctgcaggcatggagacaggtgctcccgggggagggggtgggcaggctcatggccttcccgtggcgtgacgttgacacccttcttcagtaagtgtttgctcaggtggttgtggaaatacttagaggggtgacctccatcagtgagttggatgggaacacacagtggggcaggacttgtgtcatcatgctttgtggacagtagtttccgcttatccacagttttgttttctgaggtttcagttacctatgatcaatcgaggtccgaaaatattcaatggaaaattccataaataaacagttaataagttttaaattgcacacagttctgaggagtgtgatgacatctcgcaccatcccactccctcctgcctgggattggaattgtccccatgtccacagcttctgttcaggtaacccttattttacttcgtaatgtccccaaagcccaagagtagtgatgctggcactatggatataccaagaagctgtaaagtgctcttttaagtgaaaaggtaaaacttctccacttaataaggaaagaaaaacattgtatgctgaagttgctgagatctgcagtaaaacaaatctctccatgacattggaaagaaggaaaaagaaattcatgctagttttgctgtcacacctcaaactgccaaagttgcagccacggtgagtcccaagaccatccaccggaggtcttggaacatgtcccctcggataagggagcactaccgtaggcactgcaggctgtcacggtgttgtcgaggataaggcatgtgtgacactgttgtcacacagctgataccctaggctgtgcttgttggaacagtttacctgctcactgacccagaagctggggatgcaggtggcatcctcagcctcctcttgcctcaccagcccgtgctgtgtagctgctgcagcatgtcaccacagtggcattgaccgtctgtcccattccctaagccactggttcctctttttcctggggctgctcaggcaggggttctccatgccttgaggatcacaagaagcttgcagttgccagggtccaggctgttggcagggattgagaacctcagtgcgatgggaggcagatgatggggagatgggaggggctggagccagatgtgaaaaacccgttattcagcagcttctcaggggtttgggagtgctgtcggatttgaagtatcttctggatgagggaggtggccattgggtagctgtgcttgggaacagtgtgtgtgttcttgaccagaggtaggtctcttagacaagaggtttcagaaggtggtttgcccactaacaaggtatatgtgatgtacccaagggaccacacatccaccttgaaacggtgccctttctttcccagcaccctgggagttacataatcaggagtcccacccagggtcttcctctgccttccatcatgttcgactttggttgccagtccagatcttcccgttttcacctccaggtcatcattcaggaagagggggtacagcttgaggtcccggtgactaatccagtttcaggcaggtgccggcagccaaggatgatctactgcgggcagtagtgccctcaggcttagcgctctccccgtgtgcaactccatgagaggtctcaggtggcagagctccagcaccaggagcatgaagttgtccttgaaaaagccactgacacctgagatgtgctggtgggcgaggctgcagtgagtatagcgagaggctggagacgtctccagggacgtctcctctgggtgcggattgagcagcagtgactcaggtgcgatcttgcccgagaacacctccttggtgtttgcctccaagattttgatgctctcagcaaagccacccttgccaaaaaagcagcctgcctgtagtgccaccggcaggtttactaggacctccaagatctctgcagagtggctgctgggactccaggagccacaactccagggaggctttcccagggttggctagtgcctgtgccatcagctattactctttaaaataacatttcatttgaataaagatttaccttcccatggaattacagatgctttattctgtatgtgaagcacaagtttaggaagttattttagaaccagagtggtgggaatccaccagtggtagaccaggatcctgtagctcaggctgtcttggtagctctccaagtaacttctctcccacacaccagtcccctcagtgtataggcattctctgaaactggtggtggtggcattctctccccttctttggggcctcgctgtcacatgatggatgcctgcaatcactgttctaccccagtttccagctgtagggccatgtattcaatggcatagtgactaaagggctgttcagagaaccctgaccaagattaatttacctaaagttggaacagaaggacatagtcaagtttaaaatcaaatgctttgtgtggtggcagaagggagtgcctttgacggtttgcaaatgcagagaggcaaggattctccaaaagttcagaaaatcgtatgagatctgagtcaggaaaggattcaagaatccaccaccacatattgaatcatataggagccgagcactttatgagtatgctttttgtttgtttttgagacaaggtcttgctgtgttgcccaggctggagtgcagtggcacaatcatggctcactgcagcctcgacctcctgggctcaggcagtcctcccacctcagcctccctagtagctgggactgcaggtgcacaccaccacacctggtaaaaacaaaaccaaacacaactatagagacatgtctctgttgcccagactagtctcaaactcctgggctcaagtgatcctcccgccacagactcccaaagtgttgagattacaggcataagccactgcgctagggcttatgtgtgtacttaatttaaccctcatcctttaaggtagatattagtacccctattttttaaaaaaattatttatttatttttaaggcagagtctcgctctgtcgcccaagctggagtgcagtggtacgatctcagctcactgcaacctccgcctcccaggttcaagcgattctctgcctcagcctcctgagttgctgggattacagtcatgcgctaccacactcagctaagtttttatatttttggtagagccggcgtttcacccatgttgaccaggctggtctgaaacttctgacctcaagtgatccggctgcctcggcctccccaagtgctgggattacaggcgcgagccaccccgcctggctagtacccctatttttgtaatgaagaagctgaggtacaaagaggttaaacaacctgctcaaaattacgaagtagaagcctgaggtggggtatggtaatttgtgattctacatttatccaccatattaagtcaactgtgttaaatcatgttgaaggaagatgatgcgctgtgatctgtaatattggtgcagttcagcattaccgtggtgcagtgtcaagttccaaaagacacaaaactgtctgatcggcctgtagcgcatcaccgcccaccagcagtacctgaagacgctttcagtcccctgctagtgccgtacggagtccgggctggtccatttacattgaaaacaaactgatcctagcatctaagtcacccagacatcttttaggcggcaagcttttcagacagtttaacacatttattcttgttttttcaaaaagagcaaacacgtggcgttacaaaggtcctccgtttcgcacgcaccggtgtcccggcagcgcgctgcgcgtcgggaggcccagtctgtcgtcccgtggggccgggggtcaggaggtcgggcaggcgggatttggggtttcgcgtgttccggaccggacacttcgccatcttaacgagctaccgcccgggttaaggggcacccagggcaggtgcccggccgggggtggggtgtccgagccgccggtgcctggacgtggacccctgcaggaagggtccgcgcgggaagcgagctctccacgagtccatgacagcaggcccgcgggggcagggagcctgcgccaggcagtctttctagatcctggcccagcctggccgctttcgcgcccgtgctccttttcggggatcctagagcgacgcgcagagcggaccaagggttcccccagcgcgttctcgccgcctggcagctcgctggccacgcccctccgcttccaccctgccaccggcccccgccgccgcaaatgtcgcgagaccttcgtccatcctcccggcgtggtcccgctgcccacggcgtccagagcgcgcacgcaagccccgggagcgcgggacagacagggcacgctgggtcggcggagctgaggctcccagctgtgggcctcgctggcccggccgcccagtctcgcgagagttgggagtaaacagccccgaatggagtgcccaggcgtgttcgccgcggaggcgccgtcatcccgggcccgccggccctgagctcccggcggcgcaggtacgtcagccgcccgcgcgcggcctccccgacccgctccgcctagcggtggcggcccgctcgctcaggtgtgccggttgcgtccgaggccccgaggcgagggctgcgggggccgggccgggtcgggggaggtgggcgcggggcctccggcgcttgtttggacacagcgtgcctgtaccgcggccctgcgggggtctgcgcgctccggcagcttgttccgttgcctggttttctttacgtgaaatgagcattcaccgagtgaaacaatacgccctgctctggcccggagcctccagacagactcaattctaggtgcgcttccggggcagtgctggcgtcaggtttaaaagacgtcgattctttgccttatctcggtctgtgcatattgcgctgctggtttttggaaatgcggggattctgttcggcgaactctcagaaccagattgccttttaaa

SEQ ID NO: 95969 - DNA, 29038 bp, Homo sapiens
acgccaatgaaaatataaatctacagcagcacattcatagtgcagacaatgtcagtgcactgtcggtgagggaaagaggcagaaacagcaggggtgacagaacagggccttccccagtgggaagggggtctcctggaattgcggctgcattcccaacgatccccggtgagtttctgagtctctcttctttctaggctgcttggttagcttgacatttcatgggaaattttatcctatttggtctttttaagtaatgtgggcaattcaagtaaagaaaaaaacattagtatgcatgaaagtatttcctacagtatgagatgtgtatatatatatataaaatagcaaaaaataattagaaattatgtaaatatccagaaatggcaaagtgattacaacaattatggtacatacactcaattgaatgttatgcagccattaaaaaggataattatgaaggtgatttagaaacgtgggaggtgtttgtgatatgatggcaagtggaaaaaaccaaaatcaacagcacaaacacagtgattacaactctaaaaaatatgttggcctgtggacaaatactgaaaggatttgccgaaataaaagctgtagtgattaagatgctaggatcatgggcgattatttattttttcttttttcccagattttctttaatttttttttttttttttttttttttttgaggcagagtttcactcttgttgcccaggctggcgtacaatggtgtaatctgggcttactgcagcctccgtctcccagattcaagtgattctcctgcctcagcctccagagtagctgggattacaggcgcccaccaccacgcctgtggtgtacaaaaaatacaaatttgttgtattttttgtagagatggagtttcaccatattggccaggctggtctcgaactcctgacctcaggtgatccacctgtctcagtctcccaaagtgctgggattacagacgtgagccaccacacccagcctgatttttcttaatacttaaagtagacatcttttgggacaactgcctagcccacacccctcttgtccgaacactgtgtccccacccaaaaggctaaatccctaacatctctgagggctccgtgttatcctgtatcccagtctagccctgatccaaagtgaaccaatcagattctctctactgagtctttgaaactggtagagcaatgataatgcctccgaggtagttttttttgtttgtttttcattttcttttgagatggagtcttgctctgtcgcccaggctggagtgcagtggcccgatctcagctcactgcaacctccacccaccgggttcaagtagttctctgcctcagcctcctgagtacctgggattgcaggcacctgccactacacctggctaatttttgtatttttagtagagacggggtttcaccatcttggccaggctggtcttcaactcctgacctcgtgatctacccgcttcggcctcccaaagtgctgggatcataggcgtgagccaccgcgcccagccagttttgttttttttttaagacaaaatacccataacataaaattcgctattttagccattttaaagtgtgcaaagcagtggtttttagtatattcaaaatgttatgctatcatcaccactacctcacttcacaccgttttcatcagcccaacaagaaacttgtgctgataagcagtctttcccctctccccatccccgaccccacacagcccctggcaactacagatcaactttttttctgtcgctagggatttgcctgttttgtacatgtcatataaatggaatcatacagcacatggccgtttgtgactgccttctttttgctcagcacagtgttttcaaggttcatccatgttgtagcaggggccaggggttcatttgtgtttatagctaaataatactccgtggtatggtgagaccgccttcggtttaccccatccatccactgatgaacacgtgggttctttctactttttgctattttaagttacatattaggaaaatgtgtgcacacgtttttgtgtgaatgtatgttcacaattctcttgggtacctaggagtggaattactgggctctatggcaattctctttgactttttgaggcactgccaaactgatttccacagtggctgtatcatttagcattctcatcagcggagtatgagggttctaatttctgtacattctcaccagttattctgttgttattattattgccatcctagtggatgtgaagtggtaactcgtggctttgattacatttccctaacgactaatgacgttgagcatctttttatgcacttactggccatatatatttacacatacacatacatacatatacacacacacacatatatatatacatacacatatatatatatacacacacatatatatattttttggagagatgtctattctaatcttctgtccatttttaattaggttgtttgtctttttattgtttagtggtaggaattctttttttttttttttttttaaacagagtctcgctctgttgcccaggctggagtgcagtggcgcgatctggctcactgcaagctcaccctcccgggttcacgcaattctccttcctcagcctcctgagtagctgggactacaggcgccggccaccacccccggctaattttttgtatttttagtggagacggggtttcaccgtgttagccaggatggtcgcgatctcctgactttgtgatccgcctgccttggcctcccaaagtgctgggattacaggcgtgagccaccatgcccggccacaattctttatataatccacataaagacccttatcagatatatgattttcaaatatttctcccactctgtggctcatctttttactttattgatggtgtccttcaatatataaaagtttctcattttgatgaggtccaagttatctattattcttttgttgtttgcacttgtgacgtcatatttaagaaataattgctattccaaagtcctgaagatttacacctattttcccttctaaggattttatagtcttagctcttacatttaggtcttggatccattttgggttaattcttctattggctgtgaggtaggtaggggtccatgtttgttgttttgcttgtagatgtctagttgtccccgtcccatttgttgaaaagactcacttttacccactgaatggtcttagaacccttgtcaaaaatgaattgaccaggctggtcacggtggctcacgcctgtaatcccagcactttgggaggccaaggtgggcggatcacgaggtcaggagttcgagaccagcctcgccaacttagtgaaaccctgtctctactaaaaatacaaaaattagctgggtgtggtggcacacacctgtagtcccagctactcaggaggctgaggcaggagaattacttgaacctgggaggcagaggttgcagtgagccragaccatgccactgcactccagcctgagtgacagagtgagactctgtctcaaaaaaaaaaaaaaaaatcaattgaccatagatgggtttatttctgaatgttcaattttattctattgatttttgtgttttatctttctgccaataccacattattttgattactgtggctttgtagtaagtttgttctttttaaagattgttttggccactcagggcccctagcatttctatataaatattagaatatgtttttctatttctgcaaaaaaaaaaagggcagtgaaattttaatagggattgtattagatctgtaggttaattttgggagtattgccattgtattagtctgttctcacgctgctataaagaaatacacgagactgggtaattcataaagaaaagaggtttaatcggattatggttccacaagctgtacagaagacgtagtggcttctgcttctggagaggcctcaggaggcttccattcatggcggaaggcaaagggggagtgaggagcttcacatagccagagcaggagagagggggtggtgatgcacacttctaaacaaccggatctcctgagaactcactgtagggtaccaagcggggatggtgctaacccatttatgagaactctgcccctatgatccaatcatttcttaccaggcgccacctccaacactgaggattacaactagacatgagatttggttggacacagatccaaaccatatgagctatattaacaatattacatcttccaatccatgaaccatgcatggaccattccatttgtttaggtcttctttaatttccttcaatactgttctgtggttttccatctaccagtctcacacttccttggttaaacatgtttcttttatcccttcagatgttgttgtaaatagaattgtttctttaatttcatttttggattggggcagtcttttgaaataaggacatgagtgggaaaaagcagaggatggctgttgacgcctagagaaaaaagtataaacacagagaaaaaaaaaacagaagccagaaattacataaaaaggaaggcaccgggaaagatgagaaagaacagggttgtgggagtactacacttagcaaatgcttaagcaaagtcaagctttcaagacaagattcctaaagcaaggcaggagtatcctaggacagacaaaagctcactcgacaaggcaaagagacaaacaccagagtttggaccccaccaactcccttagccagctggcaatatggtttcaccacttcttagaaaagaggaatggagaggtgtcctcaaaagccaccactaggctttcagaatgttttgtgtgtctgtgtcttggcagaatgagccaaacgtactttcttcgtgccccataagatgagacacacccagcaaaggctgtcctcatacagaactacctccaggtgtcttttatactgcaagacctgcaccaaagggttctacctatagaaatcctagcacctagacatagtcaaccaagtacatggctccctcaccctccaaccaaagatgccatatttccatcagagtggaacaaaatcccactgtgttcctaatgcctcctgcaattttgcatgtgggagacatggctggtatgtgacattctcttctacagattgtaatggattggggaaggagggggaactagagttcaggcctatctttctagaggacaaaataaatatgccttgataactgcaattatctgaaaactatttcaaagaaaactctttgtctcattctggcatttgctcaagggtatggctttccatcagtctctctgtctccatgtctcttttacatacatatgtatgtgtatatgcgtgcgtatgtgtacatacatccatacatatagacatattctctctctctccacacacactcacacacccctccaacctctgtggctctgagcgtcatgtgtgtaagacactgacgcgaatggtgagtgcctaggcaggggtcaaacaaaggctacctaccatgccagaggattgccacaaacacctcttaagcaagcatattccttggctcctcccagacacactgaatctgaatctctaggattctgatttcggagcccaggaatcctcccgtgcaggagttcccaggtgactctgatgcaccgggaggctggaggcgctcggatctagagaggaggcggcacttgtgcagtgcagtcgggaaagagaggaggggctgggccggtgcctttaggcggtcaggtgttaggaccggagtacaagccgccagccgcgcggragcaggccccgaggcagcccagccgcggggcagtaacctttagccacacttggcctccggccgccgccagagccgctccgcccccgccgcctcgcccccaccgccccgccctcctattggccgcgtccccagccgggctcgcggcctcggccaatggggccggcgcgcgccggaagccggaagcgcggcagcggcggcggcgctccccctcggcagctgttgtggggcaccatgcgaggcttcgggccaggcttgacggccaggcgtctcctcccgctgcggttgcccccgcggccgcccgggccccggctggcgagcgggcaggcggccggcgccctggagcgggccatggacgagctgctgcgccgcgcggtgccgccgacgccggcctacgagctgcgcgagaagacaccggcgcccgccgagggtcagtgcgcggacttcgtgagcttctacggtgggctggccgagacggcccagcgggccgaactgctgggccgcctggcgcggggcttcggcgtggaccacggccaggtggcggagcagagcgccggcgtgctccatctgcgccagcagcagcgggaggcggcggtgctgctgcaggccgaggaccggctgcgctacgcgctggtgccgcgctatcgcggcctcttccaccacatcagcaagctggayggcggcgtgcgcttcctggtgcagctgcgggccgacctgctggaggcgcaggccctcaagctggtggaggggccggacgtccgggtaaggggcygccgtcgaycccccggcagcgcggactggccgccctcctcgagtagtcctcacttgccccctccaagtcccacacaccccgccttccctgcccgatagcacgctcacttcgcccgcagttaccgcctgccaactgtgtccccttcccacgctgtctgagtcctggcctcgtcagagcacacccccgccttcctccagtctgtccttgaagtcctcacttgtatagtgtttactaaatactcagcacttggtggtctttaaggtagctgtcacctctcgtacctgattagtgtgtgctctacagtcttttgaaattattgtagctgagaagtgtttcatctatatggtatacctgaactagagcatcaggcagccttctgagaccctggatggtgtttcagaagttcactgggcacccgctatgtgtgagacattgtcctgagaagtcctgtgaaatgcacaaaggtaaataggactcaaggtcaccaccaccacccaggagtctccatggcttctggccttgtctgtgctccatgacttttgggagggcatttaactccctgcgttcagtacttaatgtgatgattctgagttgacttgaggtaatcaggcattagcacagttcattcatgttaaatgcagacacatactttgagatttaaatgattatgacccgaaagaaggcctagagcaacatatactcttcttttatactgttagtattaaatacggcgaaaaactaacctgccctttttttatttttatttttgttgcccagactggagtacagtggtgttatcacggctcactgcagcctcgacttccccaggctcaagcaatcttcccacctcagcctcctgagtagctgggactacaggtgcaggccaccatgcccggctaawtttttttttttttttttttttttgtagagagggcgtttcaccatgtggcccaggcttaacctgcccttttaatgaacgaaaaatgacgtaaatgtttcaggaagttttggacattcagaagtttgttatgtgcagttggtgttaaaaaaaaattgaacacttgaatgattatgacttgacccatttaagaactctaatactggtttaatagtttacattccttcagtcttacgtgggtgataacacgtatcccttttacagtaaaggagaacatgctgaggttgtgttacttgtcctgaaattcagagcgaaaagctcttgctgatcacccaccctaatccagggttatttgcastacgctttatatcactgtcttaccgttaatcagatgtttattagaaactttcttttttggctacttagatgcataaaattgggcataattaagtatgggattaatgtcaagagtgacaacagtggccatgatttgattccccgtgatagctggttaatttacagcgctaagtgttactgagggccaggcatctttggccgtaagattctcagacagaaagcccacagttgctaattgcatgacacagaatcagtcatgaattcttactgtgttgaattatcatgttctgggctcaagcctagtctgaatagctgagtttttctgatccacacttggacatagtacttgcagtatatcatccccccatgtaaatgatcagctcctcgaaaactgggaaacttgtctttaaatttcttgcatagcagaatgatgaatgaatcattgcaatagattcytgggtgtcctggcataagacacacttgacacactaatcattcagcatttgtgtggaggtgagwctgccccacactcagtcatagatttttgagcctgagagaaagccatgaaggacttgaaaggtttctgcccagctgagagggtcctcatatcagwcatttggacagctttgtccctcattgatttctcacatccggtccaattctgaattctctggttctgtgagatgctgtggaatacatccttttgttcttccccactcaagaaaactcttggttatcgcrtcattgggaaggaacacgttgcatggcaactgaagacactcacatccagacttgactgttgagagaaaggagctggcccctgggaaatacagaggctgctgagtccttagacattcacaagtttccttgctttttgaccaaggctatttacagaagggaaaaaaacattgcatactgtaatgctaggccaaaagtcctgtggaccagaggtgtttatcaaacagaatgaataacgacagtctgatctttgcctctgcatatggtttggacataatggcttcaggagcctttctgtgattgctttattgtgccccttccatttctttacctagaaaccccagccttatattcagtgcatgtaactgttagtagctgaacctattaattcccttccccttcccttgttctacgtagttgttttctcatatatacacatatatatgtatgtgtatatgtgtgtgtgtgtgtgtgcgtgcgkrtatatatatatatatatatatatatatatatatggttttttgttttgttgtttacggttttttgtttgtgtttatttttttgttcatgtttatgttttttcttgttacgtttcccaggctggtcttgaactcctggcctcaagcaagcaatcctccaatcccaagtgctgggattatagataggtgtgagcccagatgtaatttttttaaaatccctgtcgcttaaatcagtcttagaatagaattagattgttctgtacctataaactatcaactgggatctgatattgtaacctctcaccagaatcacttaatgtggtatgatctgatctatttttttaatctgattttttttttttttttttttgagacagagtcttgctctgttgcccaggctggagtgcagcagcacaatctctgctcattgcaaccttcgcctcccaggttcaagccattctcccacctcagcctcctgagtagctgggaatacaggtgcttgccaacacatctggctaatttttgtatttttaggagagatggggttttgctatgttggccrggctggtctggaactcctgacctcagatgatccgcccgccttggccttccaaagtgctggaattacaggtgtgaaccactgtgcctggctgtgttcttactttttaaaatgttcttttcctctgatctgagtgagtttggaggcttgttactgcctggatttgtggcctcctgaatgtagaggagtttggaggtatgtgtgtccctgtggttgcatggtaggtgtgggtatgaggatgtgatgtgtctgggggatggtggtttataggctttttgtttttctccagaggcccagttggttgatgacttcagtttcttagaggtgaaatcccagtgaaaccgagtcgaatccccagtagaggggaaggtctgagcgaggttcagtgatttgtgggcactcgaggaaggttggcctttaattcatggaaagggttcctcatgggcagtttggaccttgctgttagggtggaatgagaggtgctccaaccttaacagaggcacagaaactagagaagggacctggttcccactgccacagccacccggccatgctagacacctgcgtaccctctgccttttagttaattgagtactccttgttggttctagtaaattctgtgcttacctatgctaaataatacttatttttagataggacagtatacccatagcatcaagtgtacacctgcggagtgtcagcttacgtgagtgggaattttccccaaatttctcagcctctgcagtgctaccctcatccatgactttatcctcccttccccagagcagggcttctggacaagggaaggtaacttttcttcacataccaaaataagcagatcttgatagagcttcaaaagagagggaaccagtttctcttttaaaaggaaaagtgggctggtctaaacggtgtcatacaagtcaatggaattaacaatacacaatacacagagccgggtgcagtggcacgcacctgtagtccctgctacttgggaggttcagctgagcccggaagttcaagtgcagcctaggcaacagagcaagacctgcctctgaaaaaaaaaataagaaacactccagcagaatccactgagaactgtcgctgcccttagcatcaccaggatattccccgcagttgtgtttctcagtcttgtattggtgataaatggtgcctgaattaacgcacgtacagttgcagaggcctctttccctggtggtgtttgtatcctggcaacgttgccgcgtgctgtggctcatcccagcctgaacagctgctgccggtgttagaactgagcaacggagacttctaacctttagcctggattcccagttctcgtgtaccagtgtcacattttgtagctgtcaggagcccaaaatagaatgaagagatctgtaggggaggagctttcatcagccaaaccatttctttcataattaatattaaattgatagtaaaactaggtatttccagcttttttcatatcacgaatgtaagacagataccagtacctcttacgcagagctcagctcatccgttcctaaactggggtacagaagccctcctggcccctgggatggtccatagataagtatcagaggagtccatgtaccccaggaaaacgtatgcacaattttactaatgtatttgcagtgttttgggggcagggcctatggtttttagcacgtaagagtgtgagaggatcccaggaagattaagaattgctatagtcaaatgcagaaagtacagttttacaaagggccattctgtgtcacctagcaaatgatctctttcatcctgccctcttgctacttcctaatcacgattcattccatttttccatctttttcatttgatatcaatctattagtgaatgctttgcgaactataaaaatgaatcagaagtggatcctgcttttatggcgtttacaaccaagtaaaggagattgagtcatggaatgtagagttaaaaggaattgcaaagatcttctggtccagctgtctatctaatgcttaaatccgttttcaaacagctccgttgagttctgtccacctgtgcttgatggcttccagtgctgagggtcaccgtctcccaggatgacctctgtggacagctccagctattcaaaagttcctctttacactaaattgagtccacatctgactgcccatgacttccaccagtcagtcctagatttccttccccggcccccatggggtcacacagaacaaatttgtggcctctttcrtgccctagtgcttaaacatgtaaaaggagacctcatctccttccgaaaacttctctgagccatcaccccaaaacctgcaactctttctcaggcgtcaaagttctgagtcctttcaccctttaacagggattaaaatgtaaaattgttttataaaatttggaagctgagacaggagaatcgcttgaacctagggagcagaggttgcagtgagccagggttgcaccactgcactccagcctgggtgacagaggaagactccatctctcaaaaaaaaaaaaaaattctagctgttgtaaagccattcttataggtgttgcccattgtgttctttatgacccttgtagagagattcagaaggtcattcttgtatcagatgtcctgagatgtttactgktatttaataataatgttcagtggatctgttactatgtagtttatgagtaacaaagacccaaaataacagtgatttgaatatgacagaagtttgtctgtcatgtgaaagtctagaggtgggcagcccagagctgattctgctctttggtgctcttggtggattcagacttgaatcttgttgctctgccsagaaaaaccttcatctccaaagccacgtcgtggcccaggatggctgctccaatgccagccatcacaccgccttccagtctgcagtggaaaggacaaagaaaaagatgggccaagggcctgctcctgctgtcttttcaagttccccaaagtggctgcaggagacctctgcttacccctcattgaccagaactctgtcacatggctgcccccagccgcagtgcaatctttgttctggacagctgtgtccctagctgaaaagtgaggcttctgttaatttgaaagaaaaggggtacagccatcggggaacaacaagctgtggctgtgcaggcagcaccgaggcgacgctgctcctgctcagggccttgtgttctgctcttgctggaaaagcttcagtgcagatgtatcttgggtggtcaagtcaattcacatcatttttggaagtagatacaatataaataagtgaggcaaaattaggataatttcatcaactctgaaatgcattggttgccagatacgctattattttatgtccctctaaggtaggttaaaaatgctgccagttacggcggggcacagtggctgacgcctgtaatcccagcactttgagaggccgaggcaggcagattgcctgtgctcaggagctcgagactagcctgggcaacgtggcaaaaccccatttctacaaaaaagacaaaaaaaaattatccaggcttggtggcgctcacctgcagtcccagctacttggggggctgagacaggaggaccacatgagcccaggaggtcaaggctgcagcgagccgtgttcatgctgttgcactccagcctgggtgaccgagtgagaccccgtctcttaaaacaaaaatgctgccaattagtctgtgacccgccatcattcgaaagatgcatcctgacttgagagatgttaaaatatgaaaatgtacatctctgagttgatgaaatagggttcctgaaccaagtacttgtctttcttaggaaatgtaggcgtaatgttttgacgtatcaaagaaggttcccgagaggatgaggacagtgctgttgacacccttgctgtcttagtgtttcccttacagtgcatctttcattgttatgttgattttatatgattagtatgctcactatggtgaacgaattggaagatattatttgatttgggcaacttagttcaaattgaattgtttccttcagaggtcttaacagactgaagtagttaagtctaaatagagcgttgaacgaaagaaagcctgacttggtttgagataagatgtctgacagaggaatcttgggaaaagctgtttggagagttgtcttgcacarttgtcttatgtatygtgcttgagtgttttcattccttgtgctgaccacaacacagagatgggcttgatctgtcgcacattggaggcctgggatttatcttctcyttttcaggaaatgaatggggtgctgaaaggaatgctctcagaatggttttcctccgggttcctgaacctagaacgggttacctggcattcaccgtgtgaagtgcttcagaaaatcagtgagtaagtattacggttttcattttctttgtacatacatttttcatatatatttgtgtatgttttatattggctaaaagctaatctatctccattcatatgtacagtttatttcaagtctaataaaatccaaacacagtatttgcaartgctgyggctgtcaccacacatgataytaagattatggaggaagamgaaagggcaccaagagaaactgataygtctgtcagtgacctgcgtgtgaggtcttatttgtgtcctcttatttaaagcaaacacacccattttcgctsgtcccaagaccccgtgatcagagttgtagaaactcrctggaccaagcgtttgcattcgtaatcaaaacagtatttagcccacctggtggttaagatttctccctgagttaaaatctctaaacaaactatatcatgtgttagttacatccaggacccgtatgacacaggctagcatgtcacggtgccttcactacctttgcacgtaggcatcttcacattacatgttgtcccatggaatccatggtttgaaaagtgtcctatttgaaatgtaaccaattcaattcaaagggctgacagtgcctgctgccatttcacatgctgaaaacaaaatagcggtggggcgagattgctggaagacaccagatgagccccctgattgcagcactgacggcttcacagagatcccaaggaaagaaaagacagtgttcaacaccaagcgtttgattaggtttcacgttaaaatctgcatgaatccttccccggagcctcacaaactccttttaaaactgggrttaaaactggagcacaattttgtgtgtaaaatggtcattcactgtagttcctctcagtgggtgctgtttctcatgaaaatgactttctttgaattttccagaagagtccattaaagctctatttaaagaacttgtttgacttagacgaatagtatgaataggagtcagcagccgttgcttgtgaattatgcatttgtcttgtctctttataawttccgcyccagggctgaggctgtgcatcctgtaaaaaactggatggacatgaagcgccgcgttgggccctacagaaggtgttacttcttttctcactgttcracccctggggagcccctggtcgttttgcacgtggcactgactggtgacatctccagcaacatccaggtacctgcratggtcaattcgggacaagatgggcaccccatagagccccttgtgttttttgttttgttttgtttttacttgattttatcctccttttttttttttttaaataaatggttttgggcttttttaaattggttaaataaaatctccagatttgtaggtgtagagcgtagaagtgtaacaggcagacagttatggagcaaggcgagcattcatctggctgtgttgatcttaggttgagatacagttaaagtctatcacagaacatgtttgtgaggcagaaaataattgtgaaggaagaagggacagatacctgattcatacatagtttacctttacagcttttgttaaatgcctgtggggagttttgaaagatacttgattagaaaattgaaagaggcactcyatyccttatgcttgatgtgggccgaggacactccttggcgagtggaggttatgggacttgtggttgatagccccgtctgtggcaagctgctctgctcctggatgagtttggcaagaatgtctgaaacactcctgcaggcccgtgggggcagaagaaccagggagcacattgcagggtctggaaataggagtgctaaagataggtggcagggagcatgagacccctggggcattgcaggtttgctcagaccaagaggacatgagtggctgttaggaagctaagtggatgatggcccatcacaagatgagtgccctaagcaggtgtcctgctgagaagttagagaagctgagtagggcaaatgagcagacattcctgatcaccaaggagaaacacattcccttacaatgtttgtgtgtgaaagagtcacactccgatgccctcttggtgggactaggggccattctgacttctctgagggcaatttggcaacatggatgaaaattcagaatgtgcattccttctggcctaacaattccactcctaggaacttctcctggggagatgctcagccctgagagtcagatggctattcctgcagcattgctgacagttcaaaagggtggggatgataacctagggcccatcaggagagaatgggctccaggagggcgctgtagacacatggcgcggcctcgtgtacatcagatatctgtgcatgtatttaaatattgttgtaggtttatatggaaaaccagccttgacttactcttgagtagaagttcaggtttatagagtagcatgggtatggtgtggtcttatgaataatattaatartatctgttgagtagtgctctgtgcctgtcagtctgtgaagcacattttgtgtgttattgccctgagcaccctgtgatttaggtggtggtgttgtgttttttttttttttttttgaagcggagtttcgctcttcttgcgcaggctagagtgcaatggtgctgtctcggctcactgcaacctccaactcccgggtacaagcaattctcctgcctcagcctcccgagtagctggggattacaggcatgtgccaccatgcccagctaatttttttttttttttgtatttttagcagagatgggatttcaccatgttggccaggctggtctygaactcccgacctcaggtgatctgcccgccgcggcttcccaaagtgctgggactataaaggcgtgagccaccgtgcccggctgatataggtattattatgagaaaaccgaggcttgagggaacgtccgcaacttacccatgatcatcgagcaagtaagggcggaactggaattcagacccagctcgcatcctgactctaagggcacgtgagaatgtgcgtgggtacgcagtcctgtgtgcatttgtgtgcgtaccgagagcctctgagacaggcctggaaaggtgttcatcaaaagggcagcagcaacagtcatggagattagattttggagtaattggttatttttttttatgcatggttttttttttttgcctctttttgttttattcacttagttttatcaattttttgtctctttgacattatacatacctcacttgtataaccgaagaaagttttgtttttattttgaaaacttaaaaaaaagattgctgggatttttgcataaggaatcacaagataatttgcagacttcttaaaaaacaaaggagagcccgacgcagtgactcgcgcccagaatcccaacaccccgggaggctgaggaggcagccggatcacctgaggtcaggagttccagaccagcctggccaacatggtgaaaccccgtctctactaaaaatacaaaaattagccgggtgtggtggtgygcacctgtagccccagctacttgggaggctgaggcacaaatgagaatcgcttgccactaggcagaggttgcagtgagccgaggtcgtgccactgcactccagcctgggcgacagagcaagactcyatctcaraaaaaaaaaaaaaaagaaaggagataagcctgggagtgatgtgaagtgagctccgtcctatgaacgacagagctcttccatagagcacggtgcaggacagcgggcccctctcgggcctcggaggatatgtccttcatgtcatgagctctccccctttcctcacagcagcatttcttcactttgttggagtcacagaccctgttaagaatctggagggaaaaatgctgaggatgttttcctcagggcagatatgcatagactcacacattccatacacaatttctttctttttttcttttttttgagacggagtctcgctctgtgcccaggctggagtgcagtggcatgatctcggctccctgcaacctccgcctcccgggttcacaccattctcctgcctcagcctccgtagtagctgggactacaggcacctgccaccatgcccggctcattttttttgtatttttagtaragacggggtttcaccgtgttagccaggrtggtctcgatctcctgacctcgtgatctgccygcctcggcctcccaaagtgctgggattacaggcgtgagccaccgcgcccggcctccatacaatttcagaacaatttcagaaagttcatggactgactrcgagacctcatctatgcagtctgagctaaacgctcctacttccagaatcgaaggtcgctggtagaagttaaaatagtttaaatgggttcttcaaaagtaagctggtttccctgcttcaaagcaaatgaaaaggtagccccctgctgttccactgttatccagtgagctttggagtgttaaggattatgcttcggagtataagggattagaaaacgctgccgtgagaatgagaggcaataaactcagacttcagctaagcgacttcccagtctagctcgtttcttagaatgcctcgcagggatgtctgcaaatgtgttaccatttaggaaaaacagaaatggcacaaaacccaaaaggtacrtgaaaaagtcaaacaaaggtatatttcctaaaagaaaattatataggactgcttatagcctcttgagaaatttgaaaaacctagggttcagagaaaaggaggaaaaacaattcagtggtgggaaacgtcagtcctttaggagaagctgaaggaactggagctgtttggtctcaaggatccrtgtgttatcgctgagtgttggccggagagtttatggagcaagtttttgtttgcacaaaggcctaaaagagacagaaaggggcatacattgctcttcaacaaagtttgcatgaaaatttcaagaaacgatgcagtgctgaggacccccaggcacgcggtggagtcgcctcctccagagagttttcaaaacagagcagcttttaggctctgtagcctgaaccccagctggggagccgaggtctcttccagctccttcagtgctctgagaattgtcttctcgtcccagcaacaggcttgcctcgtgggctgcagagcggccaggccacccttagaaccatcgttggtgttttccaggcaatcgtgaaggaacatcctccatcagaaacagaagagaagaacaaaatcrctgctgcgatcttttattccatcagcttgacccagcagggactccaaggggtggagctgggaacattcctcataaagcgagtcgtcaaggagttgcaggtaagcgacacgcagggagccccggtcacgcttggcttccgtgtggtcaggtcagcgaacctcgtggggtgtcaggtgccatgagggacacagatgaagacaggagctaaagggaggggcagggggtagaaaaggtgccagagrccccttggcaactcctaggagccatgagtctcccagagagatgagaatgatgctgagagaggcctccaacccagctgcccagttgactgcaagacgcagttgtattctgaggtcatcaactctctctagggtgacctcgttctgacctggtcaggacactctggatttcacgtgtcatcctggtgtaagtgtcactctgaaatgtcccagccagatggcacagctggtagtcatcctgccacgcctgtcctccccctgcccctgcccacactctcagggcctctgacacctgatgtgctgttagcttgggccttctcatggcctgtgagggagtgctgaggtgagaccagacagctcgaaggtaaatgcatcggcttttaatctaactctcctctctttgctgccctgtgaaaaacatattaaccatcctacatcagaaatgttgatgttcactccaggcctaggctttcaaaaaccaccagcctcatcagggacttggataaattccaatgagtagaatctaataattaggtgcggtagctagatgtttgctaatgactggctctgagcagggtgttcactgtgttgggggctgcacatggctgcagcagaggccttcctttgaggacgacagtgtggagtggggacgtttacatgctcctagtaaattcataatcaatttctaattgaagccctcaggattcagctgggcgtgggcttcattaccacgccgccatgtttcccccgggtaacaatgagccgtagctcattcccacagtttcctcattcctctgtcttcactgagggtggtgattagcagggcggggtggggaaatgtatcagggtaaggaaggcaggaagaggaggagcagatcccgggattcgggggagttgggccttagcccagcagctgtcctgagggtgtcgcttaactgcccctgggcggccagcctagaagtcctcaaagggagtctggaagggaacaaatggcccctctgcrtggaggcgctcgtcagggtttacaaaagcaaaacacagctgggcgcagtggctcacgcctgtaatcccagccgaggcaggcagatcacctggggtcaggagttcgagactagcctggcgaacgtggtgaaaccccgtctctactaaaaatataaaaattaggcatggtggtgcatgcctgtagtcccagctactcgggaggccgaggcagragaatcacttgaacctaggaggcggagattgcagtgagccaagactgcaccattgcgctccagcctgggagagacagtctcaaaaaaaaaaaaaaaaaaacagtggttcggggtgggggaaaaaccccgggagctaccacgaatgcccaacgagaggaacatggtgaggaaaatcataataggctgctttttttatattactctgtggttaaaatcttctgtttttgaattttaaatgataatgagaaaatgctcacgatataaattcatattgcaaaatataaagtaagtgtctcacccatgcaaaaatcgcatcaagaaacaccaggagtttatctgagcagactgtcgagagtggttttctcaatgtagtggagtgtgatggttttattttcttctgtcattaattttttcaaaaaatatctatagtgagcatgtgttacatttataatcagaaagtagcagattgtttgaaatgatcatgagatctctatctagttgggacaataacgattgaaccgtgtcatgtgatatggagagatacccgcagcgtccccctcctcgccctctaccccgttctgcacccgccgtggtgtggccgggcagctagtcgctcactcaccagtccctggccactcgtgtgccgagcagcagagcagcttccggggcctcacaggtggccatgggaggagcatggtgtacgggaaagacaaggcctgcagtgagtagctgcagtgcaccgagccccactccccactggccagctgtctggttttaggcaagtcccccaacactctagtctcggttttgccgacatgagaagggatggtggggacagagacgccctgccttggggagtcaggatgcctccagggtctggcacacatcaggttcctgataaatatttcctgctgggtgtggcggcgcgagcctgtggtcccagctactcagcaggctgaggcaggaggatggcttggacccaggagatggaggctgcagtgagccatgatgacaccactgcactccagctagggcaatagagcaagaccctgactctaagaggaaaaaaagaaaagctgcttgaaagaagataaacaacatgtatcagatgtcactctgaccgctacacagcagcatgtgagccgtaggttaagaggtgctcctctgttggtaacgtacctgctgaatttgtgttttctccgccttcctttccaccccaaccatgctttacagagagagtttcctcaccttggggtgttttcaagtctgtcacctatacctggtttcaccaaatggcttctggggcttctgaactcgcaaacgaaggagcatgggaggaatgaactctttacagattcggaakgtaaggaaatctcggagatcacaggtggccccattaacgagaccctcaagctcctcctcagcagcagcgagtgggtgcagtcggagaagctggtgcgggcgctgcagactccgctgatgaggctgtgcgcctggtacctgtatggagagaagcaccgcggctacgcgctgaaccccgtggccaacttccacctgcagaacggggcggtgctgtggygcatcaactggatggcggatgtgagcctcagaggcatcaccggctcctgcggcctgatggccaactaccgctacttcctggaggagacgggccccaacagcacctcctacctcggctccaagatcatcaaagcctctgagcaggtcctcagcctagtggcccagtttcaraagaacagcaagctctgacagtaaacctctcctaaagcacagggccccggctaagaaaacgatcattttcaggaggggccgggagttatgtatctgaagcagctttccaagcaaagccaaagttgactgtgttcttgtcccgcagccggtccacactgtgaggccaggcctcaacttccctcaccctgggcgtgacatgcacccagtgcaagacggttgtgggtgcgggtgcacacaaatgagtgggttgctgtgctgtctccggaagattctgtcgttgcccttggcctggctccctgcccggggctggtgctgtggtacctacatcttcaggaagctgtgcagcctctgccattgccatcccagggggatctggcatcctcctaaggaccggggcgcgtggcccagataagaataggtgttcctttgygctcataaaacagaatgcggcgatggttgctttagccgtttctcaccmtgcaatgcagagggacaaagggctgtgctacacttcccagttacattctgaagctcataaatgtatgagaaggtttgtgattttgcacaaggtgtgtgtagtaagttaaattgttgaacacaaaaatgttgctgcttgaggcataagttggataataggctttaaatgatcagggattcaggttcataatgaacttcacagtaaagaacacgtttgttctgtaaagcattgaacatctgattgtgtagtggtggtcgtctttaagattagagacctgggaaggctggaatcagccagccagcctacggggagtttgggatgaaggagcctggggtgtgttggatgagaacaaaggtgaaggaaggggcagtcattgtgcttgtgggaggaaggcagttgtgtttgtgtgtgtatgtgtgtatcagtgcacatctgtgtgcatgtgcacgagcgtctctgtgtggatcagtgcacgtctgtgcgtgtgcacgagcgtctgtggatcagtgcacgtctgtgtgcgtgtgcacgagcgtctctgtgtgtatcagtgcatgtctgtgtacgtgtgcacgagcatctctggatcagtgcacgtctgtgtgcatgtgcccgagcgtctctgtgtggatcagtgcacgtctgtgtgcgtgtgcacgagcgtctctgtgtggatcagtgcacgtctgtgtgcgtgtgcacgagcatctctgtgtgtgtcagtgcacgtctgtgcgtgtgcacgagcgtctctgtgtgtatcagtgcacgtctgtgtgcgtgtgcccgagcgtctctgtgtggatcagtgcacgtctgtgtgcatgtgcacgagcgttctatgtggatcagtgcacgcctgtgtgcgtgtgcacgagcgtctctgtgtgtcagtgcacgtctgtgtgcgtgtgcccgagcgtctctgtgtggatcagtgcacgtctgtgtgcgtgtgcacgagcgtctctgtgtggatcagtgcacgtctgtgtgcgtgtgcacgagcgttctatgtggatcagtgcacgcctgtgtgcgtgtgcacgagcgtctctgtgtgtcagtgcacgtctgtgtgcgtgtgcacaagcgtctctgtgtggatcagtgcacgtctgtgtgcgtgtgcacgagcgtctctgtggatcagtgcacgtctgtgtgcgtgtgcacgagcgttctatgtggatcagtgcacgcctgtgtgcgtgtgcacgagcgtctctgtgtgtgtcagtgcacgtctgtgtgtgcacgagcgtctctgtgtggatcagtgcacgtctgtgtgcgtgtgcccgagcgtctctgtgtggatcagtgcacgtctgtgtgcgtgtgcacaagcatctgtgtgtgtcagtgcacgtctgtgtgcgtgtgcacgagcgtctctggatcagtgcacgtctgtgcatgtgcacacgtgcatgtgcatgtgcttacacgtctttgtgtgtctgtgtgcgtgtgtccgcagttgccctgtcctcgctgtcctcggtttggcagacaggtccctcaccttccttgcctttcatctcctgtgaccctcgccaggccccttctctgtcttctgcgtacggcgtgttgcttcgtgacagacggtgtgatcgcgggagctgtctcatgcctcttgttctccgggctgattctgaaagagtggcttgcaggccaatcaatgcaatcctggcaacctgcccgcccttcttgcgggcagagttctttaccgtaagcgtccccagaccctcaggcctgcggaaacctgctgggccttaccgtctttgcttagcttttggcctagaccttaaagaccagcagtcttctgtgctttatcctgctgcctccagagtgccatggacagatcacccattctcgatcactccggcagcctttcggatccggtggcgcccttcctggctgtgtccttcacctgtgctgtctggttctctcctgtgtggacaggggatgataggaattcccgctgcacaggccgctgggaggacgggctcaggtgacatctgccgaggctttggctcaccagaggagtttgtagatgtcagtcatccccaagtcactaggaactagcacgcctgaggtaggtctcggaatagtgttcaaatccattttactattgcggccaaggagccctccctccagcaaggcggctcatcacatcacgttactctttaggtcaaatgtaaccctcccggttttatttatcactcaggcagagtttcttaaccttttgtgagttacagatcactgaaattctggtgaaagccaggtaggcctcgccgcaggagaacacatacatggtgcacagaacacacacagtgcacagaacacagtgcacaggagaacactcacagtgcacaggagaacacgcacacggtgcacaggagaacacgcacacatgttgcacaggagaattcacacacagtgcacaggagaacacacagtgcacaggagaacacatggtgcacaggagaacacgcacacacggtgcacaggagaacacacacagtgcacaggagaacacgcacagtgcacaggagaacacagagtgcacaggagaacacatggtgcacaggagaacacgcacacacggtgcacagaacacacacagtgcacaggagaacacgcacagtgcacaggagaacacggtgcaccggagaacatgcacacatggtgcacaggagaacacagtgcacaggagaatacagactgcacagaacacacgcacagtgcacaggagaaaacgcacacacagtgcacagaacacagtgcacaggagaacacgcacacagtgcacagagaaccacacagtgcacaggagaatacgcacacacagtgcacagaacacagacacagtacacaggagaacacgcacacacagtgcacagaacacagccagtgcacaggagaacactgcacaggagaaccacactgcacaggagaatatgcataaacagttcacaggagaacacgcacacacagtgcatagagcacagacacagtgcacaggagaaccacacaatgtacaggagaatacgcacacacagtgcacaggagaacatacacgcagtacacagacacagtgcaccggagaacacagtgcacaggagaacacgcacacacagtgcacagaacacagacacagtgcacaggagaacacacagtgcacaggagaacacagtgcacaggagaatacacacggtgcacaggagaattcacacacaatgcacaggagaacacagtgcacaggagaacacacacacacactgcacaggagaccatgcacagtgcacaggagaatacacatggtgcacagcagaattcacacagtgcacaggagaacacacacagtgcacagaattcatgcacacagtgcacaggagaacacacacagtgcacaggagaacacagtgcacaggagaacacacactgcacagaacaaatgcacagcacacaggagaacatgcacacacagtgcacaggagaacacagtgcacaggagaacacacagtgcacaggagagaacacacagtgcacagaacacacagggcacaggagaacacacagtgcacaggagaacactgcacagaacacacggtgatcagaacacacggtgcacaggagaacacacagtgcacagaacacacggggcacaggagaacacacgatgcacggaacacggtgatcagaacacggttcacaggagaacacacagtgcacagaacacacggggcacaggagaacacacagtgcacagaacacacagtgcacagaacacacggtgcacaggagaacacatggtgcacgggagaacacacggtgtacagaacacacggtgcacaggagaacacgcagtgcacaggagaacatgcaatgcacgggagaacacagtgcagagaacacacacgcmctgcacagaacatgcagtggtgcacaggagaacagtacacaacaacacattccatgcacaggagaacacacgcaattcacaggacacaacagaacacacgcagtgcacaggacacaacagaacacacgtgcacaggagaacacagtacacacacagcgcactggagaacacgcacagtgcacaggagaacagagtgcacagaacacagtccacaggacagcacacggtacacagcagaacacccgcagtgcacaggagaacctagtgcacagaacacacaccctgtgcacagttttgttttgttttgcttttgcaattccagggagctccctggcctcccacagccattcatagagcccattctgtttgcgataaaaacagatctcctccagctcacgtgaggctaggcacgggttcctcaaaacctttttgggcagctagcagctttgactagcagctcatctcaccaggctgaggtcgctgcctgtgaacagttgacagacctaaagccagccagaatgttctgtgtcagagagccctgtccaatgggcagagctgggagacacgcaggaagacccccagcccatgcccgttctcaggcctgaggttcattctcgttctctccctcttccctttccccttcctccctcctgccctcgaatctgcaaggtctctccgggtggctgtgttctgccagggcctcccaggctccaagatcactgccttcagggagcccaggaagagctgcacatccrctgcctctgtgtggcaggcgtgtccgagactgcaactcctagttcccacctttcacacctcatctctctaacctcttatggaaaatttcaaacatatgtaaaagcagggagaaattgcataacgaacctacagacctatcacccagcttccacagtcatcagtggttttctgtttttatcaaactttatctttgtacttcttacagtgcttcacatttagcaggtcctcaatgaacattagatggatggatggaaggaaggaagatggatggatggatggatggatggatggatggatggatggatgacagatggatggtggagggttaatggaaggaaggaagatggatgggtggaaggaagatgggtggatggatggtggagggtggatagaaggaagatgggtatatgaatagatggctgggtgggtggaaggaaggaagatggttggatggatggaagatggatggatggatggatggagggtagagttttaatggaaggaagatggatggacgaatagatggaaggaagatgggtggatggaaggaagatggatggatggaatgatggatgggtggtagagggtggatggaaggaagatggatgaatagatgggtgggtgggtggatgtttggatggatggtggagggcagagtgttaatggaaggaagatgaatggatagatggagggtagagtgtagatggaaggaaaggaaaggaggatggatggatggatggatggatagatggatggaggagggtggatggaaggaaggaggatggatggatggatgggtgggtgggtgggtggatggatggcgcagggtatatggaaggaagatggatgaatgatggaagatggatggatgggggacagatgaattgatggcggaggatgttaggatgggtggatggatgtattaacatcccttctccatgcctcagtccccatcataaggagaaagagcctgtcgtccctctatgatactgcactgaaccaatattcccctcacttcatgggtgttacaaacctcttatcatctgtttacgtctcactcttactgtagaacctctagaaaggcaggtggcttccagctcctcgcttttcctgagggatgatctgaccacccattcttacacatgtcatctttcccacagtggcagtgcagaggagacaaaagcagaacaaaagcagacagcggccaggtctgagggtgataggctactcactgggtcctagtgttctgaactacaccctacaggaaagtgctactcagtgcccaggtgacatcgtcacaaggggaacacagtggctaagagggcaggggctcagtctcacagacctggtttccatcccacttgctctcaggaaccctgggcaacaactgtgaccacagtgtcttcctctggaaagtgcccagcagtgttgggctcaccgtagctgcacaataaattgtcatgagtgctttccactgtgtcccaggttcaaggctgaagtcacaaccccacccctgccacagagcctgcccccccgagtgttcc

SEQ ID NO: 95970 - DNA, 35931 bp, Homo sapiens
  misc_feature (1)...(35931): n = A,T,C or G
aggccacgtgatttacctgacgtcccagagacaatcagcagcggtgctgaaaatttgcagctgggtctgtctggctcccatgcacctataaccccagggccccggggtcagatttcaggatccagcacctgagactgttgctgctccccctgtcaccagcctgtagggcatgctgggcagactgtgctcctgcttgcaaatatttgctgcccctcctaccccgctgatgtcaggcatgtgcacgtgacaggctctggccgctgaaatgtgaataaatggaaggcatcattcccaagaaaggtttgtcttttggagacagagtcgtactctgtcacccagactggagtgcagtggtgcgatcatggctcactgcagcctcaacctcccagactcaagtgatcctcctgcctcagctttctgagtagctgggactacaggtgtgcaccaccacgcctggctaattttttaacttttctttttagtagagatgaagtcttgctatgttgctcaggctggtctcaaactcctgagctcaagtgattctcccacctcggcctcccaaagcgctgggattagacatgtgagccgctgcacctagtcatttttttttcaacttttatttaccaacaaagtttagtctccataaagactgtcaaaaactgccaatgttgactatatttcaagtcatcatggtggggtagtgggaaaagttttcaatcagcaataatcacatcttgggtaaacctcactggcgacaacactgacactgcacaatcccctggcagcgtcaggagccaatgtgagcttcaccatgacctcttttccctctgccacaatgactgataattgccccaggcagcagctgtactagcagcctgtgtcccagaatgaaggccgcatggagccaaagaatataccctgtgatgggcatgaagtgggaacagcaagtccatctttggtgtcataagtcaggagattttggggttgtctgtgatcacagcatgacctggcccatcctgatctggtccatccttgagtccaccttctaaactttggcttatgtaaaaaacaacagtcacaaaagggatcacattggatgtactgtgcattatactaactcacctctttcactcagtatactaacctcagtggcacacacaggctcacctgaaaagtgagggatgagagggaggcagcttcacatggcatgggccagaggccagcgcaggcacaggcagggccagaagggaaaggagtctgcagccccacagccttgtggagctgaccagcctgtgcttcagggctgaggaaagttcaataagggctgacaacctccgaggctgctgcccagcatgcgtgagagcttcacattcattacgtttactcatactcgactcaaacgcaacctcaaggccaatcctgtcccccttacccaatagctgaacttaattcatctgtagttcccacggcttcaaacacttggtcatctttgggtctcctttctcctgtgaaggtactagaaaaccctgtggaaaaaaatgtttagccacccaaattaagattctgttttcctgatatgctgtttttttttttttaaactttcaaagattttaaagaactttctcttttttgaacagtcactctgtcatccaggctggagtacagcggcgtgatcttggctcactgcagcctccccctcccaggttcaagtgattctcatgcctcagtctcccaagtagctgggattacaagtgtgtaccaccatgcccggctaatttttgtatttttagtagagacgggttttcgcccatgttggccgagctagtcttgaactcctggtctcaagtgattcacccgcctcagcctcccaaagtgctgagattacaggcatgagccaccgtaccaccccttaaagaactttcaacttgaaatatagcatatacacagaaaagtgctcaaatcgtaagtgtgcaagttggtgaattactactaactgaatatacctccttgatcagcacctagcttcataaacagaacatgagcaacaccctgaaagcccccatgtaaccccttttagttgccactccccaagggttagccactatgctcacttctttcctgatgtgcttttcaacttaaaaaccacatactaaccatcctgataaagaaatacaacacgttctatattttatatcatatatacattaccattatatttcacatgaagtcaaagtcctctgtgcctctgcctagctcacagtcccgcctttctcccccaacctctgagaaagtgaaaactgcccctgacagtttggagctggctttcgctatcgggcaggctttggggttgccaggtgccggcctggcactcacaggtagactgtggtgttctgctgaacacaaaccatttcacagaaaaccatcagacaggccactctatgactatgacggttcgagaccaagacaaggccactgcggaagaacgtctgagcacagacgactgtgtccaaactccaaaagatgaccaaacctcccccttccctggctaatgtgagtgactgctgcatctttatccattacagcgttagcacctctttgtcccttctgtcttctagaaacaaattattaacatacccaattacaggccaggtgcagtggctcacactgtaatcccaggactttgggaggccatggtgggcagatcacttgaggccaggagttcgagactagcctggccaacatggcaaatccccgtctctactaaaaacagaaaaaattagttgggcatggtgatgcatgcctgtagtcccagctattcgcgaggctgaggcataagaattgcttgaacccaggaggttgcagtgagctgagatcgtgccactgcactccagcctgggcaacagaactagaccctgtctcaaaaaacaaaaaaagatacccagtgacagaaacagccctgcttcctaacaggattcaatccagaacaaagccccacttccttgtaaccacccaacacaagcccaaccctacaataagtcctttccaacatcctcttccttctttttaattgtggtaacagatgatacataacagaaattttaccattttgacccttcttaagtttaccattcagtggcactgagtatgtcccgtacatgcttttatacttttactatacaagtatatatccaaaaaacaatacatactagtggtctgcatgcttttgtactacaaaaaatggtatactgtcttggtgcggtagctcatgcctcctgtaatcccagcattttgggaggctgagctgggaggataccttgagcctagcagttcaagaccagcctgggcaacacagcaagacctcatctctacaaaaaaaattaaaaagtattagccaggcatggcgatgtgtgcctgttgtcccagatactcagaaggctgaggtgggaggattgcttgagtctgaaaggtggaggctgttgtgagccatgactgagccactgcactccagcctgggtgacagagtaaaaccctgtatcaaaaaaaaaaaaaaaaaaggatcatagcaacgcattcttctgcatcttacttttttctatataacatgttctagcattttaaaaactattaaagtaatatatactcattataaaaaataataaaatagaataaaagtatgtaaatagtgaaagtccttctgtttgttcccctctcacaacttaatctctctcccagaacagtcccaggtgtaacctttcagactattctacacacacctgaacacacatatatgtacatgcttatccagacagattcaggcttttgtcatttaatatctcttgggtgtttttcatttcacattacatttttgtaacatattttgagatctgtcaaatatcatactttttttttctgagactttttttttttctgagatggagtcttgctctgtcacccaggctggagtgcagtggcatgatcttggctcactgcaacctctgcctcccgagttcaagcaattctcctgcctcagcctcccaagtagctgctggggttacaggcatggaccaccatactcagctaatttttgtatttttagtagagatggggtttcaccacattggccaggctagtctcaaattcctggcctcagatgattagcccaacagggcctcccaaagtgccgggattacaggcatgagccaccgcgcctggtatattatactttaaagtggctgcaaagaatttggaagaactttaaaatggtgtatgccatgagtatttctttgcatttttcacctgtccccaccctacctttgtctcccgttttggtgtaaatcttggggatcctgggtgtcttcgaggaaggctgtggcctaatgagaaataaacatcagtatctggtgagtggggatggcttacacagagggtcagctccttcagagggtcccagcttgctgcttgtaacctcagaggcagcacttaccccttactgcttagatggtcatctcttgttgatttctttcccctagatcctttctaatagcaaacattttgtgggcaagaccagagctggatgacagagtgtgtagagtagctgatgtaatgccttgctcaacaaagatgctcaataaatatttgctgaaggacttgattgatcctttgccattgtccctgcactgtgccaagtagtttacaggcattatcttctggaattatcctggaatctttccacaaccccaaaggtagccaacacctattctcttcattttactgaggaggaaactatggctcagatgagacaccttcctagaccatccaagaagaggcaggagtgggatgcccaaaactgtcctagaccagagcacaaactgtaacttctatcctaccgaaattatttatttatttattattattattattattttgagatggggtctcactctgtcacccaggctgaaatgcagttgcacgatctaggctcactgcaacctctgcctcccaggctcaagcaatcctcccacctcagcctcccgagcagctgggagcacgggtgtataccaccacacccagctaatttttttttttttttttttttggtagagacgggtttcaccatgttgctcaggctggttttgaactcctgagctcaagcaatactcctgcctcaaactcccaaagtgttgtgattacaggcgtgagccaccgtatctggcctatgattattttgttcacagacagggtcttgctctgttgcctaagctggaatgcagtgcagtggcatgatcatagctcactgcagccttgaactcctgagctcaagtgatcctctgcctcagcctcccaagtagctaggactcttaactctatcctacccaaatttttatcttatactccaccaactcagggcctcttgcaggaaaagaaacctgagccacttccatagtatgaggcttcgagtgtactcagagatgaagaattgccaaaatacagctcaaaaagtggcattttcaaaaaacaatgtaaacaactcaaggacatagctcaaaattaaaatgtgacattacaagcccattcgaaggttaatttcctggatctgtgaactaaattaatccattattaatccacggtactctagaggttctgaggtctgggttgaggtgcaagtttcaaggaatatgaggaaagccatctttagaaggtgctggtgtatctgggacctggggaataaactgctttggagattggtcacaatctgagtcgagagccctcctggcccacatgggatatgccctgccctgcccgatgatagcgggacttcattgggacttaggcaaagactacctggtctctggcgcccacgtggcccacgttgccatggtgacgtcagaacagcgtggagacgtcacctgacggttgccgcggtgacctcacggcggtgtgacgtacccatggcgacgacaccacgattcacggcaggtgttcgagttgcccttcccgccagccactcacctgtccccgtcttccacgccctgagggccgcggctctggaaacggggatacaggagcctggcggcgccgaagcaccckygcaggccaagacggctccccaggccaagacggctccccaggccgcacacagccatgagccaggctgcttgacgggacctgaccccgccaggttcccgtccagtccgcggggtgactccacccacagctggccgcgccrccgctcaggtttcaatttttattggttcgcagttctcaccccagggcgggacactcccagggacttgtttcccattggtttaacggaaggagcggggcgggaaaacccgtgtcggcttggctgcaacacctattgaccaatgttcaagcctattggtaaaggtactccgggctcgcgcgctctgattggctggcctgaagtacaacgcctcctccccttgaggcacgggcgctctgggttgtgggagttggggagctgctccggcttcggcgcggaggggcggcggccggggaggcggcggcggcggcaggtgagaggccggggtcgggcggccgggcggcgcgaggtcctagacccaggacgacgctgagccaggcgtccagcttctgtggctcagtttacccagctctgagagtcttgccccgagggatcggcgacctcaatctgacagtcgtgattttgagcttgacaagcaaggggattccccgctctgagcctcagtttttctaagaaatggggatcacgatagtacttagctcatagtacacctgaatcttagcgtaaggtaatctacgtaaagccttaagcggaggataattttgcgttatgtataaaagtgtaaattgcacacacctatagaccctgcaagctcctttctaggactctgtcctgcagaaatactcatttaagtgtgcaaaacgaggcgtactgggtgttttctgcagccttgtttataattgtgacacattggaaacagcctaaatgtccagcaaagagttctttctgctccatgatttcatgtaatttctacctttaatagtagtagttgtaaaagctgaaacgaagaacagagccagtaataagtagctctcagtaattgaatgattagtaggtgccagacaccgccaagtgtttcccttgcgttaatttaaccttcctaacatccaccgaggtaggtacggttattttctctccatataacgtgtggggaaaccgaggttcttagccatttaagtgagttaactaagatgacatcactggggagtggaagagctggcatttgaacccagatctgttggatgtgtccagttgactcctncattgcctttctggtacgtagcaagtgctggacggtaactacsttttttgttattatgatgggcttgaactaggtgttctaagatctcttcctgctggttctgacatctagagatctttgctcttctcattggctttcccttttaggattcccaggagccatgttgtcagaagtcctactggtgtctgctccggggwaagtcatccttcatggagaammtgccgtggtacatggcaaggtacaaagccgttagagcctttaaggattgggtaccccttctccctgatgctaattttgtragaaggtaaaaggacaccctgaggcacagcttgggagcagatcagagagatcaggttctccccagccaggcaaggaaaagatttcttatgcccactgaagggattcttgggcctcgctcggtatgatagcaaaaagatgattataatataaagccctgtgagtggaatgagatcacctaggagtgagctttgatgcagaaggaaagaggtttgagaactgagctccggggcactaagacatttagaagttggaaggatgatctagcaaaggagttgaaaacatccattatctcattttacccttacagctacccccaaggcatacccttttattatcctattttacaaatgtgcaaactgaggcttaggagagaagtggtaacttgatccaagtcctatataccttggtagagcttggtgtgaacctaagtctgtctgaaaccacctctgctgcactctgcttttttttttttttcctgagacagtcttgctctgtcaccggagtgcaatcttgcgatcatggctcactgcagcctccaacctcagcctcccaagtagctgggaccacaggtgtgtaccaccatgccccactaatttttttcttttatttttctgtagagacgtggtctgacactacgctggtctcaaactcctgggctcaagtgatcctcttgccttggcctcccaaagtgctgggattacagatatgagccaccacacctggcttctcactgctattctttatgttcttatatttctcattgaaaacatggtgattatggggaagtgattccttggtattgagaacctctgaaattttgcaggcagaaggcaaagtggattttaacttttagctgatcgatggtggctgtkcccaggcttagtgggagagcatgccaaggttgattagcagtgtctggcaagggcatggctaggagtggcctctgtgcttatgtttgctctcttcttagcacgtgggtcctggcccctttgccactcaccctcaggcttattgcttttgtcatttattctataggtagcactggctgtatccttgaacttgagaacattcctccggcttcaaccccacagcaatgggaaagtggacctcarcttacccaacattggtatcaagcgggcctrggatgtggccaggcttcagtcactggacacaagctttctgggtgagtgcaaggaggagaaaccaggtgtgctaagagcctacagagagggcagctggccaggtattctgggctgtccccaagggagccaggggccagctatttccyrggtgttttctaccctgacctcataaaattagcttcactcattttatttttttaaaatttataggtgtaaaacartgcattggatctctgtgggctgttgtggacagatcatcaaggcctattgttgagtgaaaaaaatgcaaaacagcaaacatacgtatttaagtataaatatgtgtataaatgatagaaaaggtctcgggggcatagacatcagattggcagtggtgattagttctcctgggagagacctagggccagagagtagacaaagtgacacatgttttaaataaggagaatatattggcattttgtataattaaaaattgataaaagtaggccaggcacagtggctcatgcctgtaattccagcactttgggaggccaaggcgggcggatcatctgaggtcaggagttcgagaccagcctggccaacatgtcgaaaccatgtctctactaaaaatacaaaaattagctgggtgtggtggcacacacctgtaatctcagctactcaggaggctgaggtaggagaatcgcttgaacctgggaggcagaggttgcagtgagccaagattgcgccattgcactccagcctgggggacagggcaagactccatctcaaaaaaaaaaaaaaaaatttaataaaagtacaagttacctatgcttattattggaaaatatagtcaatactgggacattgtaattttaaaaatcacctattatttcccttctcctttccctgaccccagtaatgactctaagcatttaggcattaatccttctgggtgattttctgtagattgatagaaagattgatagagacagggagatatcttggttttttaaccaaaattgggtcaggccatataaaccattcagaagtactgattttttctttgtgtgtcacgtgtgtgtgctgatttttgacagcactgtgaagatttcatccactcataagcaggccagctttttccatcagtggagtcccctgtacctgccccagagctgacgtgtgttttctctgttgtcagtttactgtctgctccctgggctgaatgaagccttgctctttggaacagtgtttctcagccaggatggggtaaatgagaatctttttgggttttttccttacactgcacctgaacccttgacacctgcttcccattccccatgagaaaccacagtcactcccatatgccgtatggggatggaggaagagttgaaaattctcatttcacttgttgagatggggtctcactgtgttgcccaggctggtctggaactcctgggctcaagcagttttccactttcccaccttgggctcccaaagtgctggggttacaggtgagagccactgtgcccagccaaaatcctcattttagagcagccctttttaacttcatcatatcttggaatcacccaggagttttttgtgatggtggtggtggttttttttaaccaatacagatggatgggctcctggctccgcccctctcttattgggagttggtagtggtggtaggagtttttgaaaggggttccttgggtgattctggggacacctcagttaaaagccactcctttggagcgtgcatctgaaaacaaccagccagagcacatggaacttgctttccaaggtgcacagggccacccagccagaccagaaatgtctcctgagaaccagctgcaacttgtgtatgtcagtagcttggggtggaagcagccaggtatgggggaacatgtctcagaccactccaactccctcagtgaacctggggcaggtcacttcatcctctgggcctcggagcagagacatgtttcctgactgagggctgccatgaggatccgacgacactggaggcaggcattaggggtgcgacacagagtgcattatgtagggaagggcttgttagttttggagctctgggagacatactatcttctaggttgcaaagatctaccatctttctttcagtgtccttttgctccctcctgatagtaataaacattgaactttttttttttttttaagaggcagggtcttactatgttgcccaggctggtcccaaattcctgggctcaagtgttcttctgccttagcctcccgagtagctgggaatataagcacataccactgcaccgtgctactacagtgaacacttattgggcacttacgtgtgccaggcactaagtgtgttcacatatgttagcactcttagaattcgccagcattccctggaagtaggtggtggtattcatccccattgtacagatctgaaaattaaagttcagaggtcaagtggctcaggttacacttgttggtgacactgaaaggattcagacccaggtttctcctagccccaaagtccaggctcttaacagctgttccatctcgattacaaagctctgaaatacctgggttctcaatgatgccatgacttggccatttgagtatatcattaatccattcaacacacatttacccagtacttaaccagtgcccraagtttcctaacacacgcatgcccaattccatttcccagtcccttgagaatgtgacctgaggctcagcgagtgatttgtaaaggtgagctggccagaaaggctctgccttctcagtgtctcagaggaaagtggcccaggttcctgtacatccctgggaacaacctgcctcaccttccccttctgcccaggcaccgcctcgcatttacactgtcctattcctgatgattatcttttggaggagggaaatattttgggggttaacttaacactcttttgattttggttttatacaatggaaggtgaaacctaggcccttgtgcgattgagccagcattctctgtgtgtgtctgtgtgtctgtgtgtgtttgttttaagactacaattttwttttwttttttttttgagacagggtctcactctgttatgcagcctggagtacagtggtgcgaccacagctcactgtttcttcaacctcctgggctcaagcgatcctcctgcctcagccttctgagtagctgggaccacaggtgtgcgccaccatgcctggctagtttttgtactttcygtagagttggggtttcgccatgttacctaggctggtctcaaactcctaggcacaagtgatctgcccaccttggcctcccaaagtactggggttacaggcataagcgcctgcacccaaccttaaaactactgttaattagcacttactacatgccaggtgctgtgctaaaaagtttacaccccttatttaactttacgttcctgacaaccgtaagaagaggcactgttgttatccctgttttaccaaggtgggaaacaggttcagggaggttaagtcacacggccagtaaatggcacagttgggactcaaacccaagtctgcctaaagccaatgaacagacttgggtgtggggttcagaccataaattcgtgtccatccatgttccaattccagtgactagtcgattttctgtgttctgttgtttataaagcaccaaagtccctctcacccacttgtgtttgcttgtttgcctgtggaacagagcaaggtgatgtcacaacacccacctcagagcaagtggagaagctaaaggaggttgcaggcttgcctgacgactgtgctgtcaccgagcgcctggctgtgctggcctttctttacttatacctgtccatctgccggaagcagaggtgtgtgygtggtctggggaaggagtccagattcagcctcccatggagaaaaaggaagagtttctgtcattgctgctggagaatgcacatgctctcttctagagcagcagccattggctgtcctcatcatgtgccaggcaccctgccaggcacggtatatatggcgtgccttttttttgagacagggtctctgttgctcaggctggaacgcagtggtatgatctcagctgactccagcctcgacctcccaggctcaagtgatccttccacctcagccttccaagtagctgggactacaggtgcgcaccaccatgcctggctaaatttttaaatttttgtagagatggagtctcactgtgttgcccaggctggtctcaaactcctgggctcatgtgatccaactgccttggcctctgaaagtgctgggattagaggcatgagcgactgcacccggccccagcctctctgttgttgtttttgttgtttttgtttttgtccagaacccaaagggaaaaaaacctcaagggggcagcccttcccttgagcagcagatgctggctcagtggccaggctctatgctgaggacacattcggaaacggcctgatacttgccgtccgaagcagaatttcaacttgagagaggcatgtccccttaagtgggtgaggggcattccagaatcttccaggctgggtggggtgggtacgtggaatttgaagacgcacattattacaatttttctatttgggaaatgggaaaagcacttcgtggaaattaccaaacatgaagtttgacagttcttgcttgggggaaatacatgtaagatgtagcgattcggacctttctggtgatcaaaagcagacccgtgttacacatggttggggagcaccgtctggcgggagaggccccggtgaacacacaatcctagtgtgcggtggtgaggcagcggtggagggagggagggcaggcgggggtcctagaaggggagccaggagggtctttgtgggcagctacggaaagtgtcacagtggaagcgacatttgataaggccttgagagatgggtagggatttctctgtgggataaggaggtgcacggctattgcaggcagaggggccagcctgtgctcagagcaggcccacagaaaagcctagcatgtgggcacaggaaggaggtgggagaaaggggttgacagcttgccaggtgcttctgggaagggctctggttgaatgacccagggatttaaatgaacttgatacctgttttctagttgtctgattcagcatgagttcctgatgttcaatagggatacatttggggtcaggaattctcccccagttgagaaaactggaccagatgcttggagtcaggcctgggcctggcccctggttcagtgctggcaccccactgccctgcgggagagtcacgtttcacaccctggtgtgtttcagggccctgccgagcctggatatcgtagtgtggtcrgagctgccccccggggcgggcttgggctccagcgccrcctastyggtgtgtctggcagcagccctcctgactgtgtgcgaggagatcccaaacccgctgaaggayggggattgcgtcaacaggtaaccatggtccttacctggccagtgtccctcccgcacggcaggacagggaygtggcttctctcactgagacctcaccacctccctgtgaggtgagaggtgtcatagtggccattttaacatgaggaagctgagccccgagaggtcaaatggctggcccagggccacacagctagtgctggcagagtgggatttgaactcagagtctgagcttttctctcctgctctccaccacctctgctcacccccatcttggctctgttggtttcaagcgcccatggtatggtagaaagagctggagtccagatctagagggcagcaggttagatgaaccctcccacctctgcattgactcaggctaggacagtgttctcctctgtatggtaatgacagtgccctaggggtgattgtccagttttaccacatggttatgaaagaaactaagagtttgctgagaaatccacattagggggtgtgcccattagactagggcatctctcctcctacggggccgtctccacggagggcgtgtcacctctctgcgttcctattgaccacgtgagtcagtgaggcctgtccagacaggcttgaccacagaccatttctatcattaggagaatgttccttgagaaaccacccagtgcgcagaggttacgcagtttgtcccaggaccaggagttgtggatgaggcccccaaatgcagagctctgtcctcttcctgggcttgtttttgttttgttttgttttgttttctgagcttggtttttttgtttgtttgtttgtttgtttgtttgtttgttttttgagatggagtctcgctctgtcacccaggctggagtgcagtggtgtgatcttggctcactgcaacctctgcctccaggttcaagtgattttccacgggccaaaggactggccctgtctttcaaaaggtggagggtgactgtgtgtgtgcacttgcatgtgtgtgtgttcttatgctgcttctaaccatttctcccaccttcccctgaaggccagtcattccttctcagaacccttagggagagtagacctcccaccccaccccaccccaccacaccccacccatcatgtgtttctgagtcggaaaggactggagcccagtctcctttgaagactcaaatctgagccccctaaaaaacaaactgtgtagagcaggaggaagactcacatttgttgagagggccaggccctgggctaggtcarctgcctgagttaccttcccccgcctccatcactcacttcatcccaggcacgctgccacctgttggtccctgggaagggccagccagctctggtgtggttccagtgctgcacaagtggtgtgtctggaatgcaccccacacacacaccttgcccagctggctccccttgtccttcaggcaccaccaccccgccccagcccccagcaattcagcccatcgtactcttacagaaacacctggtttgtttttgtttttgtttttttaactatattatcatttattaaatgtaattaggtagctctggatccttggtctgttttttttttcttttattattattatactttaagttttagggtacatgtgcacaatgtgcaggttagttacatatgtatacatgtgccatgctggtgtgctgcacccattagctcatcatttagcattaggtatatctcctaatgctatccctcccctctccccccatcccaccacagtccccagagtgtgatgttccccttcctgtgtccatgtgttctcattgttcaattcccacctatgagtgagaatatgcggtgtttggttttttgttcttgcgatagtttactgagaatgatgatttccaatttcatccatgtccctacaaaggacatgaactcatcattttttatggctgcatagtgttccatggtgtatatgtgccacattttcttaatccagtctatcattgttggacatttgggtgggttccaagtctttgctattgtgaatagtgctgcaataaacacacgtgtgcatgtgtctttatagcagcatgatttatagtcctttgggtatatacccagtaatgggatggctgggtcaaatggtatttctagttctacatccctgaggaatcgccacactgacttccacaatggttgaactagtttacagtcccaccaacagtgtaaaagtgttcctatttctccacatcctctccagcacctgttgagaaacacctgctttgaagtcacatattgcagtgtcatggatttgtttgtatttgaatactgatcgctttctgaccttcactttctccattagactctaagctccaagaagtcagggaccttgtctgttttgctccctactaggagcttagtcacaggcacatagcagttgctcaataaatgctgaatgaataagtgagtgtatcttgttggcaccattaagttagtagctaagagcttgggctccaagtcagcagatgtggtcctgacccagcagtgagtagcactgtgatctccaggatgctgtttgacccatccaagcctcagtttccgtttctgtaagaaacaggataattattataccttccctgtagggcacaattgggaggattatgaaccatttctcaatggtccatttgagaaagcatttagcacaatgtttggcacatgctaatcaatagtatgttaactgatgttaactcattattaatcatagtctcacagctaccatgtgagttgccaagtccgtaaaaatccttatttggcagatgaagaaagagactcagagcaggtaattgacttgctcagggctcacagcaagtaagtgattgaaccaggcccccaggcgctgtgaccccagacggcctattttgaggggagcacatcctatctcctgggcattacacaaagcacttgtgtattttttccatctcaatatcctcagtgagatagacactattatccctgttttatggatgagaaaacagggtttaaggtgaagcagttgctcacagatgcccagtgagtcagtgataggatgggctccaaaaagggctcactggctgggcacggtggctcacgcctgtaatcccagcactttgggaggctgaggtaggcagatcgcttcaggtcaggagttcgagatcagcctggccaacacagcaaaaacccatctctactaaaaatacaaacattagccaggcgtggtggcaggcgcctgtaatcccagctactcgggaggctgaggtaggagaatcgcttgaacccaggaggcagaggttgcagtgagctgagatcgtgccacagcactccagcctgggggacaagagcgaaactccatctcaaaaaaacaaaactaggctgactgcttactccataactctgccactgagccacatcattctcagaggtcagaaaaccacctttagcttctgctgtttcatgaggaagggaatctgcagaaaggaaacaaaagctgagagaaaagagtggggaagtggggttgatcattttgtcttgttccatactcatgtgttttgggtctgttcatttaaactgtttgtgagcccacacctggtccatggaaggcagtgaggccacgtgcttgggagagatccagacatggttgggacgagcctggcccctccaggggtctctggggctcctgggatttgaattcataatgatcgtgctttggatctacttgcagggccctgggaaagagtcacacctctgcccgttcttcttaaaggcaggcttggttcaggtgtggacgcttatgcagaggtctgttatagtggcagttgccacctgctgcttgtggacaccttgccatcattagacacacatgcagctagcctctgaggagggtgggggttccaattctccagggaaggataatgaggctcagagaggttagataacaggcccagagtcactcagctagtaagaggcaatgcaggggccaggtgcggtggctcatgcctgtaatcccagcactttgggaggccaaagcgggcgttcgagaccagcctgtccaatatggtgaaaccccgtctctactaaaaaatacaaaaattagctgggcgtgctggtgtgcacctgttgtcccagctgctcgggaggctgaggcaggagaattgcttgaacccgggagaaagtgagctgagattgcaccactgcactccagcctgggtgacagagtgagactccgtctcaaaaaaaaagaaaaaaaaagaggcaaagtaggaccacgggagtccaaagcccaggctgttttgactgcgccaggtgggcttcagagggaagggcgcacacttggcayrctccgtagctggagagrttcagagtggacttgttctttctgagctcaagggcccaagctcctatgccccttggcctgcccagcacagccccaggtgacccctccccagccccactcctcactgccacagtaaagatgaacatctgtgtcttcaggtggaccaaggaggatttggagctaattaacaagtgggccttccaaggggagagaatgattcacgggaacccctccggagtggacaatgctgtcagcrcctggggtaggtgtggcctcaggtttattttattgttgttattttaaaaattcttattacaatggtaggtgcccaagagtctgtgctggtttgggaggaatcgaatcaatggattctggaaaaaatagcattttcctattttggggggaatggggagaaatcttggggccctgtctcacaccccctgaatcagaatctccgggggtggaactggggcctgggaagctgcagcttccacgagctccccaagagagttgtaggttcaggatgcagagccgttgccgtggagtttgcacaccatccaggtggcctcccctctggcaagaactcttgcttacagggcccagatgctgtgtcctgggccccaccttcaccatgtggcttgtcgggggaagctggacagtctggagggagggggacccaggaatccaaggcctggcaagagcttcctggtggggmttcggggaccttttgccctcctgcaccttttgtaactgaagctgggctgactcattacttagcctctttcctgaatggggcaaaatgaacccaacccaaagttcaacctctctcccaagtagcacagatatgttagcttttcccacagctctgacccrctggtttttctctttaggaggagccctccgataccatcaagggaagatttcatccttaaagaggtaacctgggggtggagcagcacattcagccatggctgcattgatgtgtgcagggggcagagctctgcacctttgggaagtaccataggaggcaggtgtccctggctcttcatcccccaatgtggccctcacagtgcactagctgcaaggaagcaggggtggtggggaagacctgctctctccttctccccttcagctcttaaattgcagagatatcagaaagggaaagtcatgcatggctgtgcccgtagactctcagctgctcattcattcattcctgtatttgcttagtaaacaagaatccattacttcctgtgttcccgatgatgctgcactggggcgtaggaatggagagatgaagcttgggtacagtttccaaggactctcagtctgcttgtgggggtggggccagacacacacaaaagccgccacaggacaatgtgagagtcaccatgatggaggcacacagggcagaggcaggatggaagcgggagggaggcttgggaggggcttggagcagaagtgacatttggagactctcagcctgttttatgtttctgtgtccctcccgctggaatcattggaatcacaaacgtgcatgtgcgatttcagcattctctgttctgtttgcgatttcagcatcctctgttctgtttgcacccacggcagaattgttgggtgcctggaatgaaacgcatggcagaggggagccaggtgcctttttgactgttccctaagcccttgatcaagttgtggggtggtgtttgtcccagggcactttgccacctccatgggccttttcgcatcagtaagggtcctggggctctctcctctttactcagggcggtcttcatggatgagtggcaggtcctggcctgcagcccccaccagctgggccactccattagtggctcagtaacctggcctgccacagcgccacacctgggcccccrgctagttctctgggatctttctgtcccagctcagtcatgcctccctttccaaggctgtacgtcagagttgtcagcattgscactattgagatttggggctgggttattctttgtggtggggcygccctgtgcattgtagccatccccagcccctacccactagatgccagtagcaccctcagcgtggcaatcaaaaacatctccagacattgcttagtgtcccttgggaggcagaatcacccttgccgccgacctttgcactccgcagaagccagtaggagcgtggaacagcttcctcgggttgctccagcagtcgtcaggagagcctcrggtgccgaggtgaagctggtctgccaccgccccggatccatgtggaaccagagctggatcatgtgggggagtctcaaatgyccgggccccggcctgtcttcaggagcccacggtctgatggggaaggcggtcactgkaatcgtcagagagaagacacctgaagggttgtgaagctgctgtgggtgacagtgacaggcgtcttagatctggctgcgagcctggggaatcattcatggaagtggtggcatttcattccttcagtgtctcctgagagccacttgtggcctaagcactggactaggccctggagctagaaaactgatgaagacgtgggctgggcaccgagtgtacggtctactgggggcatcaggagatgaatgaggaggtttccaaggggggcgggcaggggaacggccaggggaatggccaggcgttgctggtgtgctgggcggaggcgctgggtccacaggcctaggtttgagtccagctctcccacttgccagctggtgccctcaggtgagtcacttctcccagacctccagctccttgtttacttagggggatcttgaacatacaatcagaagcggtggctctgaagtgcttacctgtttgctggccgagttcattcatcctttccacaagtatcattaagcacctactgcgtgctgagtactggggcctccgcagggaacaaaacaaagccccgcctccgtggaactcatactttgttgggagaggagaaaaaatcagttgtctgtgagagcatatcaggcagtcttaagcacctttaggaaacaaggcagggtcagaggctacaaagagaaggaggggtccgattggatgggggttcgggggctgctggtgaaggaacattgagcagaaacctgaataagtcacgccgctatggggcggggctggtccctggcagaggaagcgcggtgcaaaggtcctgagacgagcacgctgcctgccgtgtgacacagtagctgggaggtcagagtggctgagtggagtgagcagcctggggagcgaggagagaagaagaggctggggcagtggccaagcccggatcacaggagcgcttaccaggcttaccccctgcgtggtggccgctggatgggtatgagccctggatctggtggggctggtgacaggcctgtctgcagaggacttgtctaagaaagatgaagatgcaacacccaaactcctcccrcctggctagatgggagcatggagcaaaccaacctttgctgcctgctgtggggtgccacgggagcagatggcggcttcacagagaagctgggggccagactccacgttaatcccatggatggcttaaggagcttccccccaccaaccatgcgtggtgcctctctgtaaagaaaaaatgcattgtttgtgaagtggatcaagatgcggcctcccagaacgctgcccttttgaggaatggcttgtcttagaagggaagagaaaagccaaatagaatgttcatcttttgtaaagttaaaaaaaaaaaaaagccagcctccaaggctgagaatcgatattaatttcatgggcttatgggcagtgagataaagcaggtttctggcagccctttccagccctattggattttacaatcttgaactgtgaagacagcgaataaaggtatcaagggctctgcccgtctccagctgtctcgggccagagctcatccaaatccyccaccttccatcccagcctgcagccctctgaaaggcaggttggatggcaagaaatgtcagcttgagccctcgaagacggctcactacaaggacagttgggattgtggctttaggagggatttatgcagctcctctggggcaggtgaggaccacggggtcatgctagagagtcagctcaacgtggctgcctgggacacgtctrtgtgccagagggcagccaaggggatgactgactctacatctggttttagaccagggctgctcgtccgggcaccattgaggtagggcaagaatgggctcagcgtgctggggaccatcctcctctgcaaccctgccctccctgcatttacgagcccgtgcgtggcactgcccgcaccagctagcctgggcatcttccctctgtgtgatccatttcagggcctgttgcttggtctttctraaactccagcttcgtgggggtgacccacacaagtgaaccttcgccccctccttgtactctgctatagccactttgaatttctcactggatgactgtgccgggttccgccacctccaggctcacacaggctgctccaactgccagaaatcctcacccttctagctttgcttggtggcttcttacccttcctcagttctcagtgtccacgtcatgccagaaaaaccttctcggcccttctcccctatcccctctctggccccggccccaaggccacgctgtgcctagcatgttgtaggtcccagttgaagttgaatgaataaatgagtgaaaagccaagggagaatggccacccaaccagtgcctgggatggaggcgcagctgtggccagcagcagaagccccatgctcccccaatccagtgtcacctcttgtgcctcccttcttcctccgtatcagggtgggcggcttcccggactgctcccagtcctgtcccagctcctccatcttgagttcagtgtggacctgcctcctcttcaccctgcaggtcgccagctctccagatcctgctgaccaacaccaaagtccctcgcaataycagggcccttgtggctggcgtcagaaacaggctgctcaaggtgactcttgttcccttcttgggcaggtttcaggaaggccaggacacaattacatctggattttcgaggtctccctctggctgatsggttatagggggtgtggtgggtggtgggggcccttagggaggtggttttggcagaaaagaaggtaccgtccgtgcccgtagcctggccaggaaaatgacagtggtcgggctcgttagacacactgactttgcagctgggaaggcaaaaaaacaggctcagaagagaggtggtttccccagaggatgggcacgggctgtgtgaacacctcctccctccaccccactgctggggcagctgtcctgcatctgcctgccyccaggcctcaccagccgttccttctttttttctccagttcccagagatmgtggcccccctcctgacctcaatagatgccatctycctggagtgtgagygcgtgctgggagagatgggggaagccccagccccggagcagtacctcgtgctggaagtaagagcctgtctgcaggaaccrgggttactgagtccacaccactgtccaaggcagtggctctgcaatctggctgtgctcagaatcccccggaagctagcacatagaggtcaggacctgcctctggcctatgctctcagctgggcccaggtctgtgcgtgccatataagcgtatcttattttcaggcctcttcctgggtgattccgagtaattgggagagtgcaagggaggccagggcctggctcgtgctaagtgcaatggaaacaggtttgggtcacttctaaggagctctggcccacgtaggtagatggggatgtggctgatgcagagtgctctgtcggtgcaggggtgacttcttggtcactctcctgctattgctaacttcatgggtgcattcaacaactacttgtcaactgcctgctttgggtcagacagatcctaacattgttttttcatcattgcaaccccatccactgccatttgcataattctagtgtagaggttgtgacctggtactttgggtgtgatcaggcctgtgtgtgaatcccagctccacttctgctggacgtgtggcctcgctagagtgwcttaagaatgctcagattagacgggcgcagtggctcacctgtagtattagcactttgggaggccaaggcaggtggattgcttgagtccaggagttcgagaccaggctgggcaatgtggtgaaactctgtctctacaaaaaatacaaaagttagccagacatgacggtacatatcggtagtcccagctactcgagaggctgaggcaggaggatcacttgagcccaggaggtcaagtttgtagcctgggcgacagaatgagaccttgtctcacacacacacaaaaaatgcttggagtctcatgggtgacacgcaagcacaatgtctggtgtgctatgagcttagggaaccaaagagcccaggctccccctggacacagtccacctggcctggtgaatatgggctgttagccatctggctgcccttgcagaatgagaggatcgggtggcccctagctgccgtggctgtgcagcagccgtcagtgaagggacaggagaggggcgtgcggtctccatgtcaccacagtccctccccgcgccccgcactctgtagtcattgcctggtgtctcccggtcccccgtgggcattcgagtctgtagcccctgtgctgagtggaagctgccactaaagcaagccttttacaaatgattcttttcacttgatcctcacacccacctccctgtgaagtaggtgtcttatccctattttacagatgtaaaaactgaggcctgaagagagacttcccccaaggttatccagctagtgagtggccgagccaggggtccagccgacggactggtctgtccctttattcaacagatctgtcatgagcacctactatgtgccagggcagcgcctccatcgaattcctgtgtttcggccctcattccctcagtctttgtcttcctagctctcaattccttccacatagaaaggagggaacacagtccccccgagtaggaaatcaataatgatagaatactgcctaaaatacaccctgtcgagtccctggagaatgccacagaacagcacgttgattatacattgtgtgtatttttggctgtggcagccgctgaaatgtgcagctcagctcctggacagctttgcactcaaaccagcgaactgttctcctgtgtcacaacctgtcatctgatccttgacagattttggatcagaatgtgacaggtgtctggaacctgcctcggcaacgtgacacctggtgctcaggcgcagagagcggcccccagaagtcttctctcacatccagcccatcaggctggtgagaggcacccggggctgccacyaggccatcatgcctgtctgctcatttgtcaaaaatggtgagcttggcgcagagcgaggtatgaggcaggctgttggggagggccactccaaccctgcctgaccggccatccccatgcgggagagctaggtgggcctccgcagagatgcctcagtgattggcaactcctggtatacaggcaatccaggtgccccggaacagagcttcacacggaagtgaggaatgccagggggtgctctcagaggcagggtagacaggagcttcatgtcaggcagacccgccttccagtgccagcttggtacctactagctcagtgatcgtgggcaagtcacttcttctctgagcctctgtttccccttttgtaaagtggggatgatgctaacgtacccataaaaatactaacagcacatatctcgtgccaggcattgaacagaaaactcaccttgtttcgtctcagggcaaagaagcagatttttttttttttttttttttttgagacagagtcatcttgctctgtcgcccaggctggagtgcagtggcacaatcttggctcattgcatcctcccaggttcaaatgatcctcgtgccgcagcctcctgagtagctgggattacaggcacacgccaacatacgtggctgatttttgtatatttagtagagatggggtttcgccatgttggccaggctggtctcaaactcctgacctcaagtgatccacccgcctcgacctcccaaagtgctgggattaaagacgtgagccaccacaccctgctgaggcagatactcttatgaccccggtttacaagcaggagacagacccagtgcagaagaccttgctcaaggacacacgaccaaaaaggggcagagcagagactcgaacacaggcctacttgactccaaatcccatggtttttacttcctgatggctgggaccgtggctgggcacccatccttagagccccagcacgttgtgggtgtttggtaaatgaaatctaactactgggtgcctgggcagtggaagctgtgaagttttattttttcatccacatgcatcttgttggatccttaaagagcaggaagtttatcctgcataactgaagaaacctagacaaacagctgtttccctgcttatggccttgctggagttacacctagttcttattctgaaaccagtccccaaggcagctgtagggaggcatgttatttgaaactttttctcttgcaaatggcagaaatccatttcaaccagacttttgtagaaagggaatgtattggctctcaactgagaagaccagaggtaaatggcttcaggtatagctcaatccaggggctgaaacaatgtgtcgggaatctgtccatctgccacgtaatatctgatcatgtggcaagataggtcatcttggcgacttgtgtctgaagttaattattttagcagctctagtgggaaggggcagaggaaaccctgggagggctgtgattggcccagcttggaccacatgcccatccctgatcagtcaccagtgccagaggcttctgtgaccagccctaggatatgtgctcactgctgtggtgaaggtatgctcagctctacccaagctccgtgagaaatgctgcagggcagaaggattcttttacaagtggagagggccagggtgccaggtaggcaaagccgttggctgtctccagccaacaactgtcagatggacgaggcaggctcaggggtgggcataggaccttggcctcaggcaggccaagtgggaacagatggaaccttctcccctaggagctcattgacatgamccagcaccatctgaatgccctcggcrtgggccacgcctctctggaccagctctgccaggtgaccagggcccgcrgacttcacagcaagctgactggcgcaggcggtggtggctgtggcatcacactcctcaagccaggtatcccgggggtaggtgggccaggctgccagcctgggctcctaagaggggtccacctggagaattcccttgaaaggaaaaagagacctggaaacaggtctcagctccgctgtgtggccttgggcaagttagttaacctctggtctttgcttcctcattggtaaaataaggatgagagtatctagcttgcaagatygttgcccagattcaagcaggaaagtgcacctagagagcctggtgcagggctgggctgtggctggggctcctgtcatcggggctgtccscacaagcttgggaagtaaccagggcattgtcactctccacgtctgcctaaccttgccccacttgtacccttgatgtggtcaggatgcggttgattttgctacaaaacgaaagggtttccttcccgttggtttggggaaagaggaagaccgagtaatgggcttggcttaggaagctccctggtgcctgggggcctggcaaggggcttctgctagtgtttaaccacctgacacctacctctgccctcaggctcgctcctggcctacagtaggcactaaccggtcccacctgcctccatttccctctgtgctccttgtcccctccttccttccttctttctctttctgtctttatctcctcctctctgttcttcatccttcctttcccctctgctttgcactgagcccccttaggctccagacatcccctcacactccatgatggctcccaggcctcaggaggtggccacatcctcactccagccaaccccaactgttggttcctagttcagagcccatgacgatggtgggacttgacatttctggagtgtgcccgctgtgccaggtgttgtgccaggcactttacctgcgttatttcctttaagcctccctgagatctgcacggggagtcatcattagccccattcccagatgaggagactgagactgagagaggggaagtcacttgtctgaggccacacggccagtacaaggcaaggccaagtcctgtgacttgagagcccatgtttttaactcttgctccctaaacccctgggggtgcaaggctgggcattccagtgcacggaggggctgcaggtaaccttgggctttatggcctgttggctcaggtgggtcacagccaggaaggcacagcaggaaggcctgggcttttgccttgaatatgatgagcttctcccacggagcggagagttgtcaagggtgacctgccttccctccccgcagggctggagcagccagaagtggaggccacgaagcaggccctgaccagctgtggctttgactgcttggaaaccagcatcggtgcccccggcrtctccatccactcagccacctccctggacagcygagtccagcaagccctggatggcctctgagaggagcccacgacactgcagccccacccagatgcccctttctggattattctgggggctgcagttcgactctgtgctggccagcgagcgcccagctcctgacactgctggagaggccccagccgcttggcgatgccagccaagctctgcagtcccagcggtgggacctagggaggcatggtctgccctctgcatcctctggagccagccgagcaggaggcctaggagggtcctctgagactccagacctgaggcgagaagggctgcttccctgaagctcccacagtcccatctgcttcaggcccccgccttggcctgtgttcttcctggccgcctgggtccaatgctcaggtgctggggcctggttcccggagaagtgtgccttctctctcccttttcagggaccgccccctgtctctcagggccaggcctctccctcctccaggaagccttcccctaccccttgtcgcccctccctcccagagcacctgctgtctgggtggctcactcagcacttggtgtggccttcccttctacctagcgggatggggctcccccaggggctgtcccggaggcggtgggcctggttaaataaggcagggtttatatgcactttcttccgatctgtacctgagaggtttgtggaaaagatggcaaatggggaataaaaagattttgtgtcaacagtagagactccaggccaccagcacctccctctgtccctgtcccctctccagctgtttcctccatggagctcttcagcaatggagggaaatagggtttggggtcactttgttgtgcgtcttggggatgaggtggcttttcccagatggcccttgctggagagggactgggacacggctctcagtccatcagcacaactctaggctgctgctgcggagggagaagttgagcttcctagctccagaatcacaagcacccacgagagcacagacctgtgtaagacaggaaagcagaacctgccatcgctcctggggcgcgccttcctttctgaaatgaactggctggatggagaaaacagactcaaatgttctggcccgggtgcctggcactccccacccccgccccccaccggccctatttgaactttatattgcagtcagcttggtgctttccgaaatgccattagccatcaggaaacccttgtagttggtgccttgccagccagaacctctgggacccacggacctgcaaagaggccgagtggaaaggtgggggccggcgcagggatttcaggatgaggtgaaagcgattcagtgcgcgtctgcccttggccactagggggcagctggcggccttccctgctgttgtcttcctgcagggtgagaggagcaggagccgagctccacccccacgccagccttgggcccggcctgggatcactgctgggaacgtgagagtgaagggaggacgcctaccccagcttaacttgtagaaatggccccagatcactgatggctgttccctgccccttcccttcaaaacacaacgcataaagcagtaatactaattaatactgaacgctcactgtggactaggcgtgtttacgcatcgccccttctcatctctgccccgacctcagtgtcattgctagtctcatccccgctttacagaccaggaaaccaaaggtcagagagatcgagtaactggtgcaagtccacacagctcatcagcatctgaggccggattcaaatggactccagagcctgctcttagcccctacgtgtgtctgctgggtgcggctctgtgtgcaggctcactgcgattttttagctttctgtgctcaggctcgtttttctggattcggatgtatttgaccggggtggggctcggacctgcatgttttcctccccacgcgattttaatgaacaaccaggccagaggctgctgtgccctcagtgatggcgctggctgacagccagcctccagcctttaggaggtgggcctgggagcctccccaggcttccatagatgtccgcggcagctgtgagatgggtgcaggggacagaggctgagacccccagagcccgtctgctccttgaggccctctctctctcattccctggggacaggatgtcactcctggggcaggggccagctcaacactcttgctccagtgaagcagctgccggtgcgctttggccagagcaacctttcaacccagccacccctgcggccaccatatgggcctggtgtcacactcctggctaccttgtagacagttggcacttgcggctgtcaccccttctcattgcctattgcagtggttctcgctctcagagctgcacctcggaaccacctaaggacccacgaattcctgactccaccccagatattctgagttaatctgtctcagcggtatctttttaaaaagacatcttttaaaagctcccaggtgattctaacgtgtgaccaagcaccacatggtgctgcacacctgtagtcccagctactcaggacgctgaggcaggaggatcgcctgagcccaggagttggaggctgcagtgagctatgatggtgccactgcactccagcctggatgacagagtgagaccccgtctcaaaaatatttttaaaaaataagaaaatgcagccagggctgaagataccgaactggatgaccccagggtcatctctgcacgccattgtggtggttgagcacttcagccctgcccaccccctggccatgtgaccttgggcaagacagcttacctctggaggccacagcttcctcatcgggaaagtgggattcactaatacccaccttatggaggtttcgtggggatcaatgagaaaatatacagaaggcccttgacacagtgcgtggcacayggtaagtgctcaataaatactcattattataactgtcttatgctgagagataagggtgtcttccagagccccaaaacttcagaatggtgcacagagctggctcaaggcgccctgcccagatggtccaaagcccctaggttgagaccccttgggtcgctgttggagaaacacacctaaggcccaccggctttcccacctccctgcttcctctgcaaagaggcggtcacatagcactgacaccttctttgcgaggggaacagcagtgcctttcaggtcataagctggagccgctcccagggtctgcagcctgaagttctcagagaatttccctggttctggcaagggtctcactttgggaggcaggcaggaaatactgtggttctttccagacagagtagctgctatggttgcactgatgtcgtctctgtcagtgaggagtccttttatttatttttagacagtctcactctgttgcccaggctggagtgcagtggcgccatcttggctckctgcaacctctgcttcccaggttcaagtgattctcccgcctcagcctcccaagtagctgggattacaggtgtgtgccaccacgcctgggtaatttttgtatttttagtagagacagggtttccgccacgttggccaggctggtctcgaactcctgacctcaaatgatctgcccacctcggcctcccaaagtgctgggattacaggcatgagccaccacacttggcctggtgaggagtctttcctcaccaaggtttctgtggcctgctggcagccagtcgcgttggctggctggctccaggtcagcaagcgtggtggggggccggccctgcccttcgcttgtgcttggcccagccagctcctttctcctccacggctgttttcctccttgtttcctcagctagcgccctttggaagacacctggctcaggggcccrcacctcgcaggtgcttccttccccagcccttcctggtttccagctaattttggacaagttctttggctgtctcttagcacctactgtcttctaggaaggggcagagagctggatttgaggccaggagctctggttcctagtctgagctctttagttctcaaattataatatttttactattacagaaacagtgtaaatacactgtagaaagaaaatacagattagcaaaaatcacatcaaagcactgtgtttttaccatacagagattacccctgtgaacagctgccacctttccctctgtgtgtgtgtgtgtgtgtgtgtgtgttcatgctgttcgataaagtgagatcatactgtacatgctgttttgttacctacctttttggtttccagtcacctttctctgtcaatatgtttcatctctaatgcccaggctatagtcacatttcctccagttgggccaggtgtccggcaccctgtctaataccacatacctggctgttacagccctggcttctcttttaatctagcacagcagccctacacacacacacacacacacacacactcatacctatttttctccatgatatgacttgcttaagagacccagcggatcatcctgcagaatgctgtgtcttctacactggtcattcagaatccagcccctccacatggctttgggaggtcttgaaccctttactgagcacctacgatgtgctcagcatggtgctaagtgctttgtgtgctttatccctgtgaatcatttcagtccattgagctaattaccgtgcttatccccattctgttggtgagtaaactgaggcccagagtagggaagtgacttgcccagggtcacgtggcagagtgggatttgcacgcagttctgtgtaacttcagggccctgctcttagcccgtgtctagactctccccggggaggtgactggtgacctctccgagctccctctccccaccatacctaattgacagaactgagttgtcacatctgccccagcggtgctggcccagctcacccctgctgcccgcttggccctggctgtgaacacctcagacccccaacctacacaacaaacaggcaaagggagcaacctgccaaagaacatgatgtgtggtctcacagcactgtgcccggagcccccacctccccatatccaaggaaaacctggcactgggccgaacctcacacctcacacctcatgtcctcaaaactgaaacagacaagggcaatggtctcccaatgaatgcttcagttgcttgaatccaaaagtgtcagggtcaggaggacccttggagatcacacagtccatcacctcgtttgctgtgaatgcggagaccaagactcagagagggcaagagattgcctaaggtcacacagtgagccaccttgtcctcttccttgccatttggttttctccatgcggcagggttgtcacaggaaaagcacttgcaatccagagatccgtcttcaggcccagcttctgcacctgctggctgcgtgacttccagccgggactcctctgtacccccaactcggcctcagtttcctcaaatgtaacatcccaggcagggtgctaaacccctcaggcatcattccacttacttcccacagcaaccctgcagaccaggtacaacagaaccacaattctttgtccaaaatcctggggccagatgtgatgtggaatggaggattttgcaggttttagggagaccccctcccggcccatgtttcattccacgtggcatctggggcagcaccaccaacccctgactctatatgaaaggtacgaagagtcccactaagtcgagtgaaggccataaataatatgtgagcctatgtggcactggccttttttttttttttttttttttgagacagggtcttgctctgttgcccaggctgtactgcagtggcaagatcacagctcactgcagcctcgacctcccaagctcaagcaattctcccacctcagcctcctgaatagctgagactacaggcatgcgccaccaccccctgcttctttttctactttttgtagagatggggttttgctatgttgcccaggctggtttccagttcctgggctcaagcaatcctcccacctcagcctcccaaggtgctgggattacaggcatgagccaccatgcccagcctgctgcatttgctgacaaatgaattttgatgccaaggccctgggtttcagagtgtcttgggttgtgggcctgaattatttccccattttgcagagaagcagacagatgctctcagacaggctcagtggctcacccgagggagtgtgctcaggtttgaaccctgtcagtctagctggacgagacctcctgcaccgcagggtctgaccagggcccttctttgtcgctcagggtgaaagggctctgtactggccagtggggggtgagacgccattctgcctggtgcagcgtgagggcaaggggccccgggtcccaggtacactggctcaagctattaagtcaaaccagagtcttctgtcttattttttttccaccataaaccttgtaatgtgacaaacgaggctgcagaaaagtggccaagtgacaggtccatgacatagctgccggactctcttggggtttctgtttcctcccaaaaaccagggaagcaatgagggggccacagcccgagggagagggagggggctccttctcctcccagaccagcccctgcctccctccagacctagggagggcatgggggaggcctgagcgcattgattctcaccacactcaggctcacagagcagggagccacttacttgcacagagagggtaagagacggaatgccaactgagcctcttttacaggcatctgagcccaaacctccatgctccctcact

SEQ ID NO: 95971 - DNA, 71243 bp, Homo sapiens
  misc_feature (1)...(71243): n = A,T,C or G
aaagtcacaagaaaatatgttttcaaaagctcaggcttagctcacctggggtctttgctgcccgatgccaaacacaaaagaggtccagaagaagcagttacccctcctttctagctgtcctctgaaatcagtccccagagacctcacactaacagttatgaccagccacctccctcagaaaaatcctttgtccatgggatgacaggagtagcttatggaaataaaagtttccaaaaactgtgaagacctcgaagggggggagaaaaggcttacggtcatgggtgagggtgtgtgttgaggaaatttgccccaaaatgcaaatactttttaagcacccctttcagatctaattttatataataaatgcttgttatgggaaacgatctagcattttggaaggtgcctatcatgaaacagacaaaaaagtacataaagtatacttcatgtaaagtcaaagcacagtaaatatgtgatatgaaggatttttttctaatggcatacttgtataggacacttaccatgaatggagtgtgtaggcctggaaattgctctgggtgagcgagtggtgagtaaatgtgaaggtctaggacattactgtacactactgtagctttatcaacactgcacagggaggccacactacatttatttaaaatattttttctttccataataaattaacctttgcttactgtaactttttactttaaaaactttttaatttttttttaacttttggacccttttgtaataacatagcttaaaacacatattgcacagctgtacaaaaatattttctttctttatatccttattctataagcttttttctctttttttactttttaaacttttttatccaaaactacaaaatacacacacattagcctagcctacacagggtcaggattatcagtatcactgtcctccacatcctgtcccactagaaggtcttcagggacagtaacacgcatggaactgtcatctcccgtaagaatcccttcttctgggatacctccagaagcacctgcctgaggctgttttacagttttcacttaaaaaaaaaaaggcaggtaggagtatattctaaaataaccattaatagtaaatacattaaccagtgatatatctatcaagttcattactattatcgactattatgtactgtacataattgtgtgtgctagacttatacaactggcagcaaagtagttctgtttacaccagcatcaccacgaacacgtaatatgttgtgctaccactgaaatgacagctacactatcactgggctacaggaatttttcagttccattataatcttaagggactgttatatacgcagtctgtcactaaccaaactgtcattatgtgcgcatgactgtaccttttttggctttccaatacctttttaaagataatttgcacataatgaagtatactttaagtgtacagtttgatgtgttttggtcaatacttgcacctgtgtagcccccactccaatcaagctgtcttggaacatttccatgcctccagaaagcccctcggtgtcccttgaccactgcatttctaccacatgccttttacaaattcaaacaatgctggaagacagctatagttatttccattttgtggatttggatgccacagccccatcagggtcagtcactctcaagctggagttgagtcagtgacggggccagtgaaggacatgggcaagtggtggctggcccagagaccatcacacctagtagattgagagctatgatacataagctgagaaaggccagcctcacctcccttctttaaaaagtacaaaaagccctgaaaatagtcgcgaggtaaagtgtggctaagggtttggagttagacctgtgcataaggccccagccctaccacttagtagctgtgtccagggccaaaagcctcacctccctcacagggctccctagctctgagtaaacactccaaacactcaaattatgatgatttgagaatgctcccgaagtctcaaactatcttctctttggaaactgtttccagctctaatggcagacggcatgactaagagataaaggcaggagccatcctgatctagaatgagactacagattaggcaacaaaagctctaaaccttttcagagctcaccctctccaaaggtcagtcaacctaatagtaggcaaggcccttgggggaaaagttttggcagcattcgtgtccttgagcccaagttacagtgaacttaggacacgaggcagtggaccagagacccccaccatagcaaacctctctagggaggactctccccactgttgctactggaatcctgcttttttttttttttttgagactgagttttgctcttattgcccaggctacagtacaacggcacgatctcagctcaccgcaacgtctgcctcccaggttcaagcaattctcctgcctcaccctcccgagtagctgggattacaggcatgcaccaccacacctggctaattttatattgttagtagagatggggtttcaccatgttggtcaggctggtctcaaactcctgacctcaggtgatccttctgcctcggcatcccaaagtgctcggattacaggtgtgagccaccgcgactggctaattttgtatttttagtacagacgggatttctccacattggtcaggctggtctcgaactcccgacctcaagtgatccatctgcctcggcctcccaaagtgctgagattacaggcatgaaccaccgtgcctggccaggatcctgctttttgacttgtttcaaaggtttgatttcattacyaatgaagctggggaggtgaagcaggagacagcaaaattggttacatgaaacagagaggcaatgaatacttgagatactggctacggatctgattcaatcagaagtttattccagttaaatggtcagtctctcttctctccatctcccctgaatataatgttgctgattctaaacagtggctctccagttggtgacaatcgaaatcagctgggagctcaaaactcctgacacctaggtcctaccatgaaaattctgatgtaattggtccgggatgtggactaggcaacagaatttttaaaactccctcaggagattttaaagcccaccaagattagagcccactattctaaaaagcactgtaccccttatttaagctaccattaactccacggtcttggcccagtgaattcctgacctgacacattaaaaacaaaccaaaacaccataaaccaaagccagcccccacttcacagcttcagagccacagggaggaagcaactgtatgcatgcatgaaaatacaaaaatcagctgaagggggaaaatcatcgactgaaaaggaggctcaggcaagtacagtaggaaaaaacgcaccaaatccctgaccccacgttttctatatgcttctctgtagaagtcttgtgtgcctgtgtgtgtgttaaggaaaacgggatagtctcggcaaacctggattgcaatccagttccaccatttccttcgtgaaattcaagcaatttaacccaagtctcagttttctaacttgtaaaatggagtgttaaagccataatcttcaaaaccctcagagaatgaatgttaaagcatttggcacctagtcctttgtgtagtttcctttgggcgtctcaaacattgggatcagtggttcccaaccctggctactagaatcacctgcgtgtgcttaaaaaacatgatgccaggccaggcacagtggctcacacccattatcccagcactttgggaggctgaggcgggaggattgcttgagcccaggaattcgagaccagcctgagcaacataagacctaatctccacaaaaaaattaaaaaaaaaaattaaccggtcatggtggcacacacctgtagtcccagctactcgggagactgcggtgggaggactgcttgaggcagggaaggtgaggctttagtgagccaagataataccagtgcactctccagcctgggcgacagagcaagaccctgtctccaaaaaacaaaaacaaactcacacacacctgtgcttgcctgggctacaccccagatcaattaatcagtatctcagagatgcggaggggtggctgatcagtcactagtgtttaaaaagctctttgggggattcggatgtgggaccagggcttactgccacctagctaaggtatttaaccagctttatctaagagttgccagggatgtgaggcaaagcatcacctcaggggattcctacagcaaagaagtttaagaaacactgtattgaggcttgtataaaaccttcccaaactgagggcatttctacaactcagaaaagtctgctgttacatttcaactaaactaagtcacataattgcagcattttacatccaaaatttgcttataagacagctaccgccaattgcaacttccatcaaatgacattctctccctgtgtttaatacacaaactcttggtctatttctctcaatgttctagtgagaaagatgtttatcatcaaccccacttttttggggagaaaactaggaatcacacctataagagccctctgactcccaactcctttgcccctttcattacacagtccaaatcaagaaatcattagtctaatcccttgcagggcttgttaaaaccgatagatgggctccaccccaagaatgtctgattcagtagtctctgacagggcttgaaatttcagccattttgaataagttaccaggtgttgctgctggtgggaccagagtttgagaaccactggtttatgctgccttcttcccatccgctggtccttattttgcacaaaatggagcggactagtcaacgtcagctacaggataactgacttttcttcagcagcgtcactgggactgattttcccttaagactgcactttccagggacgtgacaaacaagcaagcaagtagaaagaagatctgggccaatctttggtcatctctacccagggacaatgagctactcagggaacagacccttgaggatcccaagcagacaaaccccacagctgagagacagatcttgaaacatcctccgctccttaggcgtggtcacctctggcctcaatggaagttacagataggtacccaggcgccagctgaggcactgaactccgtggcgcaggtatcctaacctcaggcccctggcatctctccccaggattccaagcactgaacgcacatcagcctgctgggctctctcgatttctttccctcactgggccgtgtgttcagacgcacctgggagccccttccccacttcctggaaactcagcgactccagccacaacctccaaaacgccaaacgctccgccccaaggaatcctacctcaccttctcataacctgcccattcattctccttcataatcctccaaatcctcattttccacccccaaatgtccgttttcaattgatatctctttgttctcctcgcaatcaccaactcccatctccaaccagcactcaggactcacttggagacaccccttcctcacgcacacaagtatctactccgcaagcccaaatgtgcttcccggattcctaaccgccagggagcctccctaccaccacccccgcccctaattctccacccaaagcccttcccccaccccgggcctttcccctaaccaatcccccaaatgcctctccactatcgtgactgcccctcatcacaccccctcctctcggtcccttcttatactctgctgctgcccagctccctcggccgccctcaacccctagtccatgggcaccgccctccctaccatgaaaagtcggaggacgcaggagtctccaaacccggactgagagaggcaggaaacacccagctcacgccagccgggrgcggaggcggggccggagcgataacttccgctgtccgcaccccacttccgccccgcagagggcaacgtcttaagccgtccgttgtgcgcctaggggccagttttctttccagcctccccggccggagtgggttccagcttttctcggctggggagggcatttatcccacctccgctatttcagctgccagaggggaggcaaggtgtggggaagttttccttcccgggcgaagaagctctgcggaactgtcattttccggaactggatgcttgcttcctggcggggttctgaaagcgaacaccgcggggcaagatggcggtagtgcgtcggctgctgccccgggtctggcrgaactcgggtgttttgggctgagacagtggcagctgcggccccgaccccaagtgcggggacctccggcgaataaaggtcggcctgcgggtaggccggtagggcctgcggtccggcctgcgggagaactgggtcgtcagtcctccgagtggtggggctggggactttgagggagttggctctagggcacagtccctgcctggccaggtcggaggaacaagtgctgggatctggcktgtgtgctccaggggctctttccgcggccctttccacctcttttcactttggggacggtaggcctttataaacggactaatgctgggtgatttgttcctgtggttgttgatgccgaggaaagactctgggccccaggactcacctaaactggagttcgaatactgttcgctcgctgtgtgaccttgggtgagttccctcacctctctgagcctcagtttccttctgtgtaaatggagtaattagcaggtttcacagagggtgtgaatacgttttagtaccgtgcctgacacctagttctgaataaagaaaaacttgatcgtaatttaactccagcttagcccccacaggcaatcttgcactctcaacttctctttgcttggccattctgtgaacgggggagccctggatcttgtttgttttacttagtgataaataactgttttggatatacatggattcagattcaaaagcatccaccttagataggctgtagctttcaataaatagtagctgttaatatgaatagtctctttaagtcgtgtttcctattctttaaataaaaattagattattgaggctggccacggtggctcacgcctgtaatcctagcactttgggaggccgaggcgggcggatcacctgaggtcagaagttcaagaccagcgtggccaacatggtgaaaccgcatctctactaaaaatacaaaaattagccgggcgtggtggcgggcgcctttaatcccagcgacttgggaggctgaagcaggagaatcacttgaacctgggaggcggaggttgcagtgagcagagttcgcgccgctgcactccagcctgggcaacaaagtgagactccgtctcaaaaaaacaaagattatcgagaactgatagagctgttgaaaagacaagttggttaaataatctgtgcagtgtctgatacaccgtctgcccagaacaagtggtggtggtcattaaacctggtggcccagcttttcctactgcacagggacaatcctcttggcttagtcagcagttggtatttatgatgcttcagctttggaaatatagaggtaagacaagagtctgaatcctgcctcttagttattacagccttgactctgccacatactaatggtctagactggagtagatgagatcatgaatgatcttctcataggactcctctccttattagatgagatcacttataaaggacttgacacataatgggcactcatttacttttttaaatgatcttggttatcaccaacctcttattttctaatctttctacctatatgattcttgtttccctaactagattgcaagcttcttaaggacaatacaataaagctcacttacatgctacatgcttttagatatcctatattaatattttcccatttaatcctaatcacaatgttgtgatgactaaattgaggtacaagaaggataaatgttgcatttaatcctttcagcaaccctaggacatagacactattattaccctcgatttacacataaggaaactgaggcctagagaggataagtaacttggccaaatgtcggatagaaggagtactaaaaagaaccaaggcccgctttctctgatgcaagactttttctgctgcgcacagccttttctttggttctccatggcatttagcaaaataagtacttaataaacacttgattgtgtgttttattaattgacgaactatagtatacactgtgcaggtggagaaggtatataggaaaggatgagaaaaactgtaaagtgtaggctattatatgatatgaacagaaatcaaccaataacattgctgaagggataataatctcaaggaaggggataagagtaatttcttattctgggagggcccctgggagaagtgaaagttttaagatcgtcttacagtgcttaggtacagtttgcatgcaactttgtttttcttttgggaagaggctccctcttccccttctaattccatggaccctctgccattgaggcactgtctgcatgtcatggagggagcatatcattgtgcttgtggcttgggccctgctcttttgcagtcctgaggagcttgaatctgttactcactctaaacaacagggccaggagttcatagcccaagggacaggactggtgaatcttagtgcatttaagataggaaaaaagttaatgggtgagaaatgtcagactgccagcattatttcctacccagagaaccttagtaactgtccaggtgggagcctctgctgaagagtttttttttttttttaatccttgtgtctataaaaataatacaccagttagacttcctgactatacactctacaatgtgcactcaagtacctccataggtacctgataagcatcatcacatttagtcctcattatcaacctctaagccaattaatagatgaagatggaaagactcagggcccagtgtggtggctcatacctgtaatcctaacattttgggaggccaaggcaggaggatctcttgagcccaggagtttgagaccaccaacctgggcaatatagcgagaccccacctctacaaaaaatttaaaaactagccagatgtggtggtatgtacctgtggtcccagctacttgagaagctgaggtgggagaatcgcttgagcctgggaggtagaagctgcaatgaaccrtgattgcaccactgcactccagcttggatgacagagcgagaccctgccttaaaaaaaaaaaaaagacttagacattctccctatagtatgtggcagagctagggactggctccaactctgtgtgactcccaaagcccgtgtgcccctcactgtgcagtgctgcttcaccatgtgcatgctgtggaaaatttagaaaatacagaccaattaagaaaaatttcccgcaatttcagtacctcaaaacagccactggtaacatgttggtatagttcatgctagttttgtatctgtgtgtgtgtacatttttctttaggtaattggggtcttattggtccacaggcagccctttattcacttctaaggcataaacgtttttccattatcattaaaaatgtcaaacacgctgaggcaggagaatggcatgaacccgggaggcggagcttgcagtgagccaatatcgcgccactgcactccagcctgggcgacagagcaagactccgtctcaaaaaaaaaaaaaaaaatgtcaaayatggccgggcacagtggctcacacctgtaaccccaactgagatagggtatggtggcacacacctgtaatcccagctacttgggaggctgaagcaggagaatcgcttgaacctgggagcagaagttatagtgagctgaaattatgccgctgcactccaacctcagcgacagagtgagactatctcaaaaaaaaaaaaaaggaaaatgtcaaatataattttcagtagctctttaacattccatgacctctaagttattttgcttcccatcacagctgtaattcaacaacaactttgggatttattttcaacatattccctttaaactgtgaggattgaagagatacagtataacatttagatgagacattaaataaagaggacccagtggtgtttttaaaaaamcattggcattgtagttactacttttactcagtgaggaagatgtatgataccacacctataaaatttaaccctaagtctggatttttttcttctgcttctgccagaaaaaataacaagcttttctgaagtgagaagctgttctyagccacgagtcctgtgcaagatcactaatgattacctggcatttctgcgacacaggcaggtcctcaggtgagatctccagactttactgctggggcaggaagcgtaaatgattcagaagatggctaccrtttctctccaagccttttataagttggtgcaaaagtaattacgacttagtgtttttttaaaaaagttgaaacccacaattacttttgtaccaacctaataccttccctcctgtggtcaagtgggctctgttagtttgtttcaaggattactgatgatgtttgacagatcactgttgagaaggggtcacagaggtcccttgatatgttcatgtggtgggaggcttgcaccaacttttttttggttataaaagggtattattttattgtccttattaatactaataatagagcacacttattaaatgcctttcaataacacgtaattaatttaatacctctaggagataatactattaagtccaatgtttattttaataatttttaaatttctttgtatggatgtagggggtacaggtttcttatatgcatatattgtgtaatggtggagtctgggcttttagkgcacccatcacccgaatggtgaacattgtaccaataaataattgttcaatccttacccctgtcccatctcccaccttttggagtctccattrtcttattccactctgtttgtccatgtgggcccattgttttgctcccacttctaagtgaggtcatgcagtatttgcctttcagtttcagagttatttcacttaggatagatggcccctagttctagccatccgactttttactctggatgatattttcatgtgggtgctacttcaagtaaagtagcctggtagagagattgttttctggaagtctggatttctgaataattcatttcagtgtttttaactgggctgattgtgcattttgtatagaatggcaatgtcatcaagcatctaaagaaatcatctcaatatgggagcctccgggggtcagtgctgtgtgctttaggctgctagcaaaagctgttcctttaggaaaaaacagttactggtgatttagataaaaacttagtatataatttagagctgctcttcagaaaagcacccgttagtggacaggaccagttctacagtaaagtcttcactggtccttggcaggatggtaattgtaaggacaatggaataagctatacataaaaccaaatatcttcaatataatggactgtcttgcattctgaagtgtgtaccttttgctttgttaatgttgaaatggccctttcttttttgtgtgctgtcacaaagtatgcactggtaaatatttgtttagtgaatggatgaatacaatgatgatgacagcaaataatcatgttggatttttctctcgagtccttacttggcaaaataaaagctgacctctcagttttggtttcccaaatactgtggactactccagaaaattcaaatatctgggaatctttgacctataggatacctggtttgaattagagctttatgggtgggactgattcattctttgttcattcgtaaagctgggcctgcccttatcctatgccaggtgctgtgctctttcccttaagaagatgtgattatttaatataggatgtagcatccctggtcttggtgagttgcatgaaagagcctataggaggtagggacttgtgccggagagctgttagcgctttggagggtgttgacaggtcctgagtatctctgctgcccaggtccctgcccacnctctgctcttgagcccctttctgtgtgtgtttttcacacaacaatctacaacacccacttgcccattttccttgcagggtttgtgcaagtttgcaaacatgttcaccctgtctcagacctcgagagcatggttcatcgatagagcccgtcaggcacgagaagaaaggcttgtgcagaaggaacgggagcgggcagctgttgtgatccaggcccatgtccggagttttctctgtcggagtcgactgcagagagatatcaggtaagggctaggatctccctagcacatgattctctggctcccaattaatagcagataaatgagttttttctcataaagtgcttgaaaagccttccaggtgctacaagctgttaatttaaaatgtctttttttgcactttcttttctaggagagagattgatgacttttttaaagcagatgaccctgagtccactaaaagaagtgcactttgtattttcaagattgccaggaaactgctgttcctattcagaatcaaagaggataatgaggtaaaaygataatagcaaacatgtataatacttccatatgtcagatcttttataattattgatattaactcagttcttatagcagctttatgaggtaatyactgtcaccctcacatcctgtcccttttgttttcttgggacctgttttggagggattatgcccagtgcttttaggaatcttttcacattgaccattataagcacaagttgaactcagatgcatgcaagagtcaggaagtttaggtaaatgagtaaaaaaaacatatatgagataaaacataatacaaaatacaaatcatattaaacggtaactgacaggcagcagtggtaaggacatcaaaaggagtagcagggtctgtggcctgccccatccacggggagcagctactacacacctcggtggtggactcatactctgatttttttttgagatgaagtctctctctgtcgccaggctggtgtgcagtggcgcagtcttggctcactgccagtcttcacctcccgggttcaagcagttctccggcctcagcctccctagtatctggaactataggctcgtgccaccacgcccagctaatttttgtatttttagtagagatggggtttcaccatgttggccaggatagtctcgatctcttagccttgtgatctgcccgcctcagcctcccagagtgctgggattacaggcgtgagccactgtacccagcctctgattttttttttttttttttaaagagatgccaaagatctgagtttttatgctcaatgttcgttcattcattctttcatattctgagacagggtctcactgtcgcccaggctggagtgcagtagcactatcacagctcactatagtcttgacctcccaagtctcaaacgattcttctgcctcagcctcctcagtagctgggactgcaggtgtgtgccaccatgcacagcaagtttttrtattttttgtagagatagggttttaccttattgcccaggcttgtctcaaactcctgggctcaagtgatccacctgcctcagcatcccaaagtgctgggattacaggcgtgagctaccatcaatgttctaatttgtaaatcttggcaattaatttgaaattttttaaatatcctgcaaatcatacaaaaggtgccagtttgcaccttagggattagaatgatcagcctgaaaagtgtaatcccagaaaagcagctagttatctgtaatagtactaacaatgccactgaggcatgtctccaagttaccagctgttaggctgttaggcattcctattgctaagcttcacattgtgccaaccctctctaggcactgggcccttgggaggaaacaggacgggcaagatctctacgctcatggagctcatagcccagcaagagagggaggactatgcaggcagtgaacacatgattacrtagatgaggacagataagctggaggaggtgaacctcrtcttacagagaaggaaactgcagctcagggtggtagggcagcttgcccaatatcacatggtttaagggcggatccaggattggtatagccaaaatggaacctgttttctagtttccacttttcttccttttgcattacaggataaaagtgatgatacagcagcctttggctactggctgtgaggcaaaagtcagtatccatggtgcttaagaaaaggtaaactggagagcacagttgaggagacagcagcaggcctgcaggaatccaaatccagtttgccagattgatactgttttttgaaagaagcctcaatttgggtttttatgtgaagtataccagtttctaaaacatttctatagggttcctccagctcttgggccaccagttggagaaccctttagtctttatgatcttcagtgtcctcatctgtaggaaggaactgcatgtgattatgtgtgaatcacctggcataatacctgcacgtgccaggtacccgctgaaggcttgttttctttgttttcactttttgatggattgtgggaatgtataacccccagtgtgtctctttgcagagatttgagaagttgtgtcgcagcatcctgagcagcatggatgctgagaatgagcctaaggtaagtggacgggagccgcagtgtctcccacaagctcttaagggccaacctactgggctctgaaagttcctgttgaatattaggaccaattcacacacaaatgcaaataagtagtggatggaaaacattaccaaagtacaaatgattccttagtttcttcatgatccaggtagctacgttctgctcttgccacaacacaggatagtaaattttcttactaggctattttgtctttgcgtttagtgttaaaataagtcctgtttacagcttatttgtccattcaggtccactgctttatctggcactggacctaactaataggtccagttccaacagttagagcacaagtgatatgatctctataacagcccatgacattcctctttttcccacctataggtgtggtatgtgtccctggcttgttctaaggacctcaccctcctttggattcaacagatcaagaacattttgtggtactgctgtgattttctcaagcagctcaaggtaacaaaaaaaaaaaaaaaaaaaagcaaaaccagaaacagtacgtatgtcattttcacctgtagactttagtctgtattttcagagtcactatcaacgagagttgctagttgagccactgttctggaagagaggaattttgatkctgttatcaatatgagccctcctttggtgtgtgttggacccttaaactgcttgccacgccacagcctccatggcagggaatctgtcactttccttcccattcatttaatgtaatcagtactttatgatctacattattatactagtcaggcctcttgttaaaagtacagaagccgaacgtgagcacagctagtatcacgtaccagttaagcaaggaagagaacgttgtgctctagaatatattcagtaacgtggcagctagagtaaggagagctagggggttctgattctccctctcattcttttctctcatccctgctcccttttggggtcacctcgtcctttcctgctgtaatcatggcaacgagcagttttgactttatattcttactctgtcttgactaaagggaggagaggcctcccgaccagttcaaaaatccaggtttcttgtaggtccagtgaatcctgggttcatctctgaaccagtcacagtggcaagaggaatggggtactgccactagcccagcctggtcctgtgttcccctacccccttcagtgttctgaaaaggatggacaggggtgtgagcagacatacacaggagccacttccactttgcttataaggatagagaggtctcagggacagaggcttggcaaggacacagatagcagctcagtaatggaacgaaagtccccagaccgcccccaaccccagtaataatccattcccagccatccctctttggctgctcaggaatggctcttgccatgcctggcttgtcaggtgagacatggctcagcgcagggtttccacactatgttcctcggagccctgggagtccaccagaatgccttagggccaagtgagcagggtatttccctacctgcacgcgagccaggcagatccttgtttatctgctctctatgtgtacattccacaacagattgctctttgaggagargctcttctattttggacaaacaaaaaaagtttatgcaaagaaacagacgtcaggagaaaaagggccctgactctggagccaggaatatgtgaaattcagtcctgattctgctgttcatttcccacgtggccttgaacaagctgcttcccctctcttactgtcgatgagctttgaggtttgaactcagtggtctccaaggttgtctccaaggtcccttccaggtggacctgctatagggtctgtgggcctagaaagcagtcaggccttttgcttgacttacacttggtgaaacaatgaactgtcatcaaaattagaacagcagccaacattacatggagttatctatgtgccagacactgttcttagtgcatcataygcattaatccatttatttctcacaacaaccctatgaggaaagcagtgttactatttctggtcaacagatgaggaaaccgaggcacagaaaggttaagaaacttgcctaagctcacacagctagtaagtggtgaagtcagaaggctgagcccagagtcctagtcatgctcaattgcatttctgctctgttgctgcagagttcagacagacaggcaggcacatgtacatacagcaagccagccctggtcatcttgttttctagggattctcaattctccattcccaagaataatggaatcccatgattccattatcaggcactagagtgccacattccctgttrtttaactcctggagtggtcattgcccaagagaaaaagaattaagactgacttataatcctgactcagtgattccaggctgagtgcccatagagcagttgtaaagtgaacacttcactgtctggaatcagaagacgtgtgtcttaatcttgctgtgtttattgtttccagcctgaaatcctgcaggactcccgactcatcaccctgtacctcacgatgcttgtcaccttcacagacacttcaacrtggaaaattcttcggggaaaaggtctgtgggacttgcttcaaaatgttctctaaccaacatttccatagagagctcagggaccttttttcctttgtaagaagcatttttgccacaagcctcagggaaggccctgagaccatacaaatgaggatgcccttggtgctgaccatcagactgcatcgcagtatccacaatccattcagcattgtgtgttgtactcaacccttctttgaatttacatttaaagtcatggttcttctgattttaatttttatagttcccacagtgccttagcctccaagtgattacattcacttaagccttgtcattttacttggaaaatcattaggttgtgaataattctattttgcccataaaatttgcattataaacttcttccttccctggtaagtgtcgttagtgccgtgtgtttcatatggtcatttcattcatctgttcaacaagtagcccatacatgccagatgcctctaggcgctgaagacagataagcaaaacagaaaggggcattgccctccagggactttaggtgctcccttcctcacagaacttaaagtccgatgaggaaaacaggcattaaatagatgtcgctcatagatataaaatgacaataatgtggtaagtgcttggaaggaagcatgcaagagaaatgagagtgtccagtagggtggggaggccttgcttggtctgggtctctagctttcctgaagaagtggtgtgtgagctgagagctgcagagggagctaggattcacagagtgaagagcggggatgaaacggaaagcagggaaagctgtatgcaaggctccaggtcagcaaggagggcttatttcaggcatgaccctggcctcttggggggaacccaaaaattgttcagttctgggccctgctgggaagctcatgtcccattgaggagagtaggcatccccctggcgaaggcagtgctaggccctaggagggaattagaaaaggtgctacaggcgctcagaggccagagacgtcacttctggctaggggtgtgagaggacccatcactcaagaggtgacacttgagccaggcctaccaggagagagagagttccaggtacgcattgcctttctgtgctctggcaccaggcctaagggaaaagggaggcaagccagggggtatctcatttcttagggcctcggatgtgggacacaatttcctgtcccacataaacaggtcacattatggcwagagacttttttgttctcactgttttctttctttaggtgaaagtcttcgaccagcgatgaaccacatttgtgcaaatataatgggacatctcaaccagcatggattttattctgtgctgcaggtctgtgactcctgccccccagtgtgcaacttctccactctccaacacctgcacttggatttttacatttgcattcagcatacctggtgtcctcctcagaaacacttttcataggaagagcttgatgcctgctgtcctcttcttcyttcccctgccttgtctcacttgtgggtcaggtaaagggaggacagtggtgctgggatyccttgaatgctctacatttttggctgcaagggtaatccagtcttttgacatttaaactctggaaggagacctcagggcttgttccctcagattccttcttggttgatgtctagaatcatatttctagctctgtgtcctcaaacagccctttccactttgtaccttgttgtgccagatcatacctctagggaattgttgagaaagcctgattgctgtttaaaggtacaatggaagtcttgagtttgagaagtaatgttgactttgcccttccttctccctagtgctgtgatgggctgtttcctgatttggtttcatatgctcctcacaacaaccctgtgaggtggtccgttggcagaagctggtatgactggcagttgtctcgctagaggaaccttctacttcataccataattaaacggcttctaaaataatatgatgtctttaaattttaagtctggcattatttgtattagctgtttttttaactttattattaaagaatttctaaccataatatttagagaaagagtggtagagttaacctcgttacccaatactttcttccctttccttttataaaaacactgcatacggttttttgtttttttgtttttttgttttttttttaagagacagggttgccctgtcacccaggctggcctcaaggaatcttcctgcctcagcctcctgagctgggactgtaggtacaagccaccatgcctggctcacaatacagtttttttatctgaagcactcagtttacttttttgctcttttatgtacaaatgaatataaagttgatatcatcctctgaccaattaaaacattcttttcagatattgttaacccgtggcctggcaagaccccgtccttgtctatccaaaggcactttaacagcagctttttctctagcgttacggtgagtaagaaaccatagctgaggtgttggcatgttcttgaatgcttcctcctcttggtttttctttctctcgttactggtattaggtatagacttgcccattttgtcagaatttatgggaagcattgttcttaatgaaagtgagcacatttgtgactgctcaaactttttcttaatcttcagtcttgaatatttcttaatcttcagccctgaatattattgcagtgtgatctttggaaactattcaaaatgaatttcttttatctaaaagaggccaagatgcaatcatttttccttttgaagttttaattgacaaaacaaaaaacctaggagccaggagaagcccagcaaagggcagggtgagaggattaaggaaataatgtgaatacgcatgtaaaatgttagaatttggaggaccagagaagaggtgatatttgccttcacttagtttggagatgtcaggtactgaagaagctaagttaattccttatggaaattacacctgcaattctgagaattgccaaatgtaaaacactatgcttgttcataggtccagaacatgtttaaactgtcaaggggaacactagcttggggagatgttaataaaagatcctggaaggaagagtgtcatggtggaaccagcttggtgaaagctgcctgctctgcccccatctgtggatctacagtacaccttcatgctgagagctctgagaagtgctgctatgctagcaggaccccatgggcttatttaacccggggttggcccaaacgtatctgagcatggaatacccctgccttgttttttggatgccgttgatatcccatgaaatcattttccatggaaaacctatttggaaaatgatgggctagagcatgggttggccaaattttctggaaagagccggataaatatttcaactctatgggccatacagcctctgtcacaaccactctgccattgcatcttgaaagcagtcgtagattgtacatacacaaatgagcatgactgtgttccagtaaaactttatttacaaaaataggccatagtttataaacacctggtctagactgtgctttccactaaccactagccacagggggctgtttaaatgaaaattcatttaagttaaataaaatgaagaattcacttcctcagttgcattagccacatttcaaatgctcagcggccacatgtaactagtagcaattgtgtgggacagcacagatatagaaaacttccagcatcacagaaagttctgttggacaaggctgacctagagcaggtctgtccgatggaaacacagttagagccacatttaaaaagccaaaagaggccaggcacggcggcccatgcctgtaatcccagcactttgggagactgaggtgggcagatcattttgagctcaggagttcaagaccagtctgggcaacatggccaaaccttgtctctacaaaaaatacaaacattagctgggcatggtgccatgtgcctgtggttccagctactcaggagtctgaggtgggaggatcactggagccagggaagtcaaggctgcagcgagccgtgattgagcttctccagcctggatgacagagtgatacctggtctcaaaaaaaaaaaaaaaagtcaaaataaaagggaaatttagtataatgatatgtttttatttaaactaatatatccaaaatgttatttttacatgtaatcaatatttttaaattattttaattaaaattaaatgtgttacatttttctcttcatgccaagtcttcaaaactggtatgtacttagagcacatctgaatttggaccagccgcatttttaagtgctcagtagccacatatagccagtggctaccatattagaccacatgcctctagaggctagaccctcacacagaagaacaggatgtaaccggttatgctatcattagttatggaagtataactatttatctaataaacaattgtgscttcatttcatacttctagggaagttatgtgagttgtatttaatgagccctaatgtctaggtacaaacaggttttcccagaagcctaagaaacagattcactgcaactgtccctacccaagtcaccttgtggggcagctcattccagcagcattgcccactgtcctctggcagacacagtgaaggtcagcacactgaggcctgaactttcaagctcaggagcagctctgcctccccctccacctccagagacacaagctctaggagcacctcacctttcttacctgtccagcatccctcccctgtcctggtgtggttgtaattcacatatgattcaccaacatgctcacatccagtcattctaccacacttaaattctcctttaagaatataaccagcagtcatccttgtagtttttcttctctgtatgtattagattccattgaatcacttgttaaggccaggctactctaaagcctttttcccaaatagaacttttcccctctgaatgtttgtatataattgaacacaatcaggaccttttaaagtaagatatcagtggtttcatcatataggaatatagtgaaagtctataaaatcgtcagtggtgtgccaagatgtgatcactaaatcctgaaatatgaatagctaacattcatgggccacacattgttctaaaacttttacacrtattaactgactcctcaccacattctcttatctccrttttatttatttatttgtgagacaaggtcgtgctttgccatcaagggtggagtgcagtggcatgatcagagctcactgcagcctcaaactcccgggctcaagccatcctcycacctcagccttccatgtagctaggactacaggcacatgcccagctaatttttttatttttaaaatttttgtagagacagggtctcactatattgcccaggctggtctcaaactcctggcctcaagcgatcctcatgcctcagcctctcaaaaagtgctggaattataggagtgagccaccacacctggcttttctccattttatagataaggaagctaaggcccagagaagttaaactgtttgctcttggtcacacagcagggagtggccaggccagaaattaaacccaggctatttaactccagaactcatactctttcttcttattctttgtacttgcctcacatgttggacacatttttgtattctaagaataatatatatattttttagtaaatagcacttgagaaccttcccaaacttgccctgttcctcacactgccgtggcattgattttctggacgcctagtttgcccaggcacttagtcatgtaaccactagccgtggcttctgtttttccccatatgcctgcccagctccctggttgtactctgagctctctgttagcagggactgtgcatcagtcatacctcttctgtttatccttctcctcaaccccccaccatgtctggccctgttaaacaatcaagtaagcagtgcacttatagactttgtcacccagaggtacttaaatgcaacagctacaggtaggctaaagaaagattctgttgacctcatgctggggaaatcggtaataagaaattgagggagttgtaggagtgtttgcagtgtgtgtggttttttgagtctggcctcatgcggactaaaaagatcacacccctycaaacattgaggcagccctgcagtcctataatgcttccactgatacgtcgctcccagtcaggcaggcaggccaagttacttagggatatggcccaggatggaatccataggtttctgtgagaacccctagagaatgccacagccctttgtacccttataacaatgcagtcctttccttgcaaatgcgaagtgactggttgtagttttagcagctttctctgtgatttgcttttcttctatttagggaattgtgctcttctgttttaaacttctttctaacctgcagaaaagaacatggttctcttttcatgtgccccactcagatcagagaggttagctcagttggttagcctcacctagacaagtggtgaacataggtactgatattttcagcwtttsagcttcataaaacatccttgtcccaaaaatggtactcttgaaagtgaaagtatatagtgtgaattctgagagcctaaataccactaacacctctgctcattgctattggagcacattagctagaagaaaccttttttttcccctctgtaagttgttctcatacctttttttctgcatgacctctgagtgatttttaaaaataactttattgaagtctaattcacatctcatacactttattcatttaaagcataccattccctggcatttagtatgttcacagagttgtgcaaccatcacctgctgagaccagcttggtcggggagaccctaacccagcggcactagaggaattaaagacacacacacagaaatatagaggtgtggagtaggaaatcaggggtctcacagccttcagagctgagagcctcgaacagagatttacccacgtatttactgacagcaagccagtgataagcattgtttctatagattatagattaactaaaagtattccttatggggaaacaaagggatgggccgaaataaagggatgggctctggctagttatctgcagcaggagcaagtccttaaggcacagattgctcatgctattgtttgtggtttaagaacgcctttaagcagttttccaccctgggtgggccaggtgttccttgccctcattccagtagacctacaaccttctggccgtgggcatcacggccatcacgaacatgtcacaatgctgcagagattttgtttatggccagttttggggccagtttatggccagattttgggggcctattcccaaaaatcaccacaatctaattccataatattttatcaccctgaaaagaaacctaatacccattagcagtcactcccttttcccctctccccagaacccctggcaacaactaatctactttctatctctttggatttgcctgttgtggacatctcacataaatggaatcacatcatatgtggtcttttgctactggcttttttcactttgcgtaatataatcagagttcatccacgttgtagcatggatcagtacttcatgcattttatggccaaataatattccattatatggatataccacatttgagttgtttctactttttggctattataaatagtgctgctgtgaacatttatgtacaagtttttgtatagacatatgttttcatttctcttgggcatattcctgggagtagacttccctgggtcatgtggtaactccatgcttaaccttttgaagaattgccaaattattttccagagtgcctgtgctattttaccttcccaggagtagtgttgtgtgaggtctccagtttctccacatccttgccaatacttgttatctgtcttttttatttagccatcccagtggstgtacaggggtatctcactgttgttttgatttacaattccctggtagttagtgatgttgaacatcttttcatgtgcttattaaccatttgtgtatcttctttggagaaatgtatgtttagatccttcgtctactttttaattggatgtttcatcttttatgagagttgtgagttctttatatgctctagatacaagtcccttttcagacaagtgatctccaggtgtttccttctgttccatgggttgtcttttcactttcttgatagtgtcttttgaatcacaaaagttttaaactttgaagaagcacaacttacctgtttttttcttttgactcttgtgcttttagtgtgataacctcagaaatcattgcctaacctgaaatctcaaagctttactcctgtgttttcttctaagaattttatagttttagttataaaactagcatttaggtctgtggctcatttcattattttttatatatggtgtgggatagggaccattattttatctaatagtatttatctttttttgattatggaagcaatacatgcttattgtagaaaacctagataaagcagaaaaacataaaaaagaaaaaaatttctcataattctacaaccagagatacattgttaactttatctgtcctcaatcttttaaaaatgtatctatatttgtgtttatatttcgaaacattatacaatatatatacttatatatagtatacatactatagatacactacatgtgtatatattgtgtatctatagtgtatatatagttttaaataaactgcttaactgaattatgagttattggtgagttaccacagagtgaacacacctgggtaagcaccacccaatagagaaatcgattataccagcactccaaaacccccttttttccctccctccccatcacaaactccttcctcttccatgtatatagtttttcatcttgcctttttttaaagttcattgtagcatgagcattctctcatgtcagtaaaatttcaaaactggtttttcatagctgcacagtatggcatcagcaactggaccatcactgacttgtccatttcccyagtgtatgtccccaatttcagccttcagttttctcagaaatcccacgcagaataatttctaggaatttgagcacgttggtggggttgtgcttttgttctggatgcacacggagacctgtctgaatgagtggatctatctgtgtctagccctgtgattgctgcacagttctcagacaatctgattcggccgttcctcatccacatcatgtctgtgcctgctctggtgactcatctcagcacagtgacccctgaggtaagcaggctctgtgagttccccgtgaaaacccaattgtgtttttcttttcttcttaaacattagaaagtaaaatggcttctctgcttatttccacacctccctttaattgttctttgggaccagtggccgtgatagacacatttgtgttagtagcccaaagaastgggttcttgtctgtccattttcttcttggtgtttgctagcacatcctccataaccacgggtgatctgcaagtgatcaagttcactctctacaggaaactgtttctggcagtttctgatttaacggtctgctattctttgcagcgcctcactgttttagaatcccatgacatgcttcgtaaattcatcatatttttaagagaccaagatcgatgccgtgatgtatgtgaaagtttagaaggatgccatacgctttgtctaatgggtaagtatccgtggctggaacttgattgtgtcctggccatcagggaaagcccragtgttttgcctgtcactattctagakatttggttgttttctgtaacaattggaagtgcttacaataaaaaacacgtatttagatagacagttaaaatagacatgtaaataaaaatcacatggaaaatattccagcctggcaaactagttaagtgactgttaatgaacattagatgtcagcctttagcttcctggcagtcaaggagaaagtgaaaatgtggtgaattgcctggataattcccatctcaagagagaagggagggagtagttaggtggggcttatatcagagcagcgcctgctttacctattttacagtgttttcattgtagatggaagaaagggtttatgaatagaagcatttgaggcagaggcacagaattctccttgcctaaatttattttagataggaaaagttttttttgtttttttttttttgaagacagggtctcactttgtcacccaggctggactgcagtggcacagtcatggctcactgcatcctctacctcctgggcttaggtgatcctcccacctcagcctcctgagtagctgggactacaagcgcacactaccacggccgactaatttttgtatttttagtggagacggggtttttcaccatgttgcccagtctagtctccttgggctcgaacaatccacacgcctcagcctgcgagattacagacttgagataaaaacttccctggggccaaatttcatgaggagtttctggtgygaatgttcacacgagtgacgttgactaactggtgaacgttgaataacagcgacttcccacgacactcagatactcttcaaagaccatttcttatgttaacccttgatttttaagcattaatataatattaaaatgtaacactaactaaatatcacctacctctgtgtgcctaacattttacctgccacttcatcctcatatggagagtagggatcatcattccaatcttacaaatgaagaaacaagtttgagacatgggttgacggccacggctcaccttgtctgtggcatagccaggatttgaagtcagcttggcccgtttcttacctttgcaccacacagcagcctccggcattgacaggtgccccttatgtggaaatttcttgctgcacatgggatgtggccgcctgagccacaggcagggagcagggccgggaggcaccaaaatgtttgtctgggcccatcacactcagccttctctctctgtaggcaacctcctacacttgggctccctcagccccagagtgttagaggaggagacagatgggttcgtgagtttgctcacccagacgctgtgctactgtcrgaagtatgtgtctcagaagaagtccaacctgacccactggcatcctgtccttggctggttctcccaatctgtggattatgggtgagtcccagatgcaaatcactgtctttcctgcctctctcccaccatcttcttcttccttctttctttcttccagcttgtggtgttttgtttcttattataaaaataatatgtattcattatatattaataaattgtgagtaagaacaaaagaggataaaaaccagcccattatcctgtaaaccaaagataacttgagtgaacatcctgtcagttttcctatctagaaatactgatccttttttacaaaattgaaatcctattattttgtattttgttccttccattcagytatggaccttatcaatgttttttcttcttcactgtcactttttgactagactgccatattttggagatgctaaaacaagacaaatgattcaaagggaatagaaatcacccaaaatccttttcaagaggtggaatataaatttttaaaagtgtaattatgaacttaaaamcatgagaaacactagactagaagaagggagatcaagtaaggtgcagcttcatgaatttgaaatatctacctgagctgagataaagtggtttctggagaggaaccagctctgctgccccagctgttttcttgttcacatatctgctcgaggcatggggtccctggcagttacccttgcagcagaaaactaaaggcctggggaggaaatccccaaatttttcttttgttgtacctgagtgacrtccctgggtcctatctagttaaaaagactcattgctagggaacagcctgccccagcgtgacacctcagcctgaggaggatggggcggaggtgctgagagtcaggaggctgtgggaggtaagtgaaggagagcagcacctccgcagacagcctgctctccgctccacttcctcttcttggagggacttggacgacttgctttgccttgctttcctcatctgaaacctggggataattttcaccctccctttgatagggctttctagaaagattgaatgagataatgcatgtgaagcacctaccagcaggcaggcctggccgtactcaggggtggcggctattaacaatatgatgatcaatgtgggaaccactaggagtctcacctcaccttcttgagcaggaaggtgacagcagattccaggaagttgagggatgctgagtgcagtgtggagtcaggcaaggaacccctggaatgcaaggaaacactgaggaggctgctgagtcatctagatttggccccccaccacctgcaagccagctrtgaggagggaggcagtgcagtgggtacaagattgtttttgtcacctgggtggtagcaagtgtcttcgagaagagtgtgactcatggagcttggggacctggggaaagcagacaagatgaagagtcaatgcccttgacgtaccagcccctcagcaatgatttgttagttccactttttatttttgtaatcttctttgccatgttgagtgccaggtcctagctacagctccgagtggaagrccattaggaactgtgtgggctggccctggccctgcatcagatggaactgacagaccaggtctcctctgctctctcctagccttaacgagtcaatgcacttgatcaccaaacagctgcagttcttgtggggggtgcctctgatccgsatcttcttctgtgacatcctgagcaagaagctactggagagccaggagccagcccacgcacagccagcatcccctcagaatgtgctcccagtgaagagtgagtgacgggagcaggcccaaccctgtagctccacttggctgaagtacagctcctgtttcttcctatatggatgttccgctgtgtttgtgggatgctctaactttgtttttgttgttatcgttcttgttgttagagacagagtctcactgtattgcccaggctacagtgcagtggcatgatcatagcttactagcctctaactcctaggctcaggtgatcctcccacgtcagcctcccaagtataatagctgggactacaggcgtgtactgccatgcctggctaattttttttttttttwaatttttgtagagatgggggccttaccttattgcccaggtttgtttccaattcctgacctcaagtgatcctcctacctcagcctcccaaagtgctggggtgacatatatgagccaccatacctggcctccagcttgttccacaacaattttgaggcttgttaggtcactaagttcatatatagcaaaacaaaaaatccataagaatagaaaacaaggattggggaaatagaaataggtgaacacaatcaagattgggtcataaaagcatgtccacacacatatgttacattagggccactgtggctacctgtgaacttcagtttggctgtgaaccaacatgaaatgtttcagaaaccgacatgaaaaggggtctgtggatgctttcttctaatttcttagaagtagagcttttctgagttcttaagaaaataaatctcccatgtgggactccttataaaggagccactcactgaaccacaggcggggctagcgcttcagtggctttcctatcgcagggtcagtaatgggttccatgggaaggttctcgttgcacgctcttattaaaagttatggaaaggccactaatgcataatttgacagagttacctgcctgtggtgggttttcaggttcagggtgtctgttcttctactgagtgtgttgcaaaactctgtctcatagctagcagtaagcgtgggctcagcaaatgtgactccagcaggatatcaatgggaaggttgaaaacaaaggtagaatatcattcaaaaccaggtgtcagaactagaggttgtcacgccttacttccctctaaaggcacagaaaatagagatgtagccagggcccctgcctttgcccctctttccctaatatagtcctctgaatttttaccattgtgggttttgaaatttggtgatttccagtataagaatcccatgtaagatttgaatatgcctggcttattctgagaaatatttgggtattctgaagagatctttgggttgtacctaaaaacctgttgttaatgtttttctaatttatcccaaagaaatgccttgaattgagtgagttgccccactgtctggcctggctgtgcatttagagctttactgaaatgctcttccttttccagggtgggatttggcagctggctgagctgctgctcacatgtcttcttttctccatgccaggtctcctaaagcgtgcttttcaaaagtcggcatcagtccggaatattctcaggcctgtcgggggtaaacgggtcgactctgcagaagtccagaaggtttgcaacatctgtgtcctctaccagacctcgctgacaactctcacacagattcggctgcagatactcacaggttcgcagtccccagggcatcttcttcacctctcacatttggcagacagtttgtcttagcaaaagtcgatgtttttttctggcttctttgactctgaaaatagattctgaaggagggcatttttgagctgttcctcttagagattagtccacctcagttacattgctcatgctcacctcaatcataagcacttgcatctcattcctgttttgtgactcttactttaattatgaagtagaatttacttttaaaaagtttctgttttctgagtaaagaagcaaaaaagatagggttgcaaaaaaaaaagraaaaagaaaaccacttttaattccataatccaaaaacagtcaactgtgcctgagtgtactgcacatataaaataaatatatttaaattgaaatatacagcactatgctttcctttccaataatcattttaccatgtcacaaattctwygaaaaccttatctttattggctacatagtatctcatcacatggatatgcccaacattttcctttttagcttaacatggaggaaagtcccctctgtgagcacagaattgggtatcacaggcttttaggttgcagcacagttgttgttatgaattggtcttacaagtacaaaaggcctttgtaaaccgtggaagccttttattacatgaaggattaagagcttctctgctgcattttacattttttaacatcataaatcactgcttctctttcacacttatttatccattcttcaaatatttattgagcacccctgtgtgccaggcactgaggatacagaggtgaaagagagagccaagttcttcgttctcaaggggattgtattctagtagtggggagactgaaaataagcaagtaaaaagtagggctcatgtaatgatgggcactgtgagaatgaaaatgctgagagatgatgttggcctgggctacagcaggatttctcagccttagcattatggatgtcttgggctggcccattctttgtcatgaggggctgtcttgtgtgttttgggatgtttagcagccctggtccctactcatagatgccagtagcaccttcccaaccagcgtgacagccaaacatatcttcaaatttggcattcagccaaatgccccctgggaggcaaaatcattcctggttgaaagccactggcctagtttagtagcaatggagattaaggcaggaggatttagatttgttttagaggtagaagatatgggtcttactggtagcttggatttgggagcatgaggactgagggttttaaagaagataccaggttgttggcccaaccacctgtgtggatggtagcactgtttgctgagctggagaagaccgggggcagggcctgtgaggagtctgttgtgttgtggctgtgacaagggaaaggggcctgctgggcatgctggcagaggtgacactctgggagcatcagctgagggatggagtgtaaagccatgggctttcagcctagggcaggtttcccaaagatgagcagagggaggagagaaggggcaagaccatacctggggtaccccagcgcctgagggtttgagcagcatcttgagtgagaggagtttggggttgtggtttgtgtccagctttttttttttttttcgagacggagtctcactctgtcgcccaggctgtagtgcagtagcgcaatctcggctcaactgcaggctccgcctcccaggttcacgccattctcctgcctcagcctcccgagtagctgggattacaggcgcctgccaccatgcccggctaattttttttttgtatttttagttgagacggggtttcactgtgttagccaggatggtctcgatctcctgtgtgtccagctttttaaatgagctcacattgaagctcattttcccaagtgagagaatccaaatacaggttttttagtcaacttgaaaatatacactttaaggataaagataaactagtctaaagtgtatgtttgatattcagtctatttagcaacttagattatagaaaataacgcttgtttttaaaatactgctgtttttctactgacaacttaggaagtgtctgtttgtgctcctcacacacatctgatagcactggcactgctgctggtctgtctgccattgctctgccaggcccagtgtctccatctctgtctaaatggctagatatgcagcccttgttgaatcagtgtgtgatgctatgagcattctagtctacgctacatgagtcctttacacagaactcgaggacacttgcttttcttcttttatcccataggagtatatttgtgatctccacagtgttaactgtttcctctgtttctattttaacctatttttgaattgtgagagttccacattcttgggtgtgtttgatataacatggacagttgaaagactagttatgagtggggcacctatgtcatcaccaacagatcaagaaagtcttgcttctaaaggcttctttataaccacatcctcctacccttgaaaatgtgaggtctaagctctaggcataatcactaaattgatacaattcttggcctcctttagaattccttcagttcaccctctaagtatccttcagtagctctgatggagttcccccaactcccactgctggctaatataccttccccaaacagttctttattcaaaactaaataattcagagagtgccctataagatgagaggtattgtaagggctcgtatacaaggtgactgtgcttttctgaggaacacaccttaatgtatattcagtgacacatggcatttcagatccagcctttctaagtcaagagatgtgttattagatgtaaactatacccgtgatgtggcctgtgtgtctaaggccttgtagccatcaggaaacaaatttagaaagtcctctgtgtccccttttgcttcctcagggttccatttttgtatagttcagagcatcctaccacagtcattgactgcatttccacttttaacataatagaataatagaggtaagtggggggaagctttgccaaaggtggcgagcctgcaagatggtttaaggcaagggtcagcagactactgttggggggccaaatccagcccactacttgtttttgtcaataaatttttactagaacagacccaaatctgttttgtttttgtttttgtttttgtttttggagacagagtttcgctcttgtcgcccaggctagagtgcagtggtgcgatctcggctcactgcaacctctgcctcccaggttcaagcgattctcctgcctcagcctcctgagcagctgggattacaggtgctggccaccacgcccggctgattttgtattttttagtagagacagtgtttctcatcatgttggccaggctggtctcaaactcctgacctcagatgatccacccgcctcagcctcccagagtgctgggattacaggcgtgagccacagcaccgggctgccaaatctgtttctttacacattgtctgtggccgcttttgtgctgtagtggtagcactgagtagttgtaacagtgttagactaaatttggcctgaggatgcctccatattttgagtccttaagtaaggaactgcagcctaacttagtatgtaaactgactagaagtctaacttaggactattcagtatttttgtaacaaatagctgccaatcacagcagcctagcttcaatcaatcacaggtggccatctgattagaccacattcaaataaggcaaagccgaggtgtaaccagtcaagctgtctctgtacctcacttcagttttgcccctaaatgttgcctgcccagaatgtggactggagctgtctgaacctcgtctggttctgagggctgcctgatggatgaattgttttttgctcagacttggctagatttaatttaacagcagagaccttctggcccacagtgcctaaaaatatttactctttggctgtttcctgaaacaaattgctgatccctgatttaaagcataaatgctaagtcagacctgagttctattcctggctctgacatacaggctgtgtgatttggggccaattatttaacctttctgtgcttcagtttcctcctgtataagatggggataacactgggcttcagaaaatggaaagcaaacaatacatacggagtgcttagaatggtgcctggcacatagtcagcacccactgactactggctcttatcattrttactctcgtggtgataatgcttttctccataatcccaccttcttttcacgcacattaaatgttcatggataggtttaagtgttttgtttccccactggataggagaaataacagaccaggtggagtctccacctgaagcttgggtttctctgtgttttttccaggtctcacttaccttgatgacctgcttcccaaactgtgggcatttatctgtgagctcgggccccacggagggttaaagctcttcttggaatgcctgaacaatgacactgaagagtccaagcaactcttggccatgctgatgctgttctgtgactgttcgcggcacctcatcacgtaggttgactgctgtgggactgaattcctttcctagaatatggagagaccaaaatacagtgtcagtaaggaagtaattgctaatgtgattactgcaaacatttggacctgtgtggcagggcattgtaagaactagccatttaccaagtgagcagtgtgcagtaaatgttcagcagttgttagggtggggcctgggagttaaaagttcccatcctttcaaggaagctgatcagtaccactggctgtggcttggggtctcctggagatgggtttagatcatggctcagccatttattcactgtgctagctagattcctggaaaattccaaagtcagagccagggtgcagatccttgctaagcagatcttgagacaccctgggcaagggatcacggattcaacctctctgagactcagttgactcatctgtaaatgggaatgacaatagcacataccttttaggcacatggtarggattaaaagacataattattgcaaagtgcttatcacagtccctggcacataggatgagttcagtacttgttggctcttattattatcaagccgaccctgagcaagtttcttaacctctttgagtctctatttcctcattagaatgaagagaatattaccagttcaatagagggtaagtgaaaaaaacagcgtcaaatacttagtgcagtgcctggcacagagtgggaaattaacaaacattagtcccatttagttcctttggtttttaagcttatgcatcttgtgtgtttggtattcttttcattccaccttttcccaaaaggttggtgaagaattataagatacaatggacctcaggcagttatgttcaggctggaagactttagccggagaggatcagggacatgtaggtggcagattgggtgaggatcatggaagaactcactgagcagttggaggcaagagcaggggtctagctgctggtgaagacatccttaatcactggatgggggtaagccaagagtgaatcttattctagtgtatggagcagtgttaggaaatgttcagatagagctgtgtcttaaatggctcatttattcatatgttctttcaaacatttattcatttactcacaaatgcttactaagtacctgctaagtgtcactagtatgtgtcttagatatcgaaaagattctgcagctttcctcagtaaacatcgactctcagtcaatgttcctwgatatgcagacatgaataaggaaggcgtgaattgaggtgtgaattaagaaagtgtcacagtcagatccttatgaataagaaaaatatagagtacagattttttcttaattgtattttttaactttttactatggtcgatttcaaattaatagaaagtagaaaggataatataatgaaccctcatgtgcccattatcagcttcaacagtaccacctcacagccagttttgcttcatccaaatgcccacctgcttttctctcccacattattttgaagcaaatcctagacatcatatcatttttttcattttatttttattttattttactttaagttctaggatacatgtgctgaaagtgcaggtttgttacataggtatacatgtgctgtggtggtttgctgcacctgtcaccccgtcatctaggttttaagctctacatgcrttaggtatttgtcctaaggctctccctcccctttccycctacccctgatgatatcatatcattttatctgtagattttacagtaagtatctctacaagataaagcttatttctcaacctcgtttattgtctagtaagcagtacagattttttttctcttcgccttttttcagtgtggaattgtgggtaattttctctctgatttagaatccttgatgacattgaagtttatgaagaacagatttcattcaaactggaagagctggtcactatctcctctttcctgaattcttttgtgtttaagatgatctgggatggaattgtaggtaagagaaaaggtgtctgctgttgtttggttgatgctgcacccagggaggccgaagagtctatggcatcaactgattcttagctttattgtctctccaagttaatagaaggtgcacatttattcccacaattggaaattttctttcttcactctctgtgacttcttaagatagtggtgtggttatagaagtcttgctctcccaggctcccttcaggatttgcatgtatgtgtcgaggattattaatgatgattaattttgccctgaatctcctgttgattcttccatttgatttccgtgaagataaaacatgtgccagtgcacacttgagatgagagtccacctcccgaagtgtctccaattgctcaggacaaagctccttagayttaaaaggcccttcggatgacacactagtgggaggcagcatgagtgattttgtctgagaggtactcaggccctgcagacacttagcacttacccagggtgccttttaattctgtcrgttccacatataattcagagcgagggagatcaaggacttgatgacaactgcggaagacaagagctgtcctccccttgctctctggctctgactcctcctctgactttcctgtttgtttgtcccacagagaacgccaagggtgagaccttggagctgttccagtctgtccacgggtggcttatggtgctgtacgagcgggactgccggcggcgcttcacccccgaggaccactggctgcgaaagtgagctccaggggtgaggagggctccatggaagccagcctgctccggcacgctgcccgagcactcagctctcatgttctaggrcagagaggactttttccctctgcttcattttgtctgttcatttgtgtaaagagagctgctgtccctgtgaagcacctgtcaggacgcttctgttaagagatgtttacaccaaatatgattagagttaattaatggcaacagagccagattatatttagcatacatttctcatccaaactaggaagaggtcttttagctgagctgagcaacagagcatgagagttaaaaggcagtttttattagcagaattactagagtaaaaactgcttttaggttttttggagagtaatggggtgggggaaatcctcctatcacaactgaacataggcatgtatctgcatttttatcaatgagttcaagctttatggcaactgctgaagctgtggcactagagcagggactggcaaacttctgtaaagggccagatgactttaggctttgtggaccagacagtctctgttgtagctactcaactctgctcttgtagcacaaaagctgccataggctatacatgtatgaatgagtatggtcatgttcccatcagactcttgagaaacagacagcaccctgcatgtggcccacatggtgtcatttcccagcctcacactagaggatggtttccttcttttaattctcccaaacccatgtctttcttctcaagggatctcaaacctagcgtgctcttccaagaactygacagggacagaaaacgggcacagttgatcctgcagtacatcccacatgtcatccctcacaaaaacgtgagttgcactcagagctgggcccygatgtgtctttctattcccccacgtggttcctgcctttccatccttgctatggcaattggaggtgactaagtgggatcattcattcagcacaaggaaacggtggttgctattactttggtgaggttacacccagtgctggggtacagagctggagaagacagtgtgaactggcgatgctggtggagtggcagcccaggtacggagacctgaccagctggagggagggaaaggggacaggaaagggtcccacgggcaaaagtggacagtgttgaaaggctgagttagaaaggatgaggtgcttttggagagtcaaatgtgcagtgtggctggagagaatagaaaggatggggtcaagaggaagccgaggagggtagtaggaactagagcaagacagccttagaaaccaaggctgggagcaagggctttctgcaaagccaccggagggcyggaagcttaggaggcacctggtcagagccatacttcaggaaggtcatcttggctgcagcgtggagggctggctagaggcaggggtgttaaagcaagctgtcctgcactagggtgggccctgggagtcaaaagatgagcaagtcaagagatttttaaggaggcctcagagaatggtcacatcccaaggggaaagaaaggaagaattcaggtgatgctcgggtgtctggcttgggtacttggggggtgttttcctgaggtggaagagcaggactgggacatggcggcgagttcagcatcgagcaggtaggatgtgagatgtctctggctcctggaagccattggaaagggggtctggcattcaggagggaggagcttgtgtggggagagcacccaaatctcctgactgcccccatggactgggtgaggtagtcagggaatcagacagcacccaagtctgctgactccccccataacctgggcgaggtggttggggagtcagacggagtgagaagtccagggcactgaggcagagccctgcaggacccgtcccacagagggccarcacgaggagggaaggagggaaaccaggagagtgccacacacccgggggatgagagagacttggggaggattgggctgtggcaggagcatccaggaaatgagggtagcaagcatggctcacgtccctggtgagtggcaggcactctggaaatgtccgatgctgcgacaacactcagctcctcttagaagagtcttctaggagtctaggttgtgtcctttatttttctcctgttctattttctttttctttttttaacgaagtagacatatttttagaaaagagcataaatcatatttttgtaaattaaatctcatttttcagaggtatttcatcctcactgctgtctgatactgttctgtccttgactttaatacttatggttgctattctttccccctcaagcagtgatgtgcaaacaatgtggctgtttaaattcttactgcacttggcaaactctcagaagtgaagggccttacggcaattacttaatcaaatgtgccttccttgarggagcccctgctatgatgtccctgaccttgcttccaatagaaaatgcacagctttgcaaaacaggctgttctgtggctttacttttccaaaagatagaacattcttcctcatcatgaactgtgcttctctgtaacttctaccctttggtccttgaacarcccctaaaagtggcttcttttatcttctgtgatctgttggcagctcccgtttgcatgtggggcttgtgttttccaagtgtagtatccttagcctctccacctcgtctttgtttgaaataggctccagccttcatctcctgggcctcatctggtttggtggtgtctggtttaaaatgcagcccctcctcctggacccgcgtgtctgtgaaatcagcctctgaccattgcattcccataacacatcgtctagaccctccgctctgtttctctgtggttcacgtgtgctgtggccactggaggtgctgcacaatattttaaatttctgaggagaacacagtgagacaccacatgaactgctagttcagagtagttcgtggtttcaacatgagattgcactacattctttttaatgatgtttgcaaagctggcttgtaagaacaaaataaaaatattttatatttcaaagtatgtgcatttgtaaaatacagcaactgaggtcttaggacataaatatttgggacctaactacctagtaaaaaggactgctagggatttcttttggcctaggagtaccatgaaaaaagttactgcagtgatagaggtgctgtgaataagaaagtcagggaaccgctgagataaattggaatgacttttaagtccagggtatatagtaatccccacattttttttttcttttgggaattttgcttaaatatgtcatcaaggttgtttgtccttagttcataaaatgtcctccctcaggaaaatggggccctcgtcatctcctgccccttcctgctccgtgattgcaggtcctgggggagtatctaaggcttggtgttttcagagcagatgggctgtcttgttgcccctccgcccatctcaagcttcaagctccccttagtggcatgtgtgctgccctctgccattgaaatattcttgctggagtacacaggagggtaataggctctctctgctctgttaccattataccatctgccctaaatgttgaacctctcccttgttctcgatttcactataatgcctttcttgttttccttaacatttgttaaagcctcagctctgcctggctcacgtgcacagcacttcattttctgcaccctcttacatcgcttttacctgtttatgtgtgactcatcccctggctggcccttaagtcctctctgccttttgtgtttacccagaaggcctaagaggtgtggagtgggcagaggctttgtagtatgggggctgtgtctgggctttggatttcattccatccccctgcccaccaactgtgtagccttgggtgagtaaggtcttcatctgtagaatggggagaatgatccgtacccaactgtccactgcagtcgctgaggttgcccagcccttgcagcctggataagcttgcctcagactttcttccatgccccatagaaatccagagccctgtccaggctttctgtggtcacttctgtctctttagttctgtttctgtgtcttctgctatctccaccccatactggattgacccagatgtaactcgccttccgcctgtgtatcaccaaacagcaccccttcaggtggtcatgccaaagatttggggtcataggaagtagttgtgtcacaaactacacgactccacatgacaaacacctgttctcaaaagtcctacagttcccctgccatggaggggagaggtaggagcacccttcattcctatcaccagcctccctccctgtgtccccaatctgtcccctctcttctgcatggccctggaacctctcagggcttttggttctactcagagcacgtcagtcctgtcacgtctagatctgtcaaccagcctcagcaagatgcttcactgaacagtagttcctccactcagtaccatcccctttcttcttctttttttttttttattaagacagagtctcgctctgtcgcccaggctggagtgcagtggcgcgatctcagctcactgcaagctccacctaccgggttcacgccattctcctgcctcagcctcccgagtagctgggactacaggtgctcgccaccacgcccagctaattttttgtatttttagtggagacggggtttcaccgtgttmgccaggatggtctcgatctcctgacctcatgatccgcccgcctaggcctcccaaagtgctgkgattacaggcgtgagccaccgcgactggcccatcccctttcttcttaaggggctgttggtcattgctttttttgttacaatcatatttgcctaatagagttaacataataattaaatgaaaatatactagcacccactggtatatagtatttcctgttgttgttactattattactgttttttgttgttgttgttgttgttttgagacagagtttcactcttgttgcccaggctggagtgtgatggtacgatcttggctcaccacaacctgcgcctcccaagttcaagcgattctcctgcctcagcctcccgagtagctgggattacaggcatgtgccaccacgcccagctaattctatatttttagtagagttggggtttctccctgttggtcaggctggtctcgaactcccgacctcaggtgatccrcctgcctcggcctctcaaagtgctgggattacaggcgtgagccactgtgcccagctgttactgttcttatttgtatttaataaagttcttgactttgggggagattcccatttttaaaaaaacagctgtggttagatttatgtattcattcagctgacttgatttaaatggtattagggtgctgattcttgagcccaggatggggcaaagagtcatgctctttctaaataggtttagcagaatcttaagaataaggagagagggttcctttcaagcagtaattgagaaatattactggtgggactgtggtgggcttgaaggcacagaggaggcaggttgaaaggtcagggagctttatactgtagggtcatttttaaattttctgacagtaggaaaagttatctttgaattatttttgttcttaggattcataatattgatttcccttaaagcaggcacagctagataaagaaggctctgtaacttgttctgccaccaagtttttatagtggattattgactgaatgaggaggattttcttttttcttttttttctttttttttttttttttttttgagacagagtctcactctgtcccccaggctggagtgcagtggcacgatcttggctcactgtaacctctgcctcctgggttcaagtgattctcctgcctcaacctcccaagtagctaggattacaggtgcatgccaccacacccagctaatttttgtattttgtatttagtagagacgaggtttcaccatgttggccaggctggttttgaactcccgacctcaggtaatccgcccacctgggcctcccagagtgctgggattacaggcgtgagcccccacgcccagccttgaggaggattttctcgtgggccattcctagctggaccctagctgcagccagaccactctttccggaacgttttttgcttgtgtattcaacagtatttctaattcccacaagtgttccagggaatgcttctgttctcacaggacacttctaactggtagcacatgttaaggcatcccattctgcttgcatctcatctaacttcagtttcagtcatttttgcagagtgtttttatggaatcgtcagtttgctgaccctgttttctgatcccgcctttgttcattttagagagttctactgtttcgaaccatggttaccaaggagaaggagaaactggggctggtggaaaccagctctgcctccccgcatgtcactcacatcaccatccgccggtccaggatgctggaggtgagtgtgaagcctatggaatcctaccacaaggaagtgggccctgcaacatggaagctctttagtggacggtctctggcttttgaactgttcctgttactccttgatctgaaattaaggctctgggagcaggaaaggggtcatttgtcctgttgactgctctgaacagctgcttggttaaacatgttctcattgctggagacccagcagtgtcttcctttaccccatgagagctagagtatcctgggctagagcatccacctcttcatgtccctttgaaatgaggacaggagctgccagtcacagcggctgcactaacactctcaggtctgtgcaaactccatttgtcccagcaggcactttgctgagactctcaactgtgattgtagtatataagtggagtggaggtgttacatttactgagttatgtagagaaatacttttatcacagagccagaagttctttgtagacagaaacttacaagataccactgaagtgacccacctgagctaaatccgttgtctggaactaccactatacggtgactccatgtaaattagagataggtacccagtcctcatatgtcagaaaattgtcacaatacattggttttgttggtacaagacygtgcctccaatctgctggaacatggttgtcataaacttaactacctacgatgtctgtgttatccatgccacagcctcccctgggcttgtatagtgcacagcctacccatacatgctcatcctgccagcgatagaattggtgactgagccacagtccccattccctggagaggcttggcttcatttatttgccatgtttgcacttcagacctttttatcacactccagctgcagttccccatgagcctgtcctgtagtgtaggacagtcacgggatcccctgaagtatgtggccagatagccacccccaccagcagatggcttctggcagcagctgttcctcctcacgtgtcttcattttctccctcggtgcatcgtaccttgtttgtgtcactccttactggagagcttgtttgagtgcccctggccactggtgatcaatgccgagagctgctaggaaggcagtgtgtgctgaacagtggatgtttctgacattcttcaaggtaggcataaggaattgaagggcccactgggccctgcaggccatgtgaaggagtaaagctggctgagtgggtctcattacaggagcattctgtttgcgtgctagacatatagaaataatctccacttctgcgccctcctgttcttgaaacagccctcttggtctgtgtagctctacttgagaaaaatagcccccacgagtgagttgataaatggcaactgacacccagcctcagtgttggggagcagttggaagcacgtgcctccccagaagaggccaccgccactcagctcctccagacctgccatgtgacgaggtgggctccataacgctcttgagtttttaagagaaggccaaaattcagatcttccatgttgtgaactaattgaactctgtaaagtgcctagaaagtcagataacacctgtctttccaccaaattcaacctgtgggccacccatttgcaacctctgcttttgattcagaaaaagcccaattgtgtggtagggactccctttctagcacttccctctgcagacccagatgcatctcccttgtctctagaaatcctcagccccactacccatcacgcctacccagacgtggccagcacccacccatgggaagagtctggggtggtatagattgcagtatctcctgagagtggcagaatccgactcccttcacaaatatcattgcttattggaaattcacttgacatcccagttactctggccctactttttaaagcatatccctcagggatggcaaaagagatgtctgtcttaggctttaggcaaagtcccttttcctctttactttccactggagaaggggagagggttgttcattgttatcccagttgtcgtaatctggtggcttggttattagaatatgagagcccaggggcctttgctggatttggacacaagggggcgtcagtaagctgatctcagactcatgctctcctgggcattgtttccttttttatggttagtattgagggctatgcttctctattaggcttccagatattaaagtcctgtaggaaggctcttcttcccagagggtgagtttgggctggaactctagtattcagaaccggaaggatcctcaaacatactcttacccagtcctttcccctgtctctgtcaaaggcagaactgaggccagagaacttcagtcaaggtcacttggatatcagtgatagagctgggcctggaagccaggcatcccttttctagctcagtattccctgtgtgtgcatgttgagatgcagtgaagaagaggaacgctgactcacattcacctcccaagaggcatggatataatcctcgcatatccacgccagttcccagaaggcaggaaatgtatcacaagaggcagtcccctctaaacgtttaaacaaagaggctggtgtggagctgatcaagcaagactgagatttgaatccagtaaacgctccttgagctaggccatgtgccacttgctttcacatgtaccatcccatttcatccacataaccacaaacgcatctactaatgcgtgtgaaggctggggaggcataattttaaagcaggttggaggaactcctgcaggcagacaggaacttgatggaattctccatccgttctcatctcagtgccaagataattatcttaaatttaggcagaatggtttaaatgctgttacagctgcctgttgacttcctgtttctcccttttgtcatctaacttaatgattctcaaactttatgtacataaaaagtccttctcaggtttgcctccacaaaactgtgctcctgttcccacatgtgacttaggggtcttgagaggtaattttcccttgcccactaactttgaagcctaacccctgaatcggggcaccataggatagtcctttggggatcactgggtgaacatggcaggaaggcagcaagggttccccaaaacaggtctcgccacactggcatactgctcgtttgctttgtgatgaggggaccagacggcagccgagtggatgctgtggagacagcctgtctaacctgcgaagcatgtgacagtgttacagttgtagctgaaagggagaaatgtggcatggccttcataggacagcagggttgattggtcacttgttccatcacagtgtctgaagacatcagtttcacctggtgattgggcctctcaagtcgggccaacagactcttccctgggccctgtgctgttcagcactgtttttatagtcactgctctgaaataaaaacctcagcaccccaagtactaggaatgcattagatgatggaaccagaagccaggaaggcctcaacagattagaatcaagagacaaactaaacagatgatttagtaggagaactccaaagttgtggttctggggctgtgcatgttgaggtctggatggagtagatgtgctgaatggctgtgtcctaacagagctgaccaccagccagaagtccaggcccagcaccacccccacatctcggtctctgctccctgcgttgatccctgccatccacctgctctgctgccaatagaaagatctgacagaaagtcagccctgttactctttgcctaaaaccttctgcagctcccattaccttcaggatgtcccctaaattcctcagcatgacttgcaggcacttcatgattgggaaggcagcgggagatgaggggtgatgggtaattcttttcattttacagtgttctgtaggtttgattttttttttttttcttttttcttttttttaccatgagctaaagatactcttagcattgagagagagagaaatgtatcttgtcccggtttctttcatcctttgtctgatggccaggagcttgtcatgactcattttgtctaacttccccatctcactgctctgtccccttgaggtcagtctccccttgccaaggagtgatactgtcacatccccaaatgaatctttgcttttaatcagcactcattcaaaagcaggtgagaacggctcctgtcatgcatccacgtttcataatttgcacatttggtaatgatgctgggagagcttcgcacagaggagagggaaccccgaattgtgtgcataaggctttgggcttcctaatgggctgtaattctgctcttggcaggayggctacgagcagcttaggcagctctcccagcacgccatgaagggggtcatccgtgtgaagtttgtcaatgacctcggggtggacgaagcagggattgatcaagacggtgtttttaaggagttcttggaagagatcatcaagagagtttttgacccagcactcaatctgttcaaggtatttaaggggagcaacagcagggctgacagcagccagattcaagaagtgaagagctgggcttgctccttgcaaggcacttgacctctgcctctccccgtctttttgccttgcagacaaccagtggggatgagaggctgtacccctcacccacatcctacatccatgagaattacctgcagctcttcgagtttgtggggaagatgctggggaaggctgtgtatgaggtaggaacgttaagaaacagagaaatgtaaaataaaatgttaacggtaccatgggcttcttcacatacacatatgtgatcaggcttggccatgtaaactgtcactaggatacaagcgaggacaggggcaggaaccaaggtttgttgtacaccagtgctaggtactttgcctgtggcatctcatctcatcccatcgacagccctgtgacggggctgccactgtcctggctatttaaggatgggagacctgaagctttgaggagtcacctgtccagagtttcgttgctagttaagtggtagaggtggaatttgaacccaggccggcccaagtcctaaggccagccctcttctttcctgaggcatgaggagtggtgtgcagagccagatggccacacggaggctgggtccccgttgtaggagggcagcattttgtggagtttgatagttttaaaatcttgtgttgtttgagtgagtgcttcccagccatggcaacaggacaggaccagctgttcctagtcagccgtgtgaccatgtgccttcaagtttctttagtttttaagccgtgttctcgcatcagtaaagtggagataagaaaagccacattcctgggttgccgttaatggtaagtgaggagggccttctacggtgcccagccagctgctcacaccaggtggatcggagcagtcatcctcaccttactaagaggaagtgagtctgggtttccactctgtggcctgatggggtcagggtgatgtggcccacacagctcctgtccattgaaaccccgtccattgaaagccaaggtgggaccaccttcagtgggaagtcaccgcctgttccttgggagagtcctgtttcccaggaggaaggaaagctgcagcacaagcccagccagtctgtgtggccttcgcagtgggctccagagctkcagggaccctgcctgggtctcaggctctgctgagcttctggcccaagcacggaggaagcgagccacctgggcagcactcctcgcataccccaggaacctggagaagycagatgctttccaaacagaaagagccagcagctgrgccaagctgagagggaggtctcagggccaaactcctttcactctcgaataatccattgttctctctgtctggaaacagtctatgtgcaccggcctcagtccctggccatgatggaatcaggtggcccatctgagcccctgcccaaacaccatccagtcttccttgtgccctccagtgatttgggtcctgggcccattctctgtgcctctgtttcctcatctgcataatagaaacaatttctcagttgatttccattgaaaaagttaaaaatcccattaggacccacccgagcacatggcatatgttttcctttaaacacgttgctgtgatgacactcagaagagcctgggccacctggaaagcatggcctcctggcttctctgaatgtcatgccatttcccaggcctcgcctctgtgtcctttccctccctcacctctgacagtaattgtgctgacgagagaagatgggacctgctaggccctgcatgaggagtggcatggattaactcatttaccccttacggtcctctgacaggygtcatcaagtccgagtgactgtcccctctcagcctctccagtccacatgtctctctccaccctcctgccgctaccctggcacagtctgtcggcgttttcccctggcagcatgccacagccgtctggctgtgtctgcctcctgtcttcctctcgccagcccattccccacataaaagtgcagctctgtcccttccctgctcagagccctctggacagaatccagcctgcagcaaggcttacgggccctccctgacctggccctgcatcctcattggacatagcttccattgcttccgtgccctccatccctggagtatgcctggggcctcgtaccagtgcctggctggctcctttaggcctcacttagctggcttttcctcccggaagctccccaactctgcctttgggggagagcttatcctctgtgctcctctggcccctgccaatgccatggctgccctgagagcttgggggtgctggtactgtgcacgttccatcctcttaactgagaggctggtgctgccccccactgacaggtgagacagctgagggcccctggcttggcagcagcccagctaggatttaatccctgagcactgtagctccaaaccatgtgtcctgaccactgcgctgtccccaggaggcactcagttgtatttggtagaggatggggagatactgccctccggattggaaacttaggaggggcctggaaatgccgatggcacccctgggccatgtctgcaccctgagccaccccaatccaaacactgcatcagaatcctggctgatggacagctctgcttctctgctctcccagggaattgtggtggacgtgccatttgcatccttcttcctgagccaactgcttgggcaccaccacagcgtcttctatagctcggtggatgaactgccttctctggactccgagttctataaaaacctcacctccatcaaggtgagcatggaatggtgggtgagctaagccgagcactggtgtgaactcacagcttgcgaagtcccagaaggagatggcctgtcctctcttattgctgttgctgtagctgctacaggcccctcacatccccctgtgggcagtcccacttggggctgatcctcacaacctccttcctcaaagtcacgaatgactttctttgcgtcaagctgttcagcagccatgggtgttcccagcaccaaagcagcgcctcaagggagggttaaacctcttaagcacatagtgctccatggccctaacactttccccttctctgttacattagcgctatgatggggacatcactgacctgggcctgacgctgtcttacgacgaggacgtcatgggtcaggtaggtccgccctttggctgagctccctttccactgcccccatgggctcctgagacctgccgtgttatttgttttcctcagaaagagccccaagctgaggctctgtctggtcccttgtcctccccacccctcgcccatcctcctcccctcttgccaggagggagggccccctcctttccttcccagttgacctggcctttgaagcttccygcagagaccctgctttcttatatcgcattttagggtaattccccatttgtaacatggcttttcgttaccatggtgaggattagccgttacaaatggaggattatgtcttagagaaggggaagatgccacctgagaagcgcctcaagctcaagcagaagcctgtccttgttcattctcagcatacagagcagagcagggagcagagaccctggtctcagggccgcagcacgtctcctcccacggttccttctggcttttctctgtagcagcctccgcsccctttgattgtgtcctggtggaggtccctgcatgaggctctgggagtgcaggtccaagggccgctcaggagaaaccacgccatgagcttcttaatgcagagccgacttattagactcgcgcttgggcacctcagaacccccagtctccctgagccacactttccatatccatttgccagatgcgagtcctggatgggcccagtctgtaagcaccgctgggagccctgcgtggcctgtcctcctgaaaggcccctgggcaggctggcacgtgaaggctctgagaagcctgtaaggaggaaaccaaagtggagctgagttaatctcaagcttccctacatcctgggacacagaactcttctttgaaggaaggaaagaatgctgtctcgcaggatcgttctctacagaatagctcacgggcagggtgttcctggaatcaggggaaacctcaggctggctgattcttaagggccctttcagctttaaaacccactggtgccacctgagatgctgacagcagtgggactgggatcagtgtgttcctttctagagctgtagggttatagaatcttcacagaatttctattaaaattggcttcaaatgatatgtcctttgatttttaggtgatccacggaagtgttcttgaagttgaaagaagcagttgattttacagagtttaaaataaatctataatcagatgttgaggctttatcctgacataatttttctcccgactataaagataatgaaacttctaacaaaaaaaaattagctctaatatgagcaaaagatgaaaagataatgaaacttctaacaaaaaaaattagctctaatatgagcaaaagatgaaaacgcaagctgcccgtaatgccagtgcccacagggtgcccgtgatagtgtgttacctgcgtcccttgagactctttcccgagtctccctttccagaaatgatgccattctgtgcatgttgttacatcagtggccttttttcacctttttagtaaacgcacattttcatcatattgtttagtacctgcacagtattccagggtatggatgtaccagtgtttatttaaccgtcctactctactccgaaatgccaacacattcccctccatgacatcccgaagtcttaatacaaatgtttgaacaaggattgggtgagaaaaaaaccttttgtattgatcatgcagggtctgcttgttgatatttcagccttgactttttatgagaaaggatggttcccaagcatgtgccatcttaattccatcattatcatggatgtttgtgctgggccctctcatctcygggaagctttatttccccattagagtcctccctattaattactcccatcttctcccccagcttgtttgccatgaactgattcctggagggaagaccattcctgttacaaatgaaaataagtgagtatagcaattaggtttttaaggtcaccacttgaaaagacttcattctggctctctgcgcttatgttgagaatttattaagatagattgaagtagaaagaggccataaatatcataatggaatttactggttacagttcataggccagaattgtattaaattcaatttgcggccgggcacagtggctcatgcctataatcccagcactttgttaggccgaggcgggcggatcacgaggtcaggagttcgagaccagcctgatcaacatggtgaaaccccgtctctactgaaaatacaaaaattagctgggcgtggtggctcatgcctgtaatcccagctactcaggaggctgaggcaggagaatcgcttgaacctgggaggtggaggttgcagtgagccaagatcgcaccagcgcactccagcctgggcgacagagtgagactccgtctcaaaaaaaaaaaaaaattgatttgcaaaataagaattgaccatttattttttgcagtagcacttctaaggtcagaggcacccaggccacggtgttcttaggagtttaataacggccctagatgctgacagatggattctgagccattcagcacactgtcctgaacccagagggcacagaggtggaaagacaccttggcggggaggggcagatcattttggatgatagcacgtggcagttgtataaaacagtgttcttgagaagacaccgtgatgaattcaaatgccacagacggaggtccttagacatgggaattggagagactctgaggcscagcamctattgtcacagataaagggctctgcagaatctatcataaatgtcatcctttttggtccctagaagcaaaacctctcagtgcatggtctccactcggccctattgtcacctaattaaaacagtggagcctggcatgagaagcagacattggcccccttgtcagtttatcaatctcccgccgccaggctcagttgagcatttgaactgttaattggagcatcagtctctttagtgacaagtgagggctcagtcccacctggtgagtcatttgaatcagatgcacgtcgcagtccagtgttcccaagcatcatgttcctctcggatcaggtggttcagtcagtctgcaagcttgggacttttttatttagactgtcagaaacgtcaggagaacagaccctgttttcataatgattgaaatacaccggccttgctccttggccacagggcattagtttgaaaacttagaaggaacaaagtgcagattgggagggactgcctgsaagagtagagagggcccagccagggccagagagagagcatggtgagtcctgcccctgcctgccatgtaacctgtagccattcctttaggggggtgcttgtagggcaatgtgtataaaataccttcctgggtgtcaggctcagaggagggcttaaatgacagcagtgatgtttaccatcctcagatgggtgacgtgtcacatggatcctgccaccccctgagaggacacgcattgccaggtgttgcagcttgggggtgacagtaggtagtcactcactctccccacataggcactggctgctaagtagagcgcccagaggaggtaggtgggagcaggctgtgctggagggagagtcctgtcctgctgggaaacytcctatgtggaaacttgtttcacagattcttagcatttatagcataaagcctcaggtcagggtaaggatactcagttctgcatactaactcaaaaggcctagcagtgccagtttctccctctttaggggtgatacttgatcttgcactttatgagtgttggatgtttcccatactctcttctctcgtatctccctctctccttccctccctctcacctcctcccttcctctccccctttctcagtaaagtggagcagtactcgtcacctgcttcaaagtatacctggaaggaggagcaatgataggaaaatcrtatttgtatgtattaatatacaggtttgctgctggaaaatttttttaaatagggatatttttgagattactaaagctttagcattgtaaaacatttatttggactctactgatttggaattggtgagagtcatacgtgggccgggctcaagttctttgctaagaaatcagtgatgcaaggctgggtgcgttggctcacacctgtaatcccagcactttgggaggccaaggcaggtggatcacctgagatcaggagttgaagaccagcctagtcaacatggtgaaactccgtctctactaaaaatacaaaaattagctggacatggtggcaggcgctgtaatgtcagctcaggagactgaggcaggaaaatcacttgaacccaggaggcagaggttgcagtgagccgaatcgcgccattgcactccagcatgggcgacaagaatgaaactccatctcaaaaaaaaaaaagaaaaagaaaaggccaggcgtggtggctcacatctgtaatcccagcactttgggaggccgagacgggcagatcacccgaggtcaggagtttgagaccagactggtccaacatggtgaaccccatctctactagaaatacaaaaaaattaactgggtgtggtggtgcatgcctgtagtcccagctacttgggaggctgaggcaggagaatcgcttgaacccgggagtcagaggtcgcagtgagctgagatcgcaccactgcactccagcctgggtgacggagtgagactctgtctcaaaacataaataaataaaaagaaaaaagaaattagcgatgctagcaagcctgttggaatgtatgtaacctgttgagaggattatatgctttatgcagttgtagttgagggcactgtgttcatcacagcagacccagagaccctctgcttggaaccattgtaagttgctctgacttcccagttgagtccactcctagcccagctgcgtgtttaaagcatctgcaggtccgccttgccatagcattagactgttgatccagattagcaaggttttgattaaagttttgacatgaaacaatttttttctattttaaaacttattagaggactgaatggtatcttaattgatttatgtccagaagaatgagattaaatgaaagtccaaaaagcaccctttgtactaagaagggccctcttcttacgtggggaatgtctccttgtgattcccgacatagtgggggcttaccccgaggtgtgacctatgggttttggggaggagtgaatgatgcagtgccctcaaaggcttgatgtgcacacagtggcgtatggtgtgcagttcgtgagtgctgtygtcattgtcgccattgtcattgttctgatgaaacactctggtactatttgtgttttttgtaaaatggttcagaaatgactagactgtctttcagcccattggtgacagcctgccccgtcctgttaattgtcattgttatctcttccttgttggcaacagaattagctacatccatctgatggcacattttcgaatgcacactcaaataaaaaaccaaacagctgccctcattagcggattccgttccattatcaaacccgagtggatccgaatgttctcaactcctgaactgcagcgtctcatctctggygacaatgctgagattgatctggaagatttaaagtaagaggcgggtggggggaagggtgaaattccttggcctcccagaaagccagctgctccctcgctgggttccttttagagagttgttttaggagcctgtctccagatctccttctcctccctggactggctagactgctttggattaaaagcttgaccacttgtctgcctagagattaagaagtggaagcaggcctgaggactgggggttctctgaagctctaggagatggggtcagaggatctggggctggcctctgcttgggaacagcagggccagctctcaaattccccacccttttagcttcccagggagatagagttattgaggcatgaacttctggctttaagagaaattagtagtgttccccaggcctgccagagtggaccgtgccagctgtctgcatgacctgcctgcctgtccataagtgcccacgctagcacattgctgagcccaggtctgtattgctttcaggaagcacacagtctactacggtggtttccatggaagtcacagagtcatcatctggctctgggatattctggcctcyracttcacaccggatgagagakctatgtttctgaaggtattttatttattacctatgcatgcatgcatgtattctcataaacctggaaggccagttgatgtaataatttacgctgaagaaactgaaattatcaggaggacctcagatagtcagcacatcctctcccacaggcaggcctcccggtaggccaagcagtaaccagagaggggcttgaggggcacggccgagcctgctgtgtgtccctggctgcagggacaggccccctgcacaggtgggcatacctgttgtgctcggcactccgtcctcccctttgcctatgctggccttgataacatcttttttctttatttcctttcatyatagaagtaaatgaccctctgcttggaaccttaccttaggaaaatacagataagcaaaataytaaacaattgctgttcctccagtatggaattgtcaactctctacactcctactcaccagggactrtctctctatacccattttctcaatagcgtaagacacacatacacacccacagtgtcccaataaaacacacacaattgcttaggctgatatcaagatgtatttttgcaaataaagtggctgacgttaactggttccccagttatggtgtctgtaaaagttgtaaatgttcaaaatattcccctaatgccattgcattgttttttgttactgacatcagcagtgtgtaagtatttcytaggacgctgaatggcacacacgcttctctgtgtatgtgttatatatgtgtatatttctctaaaaatgggatcctatcatttcccaccagccttcctacttgacagaatatcaatgaacattttgccatgttctggtggtaaatttagtgccttgaaatgttttcttttggaggtttgggcttgaacaatctcatgtggcctcatctgttgaggcaacctggacagtgtcactggcaattaaaatgacagctggtttcctctctcctgggtggtcattctgaggagagtttattcctgttgaagaggccctcacgcagtccagcagataacacaaatgccccacatccccacaggtctccggggatttaggatgggcaggcagacagaattccagaagttgattctgggagaatcagttcagttttcccagaagtgcctcatgggcaaagcagtttctgccaagctataaaacggctcacgctggcccctcctacagaggaaaaccagtgtctcatcattgtgcaggtgctgccccacaaaacaggtgtgtttgtgcctttggataacctgtcaccaaacctacagttccttaccatgtgcctgcccttttgtgcagctgcatacaggccccagagccaagcagaagaaatgtaacccttgcccaggagtggatgtgaccacgaccatgcttctcttaaatgtaaagcaagcagagcatccaggggtttcctgtgtcctccgcccctccccgctcgcaggagcgggaaagcttccctccctcctttcacccacctgaatttgcagcgggcagacctgagccggcctaaattgggatgcacagatacttctgtgtctgtccccttattcttaaaacaggactaaccacagccccgacacacagcatccgtagagtgmttggatgaggttgcattcagggaatgctcgtcacagtgtgraaacacaaaaatgcttcctgcattgatgctgctatggtttttataaataaaacatgttagaataggaatagatcttgttaatactctttttaaaactttttttgatgcccgacacacataaactgtctttggatggtctcaggaayctcagaaccatttataacagacccaaaccctcaaattgcccctgagttttggaggacagcttgatgatgtaagtgacaagcccctgtatcccctagagaagggagaacattcttggctactgttgagttaaagtgaatggtttcttgggacactcctgtgcaagtttatcacttagatttccaggctggtcagatgcctctctccaggcacgagctagcacatttgcaggaataacgcaggggctgccgcttggagaacgccgggagttcccagggggtagcagggaagtgtggctggctgcccacaggccccacttgggctgccggcacctcagcctgctctgcagcctcactggctctggggcctcatttttgtcagtgtgctgagaggttattagtctcttgcacagggtcccccggggccccagcacatagaccactctaaatcagcaggcccagggctcaggtgactgcacctgtgcagtcccctctgcatgaataaggagccggcaggatgccaagtgcaaggccagtgagtgcgggtctcccgggctccctctgttcgcaccacgtgcagtgggtgccaccagcctccgcctcgccctcaccgtctcccattttctcctcacatggtctctctgtgggagggtgtcagctgctgctctgttcctcttaacaatcccacaggagacctgcctctcggggacgcctcaccagtgccctggctgggcatttgtgctgttcctactctgcagtcacacgtgctctcacaagtggccagtcgcacctattgggtatgggtttcatgtgtcttagtccccgagagcagcacccttgagagagatgtacggcgtgtgccagttttggggccagatccaccccgccactccatacggctggctagacagcagttacaacacggtaacagacagagcaaacacgtgctacacagctgcaagggccygtcctggaagagcaggagcctgccccgtccccactgaccctgctttgtgttgcagttcgtgaccagctgctccagacccccgctcctgggattcgcctacctcaagcctccattctccatccgctgcgtggaggtgtcggacgatcaggtacccccacggggtgggtggggaagagccttgacttccctcttggtggttgtctgctgtgcccactgtgcaaggcccttatctagtccatatctcagcaaggcaggcagctggaccsctcagagccaagtgaggagggccccacagttctcacggcaggagaaccagccagccccagagagactgcccacggactcagccctctctcggcagcccctttctctttccttcctcagggaagggtacctggagtgggggtgggtacgtgctgtttttagtggcgtctggcctcaccagggctccagatctgaggcagcatgggagaaagtgagagagtgggctcaggaggcaggcaggcgcagactcgaatgctactcctaccccagcaggctgtgcacgtccaggctcgctgcttcatttcctcattggccaaaggagaaggaaagccttcagggttacrgagctctgtgtgtctcaagcctggcccactgtgggtgctcaaatgagagtcctactccccataaaaacccagtggccgcctctgggtgtagctgcctctcatgatgcagtttgagcccgtgatgccaccttgtacaggaagctacacagtcctcrgcctccatgcttaagggaaagttggcccaagtcatggtctgccaccggccacagcaccrgtgaggagggaggagtgcattcagaaatgtttgggcacctaacagtttttacagcattctactttttgtcaattggttaaccagtaattcgctgtgaaccggaaggccccatttccaaaagcttacttagtgcaggaattctctgtgcaggccccagggagaaggggttccttctctggaagccagtcgtcttgtgtctggggcttgacctcgggtagtggtgccagggcagcgccctgcactctgcccagcatccagggactggccagatcccctccctgggctccctggccttggcatcagcctgggctcccaaactaggcccttcccaattcaaggccacgatgtgtgccttcaggacaccggggacactctgggcagcgtcctccggggcttcttcaccatccgcaagcgggagccaggcggccgcctgcccacctcctccacctgcttcaacctgctcaagctgcccaactacagcaagaagagcgtcctccgygagaagctgcgctacgccatcagcatgaacacgggctttgaactctcctagctcctgtcccagccctgcctccagggctcctgggctgccagggaccttcagctcccagaggcagtgtggtcctgggaatgtgaccaacatgccaggtgacattggcccctagaccctctctatagccatgagactccttgtggcctcaagaaatttagacgcccacgacagcactacacagcatctccaggtgatgcccaaggcacagggctgcagaaaataaacctccagattccaccaacacgggtccattcttcctggtgatggcagaggggcttcttttagctagtttgatcttttgggagtctgtctttccttagccgtctgagtgagctgtgtatgaacaagtcccaggagttccaagagtctagagtggtttttgcagcatgggttgagtgtacaaagcctactgtgcgtgagatcctctccttccgtttctgaaatctcttactcaggtaaggcctcgccaagcctctatgcaccccacaaagtttctgcctccatgccgtccacagcgcctcttcccagacagccaggcccatctgctgcccagggaagcgcaggcgcctgctagggacgctatggacaccgtgagtccaaggcgctgctcctgccttgaagccacgcgctccacgccgcggccctcccattttctgcgtcctcagcgggctgagctgccagagagycttcccggacctattcccgtcctrtgcattcacattggcatcctggtttgggggaagaaaaacaacggcccttagcagcagccccgtttccagaatgtgctgcctgttccccaaagcctgcttgtcccgcggaggacggctgcctttgaccctgcttatttgtctcactggttatctaatgaggaacaaacactaacctaaggtacacatcccatctgggcggtggcttcactcctgagtctgcaaaatcccaggaaacttgggtcttgctgcccatccttcctcagcacagggaacccggaagcccgttgcactgacagaggctcacaccctctgggttttttgttttttttttaaacttcatttctcttccaacccattgtgttcctctgccctcattctttacctttgttgtaagaactttagctccagggaactgaggcagaggccctgtttgtggtctgtgttgacagccacccaccctctcccacctcatgctcctgcacctgcaccaccaaggttgatgccggattcgaagccaggaaggcccagtccctcctctgctctcctcaaagacgcaaaacattttccaacaagagctgtcacagtggcagcaaagcaggggccacccgtctccacagtccttcagagtttcagctgcatcctggtgtcccacccaggtcgagcccccaggcttctggaaaasartgtgtgctctactttgatggaaacatggcaaggaatttaaagacaggratgtattaatattattgaaggtgtgttcgtaacctctgattctgtggacttgccactttctccaaacgctcggttcctttgaagatttcttctgaacgtgtgtgcgcacgctgggcgggttygtgcatacatgcggggaccccagactgtcagcacagggargawggatcccatcctaatttttatcacctgaaggttggaaccagtgagggactgggagagagtgatttataarcaccaatatcaacttcatgtggatttttgacragraggggtagtttgtaatttcatttaaattcttttcagcagctggaaatattgcactatctgaaacactgaatctccttttgtaactggtgttcactgacaccttgatggctcttgatggctctaaaaagttgtaggattttttgtttttgtagctaacttatggattgagatgtgatcaaaggctttattaaatttgtacttcagcawatgatggctgcgttctgcatttcattccgccatatgcctggaccgttcacacttgggtatctgggcttagggagcatgtaggcttccacaatggagggaagatgtggaggggcgcagagcacatgtcctcatctccccagccagagttcagggatgttggcagtctgtcctatttgcttccaattgtgtttcaagaagtaacacatttcagatgagcaccctctatgggcccatccctctcacccacttcccagaggcagctgtcaccataggttgggtgtatatctttgcagtccatgttttacacagtaatattctttttttgtttttttgagatggggttttgccatgtcacccagaccagtcgcgaactcaggggctcaagtgatccgcccaccttggcttcccaaagtgctaagattactggcatgagccaccatgcccagccagtagtaactttcaaaagtgatcaacggatgttgaacaaacccagataagtgtctggagtgaaattttacagctacttctgggtgtgccaggcgttgttcccttagtgaggattgcacttgctgtctccccacaggacacgcagccgttctcactgcattccccagccaggtttcctccgcaccaggagcccaggtcagacctgccaggtgtttgccccgccttggtgcttctgtcctgaccctcggcagctctgaagtcccagtggcttctcgctgctcccctggcctgggaagcccctgaggatcagagcacaaacttggcttgttaggatccagtcaggaaagaaccctggagaggcttgtggcctctctggaagtcagatgtctcaacacccaagaagaattcatgcacgcaggcgtcctcacaaggagcgttcatgtaactaaaagaaaaaacagtgtaaccacctgcctccccaaaacacacatcgccagcctccagtgtgaggcacacccacctaaaactaaagctttattctgtgacattctggcttttgttttgttttgtttttttgagatggagtctcgctgtcgcccaggttggagtgcagtggcgcgatctcagctcactgcaggctccgtctcccaggttcacaccattctcctgccgcagcctcccacatagctgggactacaggtgcccgccaccttgcctggctaattttttgtatttttaggagagacagggtttcaccgtgttagccaggatggtcttgatctgacctcatgatccccccgcctcggcctcccaaagtgctgggattacaggcgtgagccaccgcgcccggccaacattctggcttttacttacaagttatcactacaaagagaaaggatgtctttataaccaggaaaaataagtgagtttttaaaattatttaaatggaaatataattgtaatatgctgacagaacttgcaagtgcctaagaataattagctggaacagagtttgagaagcgctggcctccactcttctgacagcagcagagcctgttagcagacaaggcactgctgaaagccatagggtctggacagctgggttctcgccaagcttggcgagtaaatccaggacccccttaagcctcaggcttatctcctggaaacttatcaaattggccagagtggccggagaactgtggaagtggttccttcagtgctgttttccaagaagcagagcgtgggctctggaatcgcagagatgtgtgagcaaaccccaaccctccacttcctgccccacgtggagggcagcytccctgtgtgttccttatctagaacacaggaatcttgatgtcccctccagagcacgtgaggattaaatgcagttacatatgacgcacccagcgcagcacctggcaccaagtacgcatccgttagtcctcttcctacatttcctcacctttcactttaagaaaacagggctgcccatgaccctggagatcaggctcggattaagcttccagagtggctcctgctgctgctgatgatcccagcagggtgaggagatgctggatggagagcagttatctgttgcacttaggcaagatcggaggaaagtcacattccctcatccacactgccgcctctgaggaatcgtctgagtagcacagaacagaagcaaagtgcctttcagccagaaggatccagccaaggcgtttccaggcccctgtggcctcagggcacctcactgtgccccctacactgcacatacaatcgcttggactgtgattcagaagaagctgcatggccaggctcggtagctcatgcctgtaatctgaacactttgggaggctgaggcgggcagatcccctgaggtcaggagttccagaccatcctggccaatacggtgaaaccctgtctctactaaaaatacaaaaatgacctgggtgtggtggcgcacacctgtagtcccagctactcgggaggctgaggctggagaattgcttgaacccaggaggcggaggttgcaatgagccaagatcacaccactgcactccagcttgggtgacagaatgagactccgtctcaaaaacaaaaaaaccccacaaaaacaaaactgcacagcagcctaggcggcattcatagttctcaccaccctctggagcgtggggtcagaatggcatcctttgcttcacggcagtcatcctgactgttacacttgttgagagcatgtgctccagagccccagctgagtgcagatcttacgagggcattagagagagcaagagcctcagagcatcctgccgctgggtgcaaaccccagctctgccgcccacgatctgggaggccggtggaaagtttcctggcccctcagacctgcagtttcctcttccatgaaacgaggatagcagcacccaccatgcagtcttgccgtgaaccacagagaaatgggctgaaaagccccagtctgtgccatctatgagccatcaatgactcatggctgtgataactgtcattattttgttccagggatcgaattgacattccttctggagtttgtttttgaaactccttgcaagacgctttggctgacgttaacaggacatcccggggatcctctgctgggcttcgctcagcccctggtgtgcaggctccctgtgtgcccacaccccagctattcccgagcttccattatgcactgggggcagcagctcctccacccggggaccagcagttgcagttccatcatgcttttcttaccgtgacagtccaagtgttttctgagctgtagggagactcaaagccttgggcatactgggatggggtctstgtcagcttatagaccttccaccgagagagccagcctgctggagcccaccagcaacgacagagaaacctctctgaagatgtgccctgcctccttgaccccagagaatcctgcagaggaagctgaaagcgttcattctgctgccgaagtcttctgctccttggctgccccaggccctgagtctgcctagatgtatgtgcagggtttgggtgggggatttttggtttttgtttgtttgttttttgagacagggtcttgctgtgttgcccaggctggatcaagattgcccaggcgcaatcttggttcactacaacctccgcctccgaggctcaagcaatcctcccacctcagcctcccaggtagctgggaccacaagtgtgcatcaccacaaccggctagtttattttgtattttttatagaaacagggttttgccatattgcccacgctggtcttgaactcctgggctcaagcaatccacctgccttggtctcccaaagttctgggattacaggcatgagccattcactgcaccgggccccctatgtgcagggttaccagtcaggctgccttctccaaatgcttctaaatctggtttttatggggccatggcagtggccactgagtaaaggaagacacttgtcggaatggcacatggatgtttaaaaaactcagtgttctggaaacccagtgtccttggccttcagaccacgggcatgtgaaagagaagctattgtgaagtcattctggcccttccaggactgcccctcacacagagtcctaaactagcctgccttatgctggggagggacaagttattttacaacaagaacattgtagccagaacttgtgtgttgtagccagaacttgtgctgttgcaaagagcagaagctggcagaccagctcagagccagagcaggtggtgaggaggtatgagagcggctctgggacccacgcaagaagtgcggtgggcgggagctgaggtggtcctctcctcctcttgggccacatgagcccttctctgcacgtctctggctccagcgtccccatgaactgcctctgagtccaccatccttgcagctatgcagccttgcgctcctggggcctctagccaaaccactgctgcatccctcagaccatgttccagcgtggtccacctgcctgcggctgagtggccttcagctagggtcccctcactagtctggtcagctctgatgagacaggctaggatcctgcaggcagcaggggctgtagacacagcagttcccagataaagaggccgcagaagaccaagcagtgacccaggccggtgacgggcaatgtggactagtggtcaagggcacaggccttgaccttggacctgtacttgagctcggatcaccacacccaccctcagtgacttgagagtaggcagcatttcacttctcggagattcattttccccagctgtaaagtagtgaataacagttcctgcctgccatgaggatyaaacgaggtcacatctgttaagcacctggcaaattatagttgcccagtaaatgctatctccccttcttccttggccttggggccaggcagggtggagtattgggtcagaaggtaactctcattgctgttctaaaacaattccattggctcctatattggtttcccatggctgctgcaacaaatcacaacaagccgggtggcttaaaacaacggaaatgtattctcctcggacagttctggccagaagcctgaaatcaaggtgcccacaggcagcactccctctggaggctctggggagaagcctgccctgcctcttctagcttctggtggcccctgcgtgcttggctgtaactgtatcactcccatctctgcctccatccccatatagtcttccctctagggcttcctctttctccttctcttagaaggacttgtccttgaattaggacccaccctcacccaagatgatctcatcttgtggtccttaccttaattacatctacaaagacctgtttccaaaaaaggtcccatgcacaggttctgggggttagcacttggacagattgttcagggggacaccattcaacccactacaactgtcttccagagcaagtgtggcaggaggtgattcttcatgccatgaaccaccacatgctcacagatcctaaacaatctcatagggtgagggggtgaaaaggagaattgcttattcaaggacgggaaatatttggcgcctgtgtcatcactgcctcctcctcacccatggcagacattactaattgattcctgcactgtgtcttcatgtgctgctttcagcagtccatgggtatgggcctgggaagctaaacctgtttgccatttcctggcttatgtcttgtctcaaaagtgtagtagaaataataatagtcataattaacatttactcaggtgccagccactttttcttggaatatgtcaccaaatcctctcaatagctctgagatcatactattaatcccgtcctcaagatggtgtatgggttgaattctgtcccaaaaaagatgcatcctaacccccactacctcagcatgtggccttatttggaaatagggttgttgtagatgtaactagttcagatgaggtcatataggagtagggtgggaccctaatccgatgtgactggtgtccttacagaaagagaggactcggccatgtgaagacagaggcagagactcaagtggggaaccttcaggccaaggaacgca
